United States Patent Application Publication US 2025/0305002 A1 - sequence listing, part 2

SEQ ID NO: 531 - protein, 2082 aa, synthetic construct
MPAAKRVKLDGGDKKYSIGLDIGTNSVGWAVITDEYKVPSKKFKVLGNTDRHSIKKNLIGALLFDSGETAEATRLKRTARRRYTRRKNRICYLQEIFSNEMAKVDDSFFHRLEESFLVEEDKKHERHPIFGNIVDEVAYHEKYPTIYHLRKKLVDSTDKADLRLIYLALAHMIKFRGHFLIEGDLNPDNSDVDKLFIQLVQTYNQLFEENPINASGVDAKAILSARLSKSRRLENLIAQLPGEKKNGLFGNLIALSLGLTPNFKSNFDLAEDAKLQLSKDTYDDDLDNLLAQIGDQYADLFLAAKNLSDAILLSDILRVNTEITKAPLSASMIKRYDEHHQDLTLLKALVRQQLPEKYKEIFFDQSKNGYAGYIDGGASQEEFYKFIKPILEKMDGTEELLVKLNREDLLRKQRTFDNGSIPHQIHLGELHAILRRQEDFYPFLKDNREKIEKILTFRIPYYVGPLARGNSRFAWMTRKSEETITPWNFEEVVDKGASAQSFIERMTNFDKNLPNEKVLPKHSLLYEYFTVYNELTKVKYVTEGMRKPAFLSGEQKKAIVDLLFKTNRKVTVKQLKEDYFKKIECFDSVEISGVEDRFNASLGTYHDLLKIIKDKDFLDNEENEDILEDIVLTLTLFEDREMIEERLKTYAHLFDDKVMKQLKRRRYTGWGRLSRKLINGIRDKQSGKTILDFLKSDGFANRNFMQLIHDDSLTFKEDIQKAQVSGQGDSLHEHIANLAGSPAIKKGILQTVKVVDELVKVMGRHKPENIVIEMARENQTTQKGQKNSRERMKRIEEGIKELGSQILKEHPVENTQLQNEKLYLYYLQNGRDMYVDQELDINRLSDYDVDHIVPQSFLKDDSIDNKVLTRSDKARGKSDNVPSEEVVKKMKNYWRQLLNAKLITQRKFDNLTKAERGGLSELDKAGFIKRQLVETRQITKHVAQILDSRMNTKYDENDKLIREVKVITLKSKLVSDFRKDFQFYKVREINNYHHAHDAYLNAVVGTALIKKYPKLESEFVYGDYKVYDVRKMIAKSEQEIGKATAKYFFYSNIMNFFKTEITLANGEIRKRPLIETNGETGEIVWDKGRDFATVRKVLSMPQVNIVKKTEVQTGGFSKESILPKRNSDKLIARKKDWDPKKYGGFDSPTVAYSVLVVAKVEKGKSKKLKSVKELLGITIMERSSFEKNPIDFLEAKGYKEVKKDLIIKLPKYSLFELENGRKRMLASAGELQKGNELALPSKYVNFLYLASHYEKLKGSPEDNEQKQLFVEQHKHYLDEIIEQISEFSKRVILADANLDKVLSAYNKHRDKPIREQAENIIHLFTLTNLGAPAAFKYFDTTIDRKRYTSTKEVLDATLIHQSITGLYETRIDLSQLGGDGGGGSGGSGGIPWLMKKPLQLTTLVPLQEYEERLLKQTMLTGSYKEKLQSLFLKYDALWQHWENQVGHRRIKPHHIATGTVNPRPQKQYPINPKAKASIQTVINDLLKQGVLIQQNSIMNTPVYPVPKPDGKWRMVLDYREVNKTIPLIAAQNQHSAGILSSIFRGKYKTTLDLSNGFWAHSITPESYWLTAFTWLGQQYCWTRLPQGFLNSPALFTADVVDLLKEVPNVQVYVDDIYISHDDPREHLEQLEKVFSLLLNAGYVVSLKKSEIAQHEVEFLGFNITKEGRGLTETFKQKLLNITPPRDLKQLQSILGLLNFARNFIPNFSELVKPLYNIIATANGKYITWTTDNSQQLQNIISMLNSAENLEERNPEVRLIMKVNTSPSAGYIRFYNEFAKRPIMYLNYVYTKAEVKFTNTEKLLTTIHKGLIKALDLGMGQEILVYSPIVSMTKIQKTPLPERKALPIRWITWMSYLEDPRIQFHYDKTLPELQQVPTVTDDIIAKIKHPSEFSMVFYTDGSAIKHPNVNKSHNAGMGIAQVQFKPEFTVINTWSIPLGDHTAQLAEVAAVEFACKKALKIDGPVLIVTDSFYVAESVNKELPYWQSNGFFNNKKKPLKHVSKWKSIADCIQLKPDIIIIHEKGHQPTASTFHTEGNNLADKLATQGSYVVNAGKRTADGSEFEKRTADGSEFESPKKKAKVE

SEQ ID NO: 532 - protein, 2085 aa, synthetic construct
MPAAKRVKLDGGDKKYSIGLDIGTNSVGWAVITDEYKVPSKKFKVLGNTDRHSIKKNLIGALLFDSGETAEATRLKRTARRRYTRRKNRICYLQEIFSNEMAKVDDSFFHRLEESFLVEEDKKHERHPIFGNIVDEVAYHEKYPTIYHLRKKLVDSTDKADLRLIYLALAHMIKFRGHFLIEGDLNPDNSDVDKLFIQLVQTYNQLFEENPINASGVDAKAILSARLSKSRRLENLIAQLPGEKKNGLFGNLIALSLGLTPNFKSNFDLAEDAKLQLSKDTYDDDLDNLLAQIGDQYADLFLAAKNLSDAILLSDILRVNTEITKAPLSASMIKRYDEHHQDLTLLKALVRQQLPEKYKEIFFDQSKNGYAGYIDGGASQEEFYKFIKPILEKMDGTEELLVKLNREDLLRKQRTFDNGSIPHQIHLGELHAILRRQEDFYPFLKDNREKIEKILTFRIPYYVGPLARGNSRFAWMTRKSEETITPWNFEEVVDKGASAQSFIERMTNFDKNLPNEKVLPKHSLLYEYFTVYNELTKVKYVTEGMRKPAFLSGEQKKAIVDLLFKTNRKVTVKQLKEDYFKKIECFDSVEISGVEDRFNASLGTYHDLLKIIKDKDFLDNEENEDILEDIVLTLTLFEDREMIEERLKTYAHLFDDKVMKQLKRRRYTGWGRLSRKLINGIRDKQSGKTILDFLKSDGFANRNFMQLIHDDSLTFKEDIQKAQVSGQGDSLHEHIANLAGSPAIKKGILQTVKVVDELVKVMGRHKPENIVIEMARENQTTQKGQKNSRERMKRIEEGIKELGSQILKEHPVENTQLQNEKLYLYYLQNGRDMYVDQELDINRLSDYDVDHIVPQSFLKDDSIDNKVLTRSDKARGKSDNVPSEEVVKKMKNYWRQLLNAKLITQRKFDNLTKAERGGLSELDKAGFIKRQLVETRQITKHVAQILDSRMNTKYDENDKLIREVKVITLKSKLVSDFRKDFQFYKVREINNYHHAHDAYLNAVVGTALIKKYPKLESEFVYGDYKVYDVRKMIAKSEQEIGKATAKYFFYSNIMNFFKTEITLANGEIRKRPLIETNGETGEIVWDKGRDFATVRKVLSMPQVNIVKKTEVQTGGFSKESILPKRNSDKLIARKKDWDPKKYGGFDSPTVAYSVLVVAKVEKGKSKKLKSVKELLGITIMERSSFEKNPIDFLEAKGYKEVKKDLIIKLPKYSLFELENGRKRMLASAGELQKGNELALPSKYVNFLYLASHYEKLKGSPEDNEQKQLFVEQHKHYLDEIIEQISEFSKRVILADANLDKVLSAYNKHRDKPIREQAENIIHLFTLTNLGAPAAFKYFDTTIDRKRYTSTKEVLDATLIHQSITGLYETRIDLSQLGGDGGPAPGGGGGSGGIPWLMKKPLQLTTLVPLQEYEERLLKQTMLTGSYKEKLQSLFLKYDALWQHWENQVGHRRIKPHHIATGTVNPRPQKQYPINPKAKASIQTVINDLLKQGVLIQQNSIMNTPVYPVPKPDGKWRMVLDYREVNKTIPLIAAQNQHSAGILSSIFRGKYKTTLDLSNGFWAHSITPESYWLTAFTWLGQQYCWTRLPQGFLNSPALFTADVVDLLKEVPNVQVYVDDIYISHDDPREHLEQLEKVFSLLLNAGYVVSLKKSEIAQHEVEFLGFNITKEGRGLTETFKQKLLNITPPRDLKQLQSILGLLNFARNFIPNFSELVKPLYNIIATANGKYITWTTDNSQQLQNIISMLNSAENLEERNPEVRLIMKVNTSPSAGYIRFYNEFAKRPIMYLNYVYTKAEVKFTNTEKLLTTIHKGLIKALDLGMGQEILVYSPIVSMTKIQKTPLPERKALPIRWITWMSYLEDPRIQFHYDKTLPELQQVPTVTDDIIAKIKHPSEFSMVFYTDGSAIKHPNVNKSHNAGMGIAQVQFKPEFTVINTWSIPLGDHTAQLAEVAAVEFACKKALKIDGPVLIVTDSFYVAESVNKELPYWQSNGFFNNKKKPLKHVSKWKSIADCIQLKPDIIIIHEKGHQPTASTFHTEGNNLADKLATQGSYVVNAGKRTADGSEFEKRTADGSEFESPKKKAKVE

SEQ ID NO: 533 - protein, 2087 aa, synthetic construct
MPAAKRVKLDGGDKKYSIGLDIGTNSVGWAVITDEYKVPSKKFKVLGNTDRHSIKKNLIGALLFDSGETAEATRLKRTARRRYTRRKNRICYLQEIFSNEMAKVDDSFFHRLEESFLVEEDKKHERHPIFGNIVDEVAYHEKYPTIYHLRKKLVDSTDKADLRLIYLALAHMIKFRGHFLIEGDLNPDNSDVDKLFIQLVQTYNQLFEENPINASGVDAKAILSARLSKSRRLENLIAQLPGEKKNGLFGNLIALSLGLTPNFKSNFDLAEDAKLQLSKDTYDDDLDNLLAQIGDQYADLFLAAKNLSDAILLSDILRVNTEITKAPLSASMIKRYDEHHQDLTLLKALVRQQLPEKYKEIFFDQSKNGYAGYIDGGASQEEFYKFIKPILEKMDGTEELLVKLNREDLLRKQRTFDNGSIPHQIHLGELHAILRRQEDFYPFLKDNREKIEKILTFRIPYYVGPLARGNSRFAWMTRKSEETITPWNFEEVVDKGASAQSFIERMTNFDKNLPNEKVLPKHSLLYEYFTVYNELTKVKYVTEGMRKPAFLSGEQKKAIVDLLFKTNRKVTVKQLKEDYFKKIECFDSVEISGVEDRFNASLGTYHDLLKIIKDKDFLDNEENEDILEDIVLTLTLFEDREMIEERLKTYAHLFDDKVMKQLKRRRYTGWGRLSRKLINGIRDKQSGKTILDFLKSDGFANRNFMQLIHDDSLTFKEDIQKAQVSGQGDSLHEHIANLAGSPAIKKGILQTVKVVDELVKVMGRHKPENIVIEMARENQTTQKGQKNSRERMKRIEEGIKELGSQILKEHPVENTQLQNEKLYLYYLQNGRDMYVDQELDINRLSDYDVDHIVPQSFLKDDSIDNKVLTRSDKARGKSDNVPSEEVVKKMKNYWRQLLNAKLITQRKFDNLTKAERGGLSELDKAGFIKRQLVETRQITKHVAQILDSRMNTKYDENDKLIREVKVITLKSKLVSDFRKDFQFYKVREINNYHHAHDAYLNAVVGTALIKKYPKLESEFVYGDYKVYDVRKMIAKSEQEIGKATAKYFFYSNIMNFFKTEITLANGEIRKRPLIETNGETGEIVWDKGRDFATVRKVLSMPQVNIVKKTEVQTGGFSKESILPKRNSDKLIARKKDWDPKKYGGFDSPTVAYSVLVVAKVEKGKSKKLKSVKELLGITIMERSSFEKNPIDFLEAKGYKEVKKDLIIKLPKYSLFELENGRKRMLASAGELQKGNELALPSKYVNFLYLASHYEKLKGSPEDNEQKQLFVEQHKHYLDEIIEQISEFSKRVILADANLDKVLSAYNKHRDKPIREQAENIIHLFTLTNLGAPAAFKYFDTTIDRKRYTSTKEVLDATLIHQSITGLYETRIDLSQLGGDGGGGSGGGEAAAKGGIPWLMKKPLQLTTLVPLQEYEERLLKQTMLTGSYKEKLQSLFLKYDALWQHWENQVGHRRIKPHHIATGTVNPRPQKQYPINPKAKASIQTVINDLLKQGVLIQQNSIMNTPVYPVPKPDGKWRMVLDYREVNKTIPLIAAQNQHSAGILSSIFRGKYKTTLDLSNGFWAHSITPESYWLTAFTWLGQQYCWTRLPQGFLNSPALFTADVVDLLKEVPNVQVYVDDIYISHDDPREHLEQLEKVFSLLLNAGYVVSLKKSEIAQHEVEFLGFNITKEGRGLTETFKQKLLNITPPRDLKQLQSILGLLNFARNFIPNFSELVKPLYNIIATANGKYITWTTDNSQQLQNIISMLNSAENLEERNPEVRLIMKVNTSPSAGYIRFYNEFAKRPIMYLNYVYTKAEVKFTNTEKLLTTIHKGLIKALDLGMGQEILVYSPIVSMTKIQKTPLPERKALPIRWITWMSYLEDPRIQFHYDKTLPELQQVPTVTDDIIAKIKHPSEFSMVFYTDGSAIKHPNVNKSHNAGMGIAQVQFKPEFTVINTWSIPLGDHTAQLAEVAAVEFACKKALKIDGPVLIVTDSFYVAESVNKELPYWQSNGFFNNKKKPLKHVSKWKSIADCIQLKPDIIIIHEKGHQPTASTFHTEGNNLADKLATQGSYVVNAGKRTADGSEFEKRTADGSEFESPKKKAKVE

SEQ ID NO: 534 - protein, 2079 aa, synthetic construct
MPAAKRVKLDGGDKKYSIGLDIGTNSVGWAVITDEYKVPSKKFKVLGNTDRHSIKKNLIGALLFDSGETAEATRLKRTARRRYTRRKNRICYLQEIFSNEMAKVDDSFFHRLEESFLVEEDKKHERHPIFGNIVDEVAYHEKYPTIYHLRKKLVDSTDKADLRLIYLALAHMIKFRGHFLIEGDLNPDNSDVDKLFIQLVQTYNQLFEENPINASGVDAKAILSARLSKSRRLENLIAQLPGEKKNGLFGNLIALSLGLTPNFKSNFDLAEDAKLQLSKDTYDDDLDNLLAQIGDQYADLFLAAKNLSDAILLSDILRVNTEITKAPLSASMIKRYDEHHQDLTLLKALVRQQLPEKYKEIFFDQSKNGYAGYIDGGASQEEFYKFIKPILEKMDGTEELLVKLNREDLLRKQRTFDNGSIPHQIHLGELHAILRRQEDFYPFLKDNREKIEKILTFRIPYYVGPLARGNSRFAWMTRKSEETITPWNFEEVVDKGASAQSFIERMTNFDKNLPNEKVLPKHSLLYEYFTVYNELTKVKYVTEGMRKPAFLSGEQKKAIVDLLFKTNRKVTVKQLKEDYFKKIECFDSVEISGVEDRFNASLGTYHDLLKIIKDKDFLDNEENEDILEDIVLTLTLFEDREMIEERLKTYAHLFDDKVMKQLKRRRYTGWGRLSRKLINGIRDKQSGKTILDFLKSDGFANRNFMQLIHDDSLTFKEDIQKAQVSGQGDSLHEHIANLAGSPAIKKGILQTVKVVDELVKVMGRHKPENIVIEMARENQTTQKGQKNSRERMKRIEEGIKELGSQILKEHPVENTQLQNEKLYLYYLQNGRDMYVDQELDINRLSDYDVDHIVPQSFLKDDSIDNKVLTRSDKARGKSDNVPSEEVVKKMKNYWRQLLNAKLITQRKFDNLTKAERGGLSELDKAGFIKRQLVETRQITKHVAQILDSRMNTKYDENDKLIREVKVITLKSKLVSDFRKDFQFYKVREINNYHHAHDAYLNAVVGTALIKKYPKLESEFVYGDYKVYDVRKMIAKSEQEIGKATAKYFFYSNIMNFFKTEITLANGEIRKRPLIETNGETGEIVWDKGRDFATVRKVLSMPQVNIVKKTEVQTGGFSKESILPKRNSDKLIARKKDWDPKKYGGFDSPTVAYSVLVVAKVEKGKSKKLKSVKELLGITIMERSSFEKNPIDFLEAKGYKEVKKDLIIKLPKYSLFELENGRKRMLASAGELQKGNELALPSKYVNFLYLASHYEKLKGSPEDNEQKQLFVEQHKHYLDEIIEQISEFSKRVILADANLDKVLSAYNKHRDKPIREQAENIIHLFTLTNLGAPAAFKYFDTTIDRKRYTSTKEVLDATLIHQSITGLYETRIDLSQLGGDGGGSSGGIPWLMKKPLQLTTLVPLQEYEERLLKQTMLTGSYKEKLQSLFLKYDALWQHWENQVGHRRIKPHHIATGTVNPRPQKQYPINPKAKASIQTVINDLLKQGVLIQQNSIMNTPVYPVPKPDGKWRMVLDYREVNKTIPLIAAQNQHSAGILSSIFRGKYKTTLDLSNGFWAHSITPESYWLTAFTWLGQQYCWTRLPQGFLNSPALFNADVVDLLKEVPNVQVYVDDIYISHDDPREHLEQLEKVFSLLLNAGYVVSLKKSEIAQHEVEFLGFNITKEGRGLTETFKQKLLNITPPRDLKQLQSILGLLNFARNFIPNFSELVKPLYNIIATAPGKYITWTTDNSQQLQNIISMLNSAENLEERNPEVRLIMKVNTSPSAGYIRFYNEFAKRPIMYLNYVYTKAEVKFTNTEKLLTTIHKGLIKALDLGMGQEILVYSPIVSMTKIQKTPLPERKALPIRWITWMSYLEDPRIQFHYDKTLPELQQVPTVTDDIIAKIKHPSEFSMVFYTDGSAIKHPNVNKSHNAGMGIAQVQFKPEFTVINTWSIPLGDHTAQLAEVAAVEFACKKALKIDGPVLIVTDSFYVAESVNKELPYWQSNGFFNNKKKPLKHVSKWKSIADCIQLKPDIIIIHEKGHQPTASTFHTEGNNLADKLATQGSYVVNAGKRTADGSEFEKRTADGSEFESPKKKAKVE

SEQ ID NO: 535 - protein, 2082 aa, synthetic construct
MPAAKRVKLDGGDKKYSIGLDIGTNSVGWAVITDEYKVPSKKFKVLGNTDRHSIKKNLIGALLFDSGETAEATRLKRTARRRYTRRKNRICYLQEIFSNEMAKVDDSFFHRLEESFLVEEDKKHERHPIFGNIVDEVAYHEKYPTIYHLRKKLVDSTDKADLRLIYLALAHMIKFRGHFLIEGDLNPDNSDVDKLFIQLVQTYNQLFEENPINASGVDAKAILSARLSKSRRLENLIAQLPGEKKNGLFGNLIALSLGLTPNFKSNFDLAEDAKLQLSKDTYDDDLDNLLAQIGDQYADLFLAAKNLSDAILLSDILRVNTEITKAPLSASMIKRYDEHHQDLTLLKALVRQQLPEKYKEIFFDQSKNGYAGYIDGGASQEEFYKFIKPILEKMDGTEELLVKLNREDLLRKQRTFDNGSIPHQIHLGELHAILRRQEDFYPFLKDNREKIEKILTFRIPYYVGPLARGNSRFAWMTRKSEETITPWNFEEVVDKGASAQSFIERMTNFDKNLPNEKVLPKHSLLYEYFTVYNELTKVKYVTEGMRKPAFLSGEQKKAIVDLLFKTNRKVTVKQLKEDYFKKIECFDSVEISGVEDRFNASLGTYHDLLKIIKDKDFLDNEENEDILEDIVLTLTLFEDREMIEERLKTYAHLFDDKVMKQLKRRRYTGWGRLSRKLINGIRDKQSGKTILDFLKSDGFANRNFMQLIHDDSLTFKEDIQKAQVSGQGDSLHEHIANLAGSPAIKKGILQTVKVVDELVKVMGRHKPENIVIEMARENQTTQKGQKNSRERMKRIEEGIKELGSQILKEHPVENTQLQNEKLYLYYLQNGRDMYVDQELDINRLSDYDVDHIVPQSFLKDDSIDNKVLTRSDKARGKSDNVPSEEVVKKMKNYWRQLLNAKLITQRKFDNLTKAERGGLSELDKAGFIKRQLVETRQITKHVAQILDSRMNTKYDENDKLIREVKVITLKSKLVSDFRKDFQFYKVREINNYHHAHDAYLNAVVGTALIKKYPKLESEFVYGDYKVYDVRKMIAKSEQEIGKATAKYFFYSNIMNFFKTEITLANGEIRKRPLIETNGETGEIVWDKGRDFATVRKVLSMPQVNIVKKTEVQTGGFSKESILPKRNSDKLIARKKDWDPKKYGGFDSPTVAYSVLVVAKVEKGKSKKLKSVKELLGITIMERSSFEKNPIDFLEAKGYKEVKKDLIIKLPKYSLFELENGRKRMLASAGELQKGNELALPSKYVNFLYLASHYEKLKGSPEDNEQKQLFVEQHKHYLDEIIEQISEFSKRVILADANLDKVLSAYNKHRDKPIREQAENIIHLFTLTNLGAPAAFKYFDTTIDRKRYTSTKEVLDATLIHQSITGLYETRIDLSQLGGDGGPAPGSSGGIPWLMKKPLQLTTLVPLQEYEERLLKQTMLTGSYKEKLQSLFLKYDALWQHWENQVGHRRIKPHHIATGTVNPRPQKQYPINPKAKASIQTVINDLLKQGVLIQQNSIMNTPVYPVPKPDGKWRMVLDYREVNKTIPLIAAQNQHSAGILSSIFRGKYKTTLDLSNGFWAHSITPESYWLTAFTWLGQQYCWTRLPQGFLNSPALFNADVVDLLKEVPNVQVYVDDIYISHDDPREHLEQLEKVFSLLLNAGYVVSLKKSEIAQHEVEFLGFNITKEGRGLTETFKQKLLNITPPRDLKQLQSILGLLNFARNFIPNFSELVKPLYNIIATAPGKYITWTTDNSQQLQNIISMLNSAENLEERNPEVRLIMKVNTSPSAGYIRFYNEFAKRPIMYLNYVYTKAEVKFTNTEKLLTTIHKGLIKALDLGMGQEILVYSPIVSMTKIQKTPLPERKALPIRWITWMSYLEDPRIQFHYDKTLPELQQVPTVTDDIIAKIKHPSEFSMVFYTDGSAIKHPNVNKSHNAGMGIAQVQFKPEFTVINTWSIPLGDHTAQLAEVAAVEFACKKALKIDGPVLIVTDSFYVAESVNKELPYWQSNGFFNNKKKPLKHVSKWKSIADCIQLKPDIIIIHEKGHQPTASTFHTEGNNLADKLATQGSYVVNAGKRTADGSEFEKRTADGSEFESPKKKAKVE

SEQ ID NO: 536 - protein, 2087 aa, synthetic construct
MPAAKRVKLDGGDKKYSIGLDIGTNSVGWAVITDEYKVPSKKFKVLGNTDRHSIKKNLIGALLFDSGETAEATRLKRTARRRYTRRKNRICYLQEIFSNEMAKVDDSFFHRLEESFLVEEDKKHERHPIFGNIVDEVAYHEKYPTIYHLRKKLVDSTDKADLRLIYLALAHMIKFRGHFLIEGDLNPDNSDVDKLFIQLVQTYNQLFEENPINASGVDAKAILSARLSKSRRLENLIAQLPGEKKNGLFGNLIALSLGLTPNFKSNFDLAEDAKLQLSKDTYDDDLDNLLAQIGDQYADLFLAAKNLSDAILLSDILRVNTEITKAPLSASMIKRYDEHHQDLTLLKALVRQQLPEKYKEIFFDQSKNGYAGYIDGGASQEEFYKFIKPILEKMDGTEELLVKLNREDLLRKQRTFDNGSIPHQIHLGELHAILRRQEDFYPFLKDNREKIEKILTFRIPYYVGPLARGNSRFAWMTRKSEETITPWNFEEVVDKGASAQSFIERMTNFDKNLPNEKVLPKHSLLYEYFTVYNELTKVKYVTEGMRKPAFLSGEQKKAIVDLLFKTNRKVTVKQLKEDYFKKIECFDSVEISGVEDRFNASLGTYHDLLKIIKDKDFLDNEENEDILEDIVLTLTLFEDREMIEERLKTYAHLFDDKVMKQLKRRRYTGWGRLSRKLINGIRDKQSGKTILDFLKSDGFANRNFMQLIHDDSLTFKEDIQKAQVSGQGDSLHEHIANLAGSPAIKKGILQTVKVVDELVKVMGRHKPENIVIEMARENQTTQKGQKNSRERMKRIEEGIKELGSQILKEHPVENTQLQNEKLYLYYLQNGRDMYVDQELDINRLSDYDVDHIVPQSFLKDDSIDNKVLTRSDKARGKSDNVPSEEVVKKMKNYWRQLLNAKLITQRKFDNLTKAERGGLSELDKAGFIKRQLVETRQITKHVAQILDSRMNTKYDENDKLIREVKVITLKSKLVSDFRKDFQFYKVREINNYHHAHDAYLNAVVGTALIKKYPKLESEFVYGDYKVYDVRKMIAKSEQEIGKATAKYFFYSNIMNFFKTEITLANGEIRKRPLIETNGETGEIVWDKGRDFATVRKVLSMPQVNIVKKTEVQTGGFSKESILPKRNSDKLIARKKDWDPKKYGGFDSPTVAYSVLVVAKVEKGKSKKLKSVKELLGITIMERSSFEKNPIDFLEAKGYKEVKKDLIIKLPKYSLFELENGRKRMLASAGELQKGNELALPSKYVNFLYLASHYEKLKGSPEDNEQKQLFVEQHKHYLDEIIEQISEFSKRVILADANLDKVLSAYNKHRDKPIREQAENIIHLFTLTNLGAPAAFKYFDTTIDRKRYTSTKEVLDATLIHQSITGLYETRIDLSQLGGDGGGSSGGSEAAAKGGIPWLMKKPLQLTTLVPLQEYEERLLKQTMLTGSYKEKLQSLFLKYDALWQHWENQVGHRRIKPHHIATGTVNPRPQKQYPINPKAKASIQTVINDLLKQGVLIQQNSIMNTPVYPVPKPDGKWRMVLDYREVNKTIPLIAAQNQHSAGILSSIFRGKYKTTLDLSNGFWAHSITPESYWLTAFTWLGQQYCWTRLPQGFLNSPALFNADVVDLLKEVPNVQVYVDDIYISHDDPREHLEQLEKVFSLLLNAGYVVSLKKSEIAQHEVEFLGFNITKEGRGLTETFKQKLLNITPPRDLKQLQSILGLLNFARNFIPNFSELVKPLYNIIATAPGKYITWTTDNSQQLQNIISMLNSAENLEERNPEVRLIMKVNTSPSAGYIRFYNEFAKRPIMYLNYVYTKAEVKFTNTEKLLTTIHKGLIKALDLGMGQEILVYSPIVSMTKIQKTPLPERKALPIRWITWMSYLEDPRIQFHYDKTLPELQQVPTVTDDIIAKIKHPSEFSMVFYTDGSAIKHPNVNKSHNAGMGIAQVQFKPEFTVINTWSIPLGDHTAQLAEVAAVEFACKKALKIDGPVLIVTDSFYVAESVNKELPYWQSNGFFNNKKKPLKHVSKWKSIADCIQLKPDIIIIHEKGHQPTASTFHTEGNNLADKLATQGSYVVNAGKRTADGSEFEKRTADGSEFESPKKKAKVE

SEQ ID NO: 537 - protein, 2087 aa, synthetic construct
MPAAKRVKLDGGDKKYSIGLDIGTNSVGWAVITDEYKVPSKKFKVLGNTDRHSIKKNLIGALLFDSGETAEATRLKRTARRRYTRRKNRICYLQEIFSNEMAKVDDSFFHRLEESFLVEEDKKHERHPIFGNIVDEVAYHEKYPTIYHLRKKLVDSTDKADLRLIYLALAHMIKFRGHFLIEGDLNPDNSDVDKLFIQLVQTYNQLFEENPINASGVDAKAILSARLSKSRRLENLIAQLPGEKKNGLFGNLIALSLGLTPNFKSNFDLAEDAKLQLSKDTYDDDLDNLLAQIGDQYADLFLAAKNLSDAILLSDILRVNTEITKAPLSASMIKRYDEHHQDLTLLKALVRQQLPEKYKEIFFDQSKNGYAGYIDGGASQEEFYKFIKPILEKMDGTEELLVKLNREDLLRKQRTFDNGSIPHQIHLGELHAILRRQEDFYPFLKDNREKIEKILTFRIPYYVGPLARGNSRFAWMTRKSEETITPWNFEEVVDKGASAQSFIERMTNFDKNLPNEKVLPKHSLLYEYFTVYNELTKVKYVTEGMRKPAFLSGEQKKAIVDLLFKTNRKVTVKQLKEDYFKKIECFDSVEISGVEDRFNASLGTYHDLLKIIKDKDFLDNEENEDILEDIVLTLTLFEDREMIEERLKTYAHLFDDKVMKQLKRRRYTGWGRLSRKLINGIRDKQSGKTILDFLKSDGFANRNFMQLIHDDSLTFKEDIQKAQVSGQGDSLHEHIANLAGSPAIKKGILQTVKVVDELVKVMGRHKPENIVIEMARENQTTQKGQKNSRERMKRIEEGIKELGSQILKEHPVENTQLQNEKLYLYYLQNGRDMYVDQELDINRLSDYDVDHIVPQSFLKDDSIDNKVLTRSDKARGKSDNVPSEEVVKKMKNYWRQLLNAKLITQRKFDNLTKAERGGLSELDKAGFIKRQLVETRQITKHVAQILDSRMNTKYDENDKLIREVKVITLKSKLVSDFRKDFQFYKVREINNYHHAHDAYLNAVVGTALIKKYPKLESEFVYGDYKVYDVRKMIAKSEQEIGKATAKYFFYSNIMNFFKTEITLANGEIRKRPLIETNGETGEIVWDKGRDFATVRKVLSMPQVNIVKKTEVQTGGFSKESILPKRNSDKLIARKKDWDPKKYGGFDSPTVAYSVLVVAKVEKGKSKKLKSVKELLGITIMERSSFEKNPIDFLEAKGYKEVKKDLIIKLPKYSLFELENGRKRMLASAGELQKGNELALPSKYVNFLYLASHYEKLKGSPEDNEQKQLFVEQHKHYLDEIIEQISEFSKRVILADANLDKVLSAYNKHRDKPIREQAENIIHLFTLTNLGAPAAFKYFDTTIDRKRYTSTKEVLDATLIHQSITGLYETRIDLSQLGGDGGGSSPAPEAAAKGGIPWLMKKPLQLTTLVPLQEYEERLLKQTMLTGSYKEKLQSLFLKYDALWQHWENQVGHRRIKPHHIATGTVNPRPQKQYPINPKAKASIQTVINDLLKQGVLIQQNSIMNTPVYPVPKPDGKWRMVLDYREVNKTIPLIAAQNQHSAGILSSIFRGKYKTTLDLSNGFWAHSITPESYWLTAFTWLGQQYCWTRLPQGFLNSPALFNADVVDLLKEVPNVQVYVDDIYISHDDPREHLEQLEKVFSLLLNAGYVVSLKKSEIAQHEVEFLGFNITKEGRGLTETFKQKLLNITPPRDLKQLQSILGLLNFARNFIPNFSELVKPLYNIIATAPGKYITWTTDNSQQLQNIISMLNSAENLEERNPEVRLIMKVNTSPSAGYIRFYNEFAKRPIMYLNYVYTKAEVKFTNTEKLLTTIHKGLIKALDLGMGQEILVYSPIVSMTKIQKTPLPERKALPIRWITWMSYLEDPRIQFHYDKTLPELQQVPTVTDDIIAKIKHPSEFSMVFYTDGSAIKHPNVNKSHNAGMGIAQVQFKPEFTVINTWSIPLGDHTAQLAEVAAVEFACKKALKIDGPVLIVTDSFYVAESVNKELPYWQSNGFFNNKKKPLKHVSKWKSIADCIQLKPDIIIIHEKGHQPTASTFHTEGNNLADKLATQGSYVVNAGKRTADGSEFEKRTADGSEFESPKKKAKVE

SEQ ID NO: 538 - protein, 2087 aa, synthetic construct
MPAAKRVKLDGGDKKYSIGLDIGTNSVGWAVITDEYKVPSKKFKVLGNTDRHSIKKNLIGALLFDSGETAEATRLKRTARRRYTRRKNRICYLQEIFSNEMAKVDDSFFHRLEESFLVEEDKKHERHPIFGNIVDEVAYHEKYPTIYHLRKKLVDSTDKADLRLIYLALAHMIKFRGHFLIEGDLNPDNSDVDKLFIQLVQTYNQLFEENPINASGVDAKAILSARLSKSRRLENLIAQLPGEKKNGLFGNLIALSLGLTPNFKSNFDLAEDAKLQLSKDTYDDDLDNLLAQIGDQYADLFLAAKNLSDAILLSDILRVNTEITKAPLSASMIKRYDEHHQDLTLLKALVRQQLPEKYKEIFFDQSKNGYAGYIDGGASQEEFYKFIKPILEKMDGTEELLVKLNREDLLRKQRTFDNGSIPHQIHLGELHAILRRQEDFYPFLKDNREKIEKILTFRIPYYVGPLARGNSRFAWMTRKSEETITPWNFEEVVDKGASAQSFIERMTNFDKNLPNEKVLPKHSLLYEYFTVYNELTKVKYVTEGMRKPAFLSGEQKKAIVDLLFKTNRKVTVKQLKEDYFKKIECFDSVEISGVEDRFNASLGTYHDLLKIIKDKDFLDNEENEDILEDIVLTLTLFEDREMIEERLKTYAHLFDDKVMKQLKRRRYTGWGRLSRKLINGIRDKQSGKTILDFLKSDGFANRNFMQLIHDDSLTFKEDIQKAQVSGQGDSLHEHIANLAGSPAIKKGILQTVKVVDELVKVMGRHKPENIVIEMARENQTTQKGQKNSRERMKRIEEGIKELGSQILKEHPVENTQLQNEKLYLYYLQNGRDMYVDQELDINRLSDYDVDHIVPQSFLKDDSIDNKVLTRSDKARGKSDNVPSEEVVKKMKNYWRQLLNAKLITQRKFDNLTKAERGGLSELDKAGFIKRQLVETRQITKHVAQILDSRMNTKYDENDKLIREVKVITLKSKLVSDFRKDFQFYKVREINNYHHAHDAYLNAVVGTALIKKYPKLESEFVYGDYKVYDVRKMIAKSEQEIGKATAKYFFYSNIMNFFKTEITLANGEIRKRPLIETNGETGEIVWDKGRDFATVRKVLSMPQVNIVKKTEVQTGGFSKESILPKRNSDKLIARKKDWDPKKYGGFDSPTVAYSVLVVAKVEKGKSKKLKSVKELLGITIMERSSFEKNPIDFLEAKGYKEVKKDLIIKLPKYSLFELENGRKRMLASAGELQKGNELALPSKYVNFLYLASHYEKLKGSPEDNEQKQLFVEQHKHYLDEIIEQISEFSKRVILADANLDKVLSAYNKHRDKPIREQAENIIHLFTLTNLGAPAAFKYFDTTIDRKRYTSTKEVLDATLIHQSITGLYETRIDLSQLGGDGGPAPEAAAKGGSGGIPWLMKKPLQLTTLVPLQEYEERLLKQTMLTGSYKEKLQSLFLKYDALWQHWENQVGHRRIKPHHIATGTVNPRPQKQYPINPKAKASIQTVINDLLKQGVLIQQNSIMNTPVYPVPKPDGKWRMVLDYREVNKTIPLIAAQNQHSAGILSSIFRGKYKTTLDLSNGFWAHSITPESYWLTAFTWLGQQYCWTRLPQGFLNSPALFNADVVDLLKEVPNVQVYVDDIYISHDDPREHLEQLEKVFSLLLNAGYVVSLKKSEIAQHEVEFLGFNITKEGRGLTETFKQKLLNITPPRDLKQLQSILGLLNFARNFIPNFSELVKPLYNIIATAPGKYITWTTDNSQQLQNIISMLNSAENLEERNPEVRLIMKVNTSPSAGYIRFYNEFAKRPIMYLNYVYTKAEVKFTNTEKLLTTIHKGLIKALDLGMGQEILVYSPIVSMTKIQKTPLPERKALPIRWITWMSYLEDPRIQFHYDKTLPELQQVPTVTDDIIAKIKHPSEFSMVFYTDGSAIKHPNVNKSHNAGMGIAQVQFKPEFTVINTWSIPLGDHTAQLAEVAAVEFACKKALKIDGPVLIVTDSFYVAESVNKELPYWQSNGFFNNKKKPLKHVSKWKSIADCIQLKPDIIIIHEKGHQPTASTFHTEGNNLADKLATQGSYVVNAGKRTADGSEFEKRTADGSEFESPKKKAKVE

SEQ ID NO: 539 - protein, 2096 aa, synthetic construct
MPAAKRVKLDGGDKKYSIGLDIGTNSVGWAVITDEYKVPSKKFKVLGNTDRHSIKKNLIGALLFDSGETAEATRLKRTARRRYTRRKNRICYLQEIFSNEMAKVDDSFFHRLEESFLVEEDKKHERHPIFGNIVDEVAYHEKYPTIYHLRKKLVDSTDKADLRLIYLALAHMIKFRGHFLIEGDLNPDNSDVDKLFIQLVQTYNQLFEENPINASGVDAKAILSARLSKSRRLENLIAQLPGEKKNGLFGNLIALSLGLTPNFKSNFDLAEDAKLQLSKDTYDDDLDNLLAQIGDQYADLFLAAKNLSDAILLSDILRVNTEITKAPLSASMIKRYDEHHQDLTLLKALVRQQLPEKYKEIFFDQSKNGYAGYIDGGASQEEFYKFIKPILEKMDGTEELLVKLNREDLLRKQRTFDNGSIPHQIHLGELHAILRRQEDFYPFLKDNREKIEKILTFRIPYYVGPLARGNSRFAWMTRKSEETITPWNFEEVVDKGASAQSFIERMTNFDKNLPNEKVLPKHSLLYEYFTVYNELTKVKYVTEGMRKPAFLSGEQKKAIVDLLFKTNRKVTVKQLKEDYFKKIECFDSVEISGVEDRFNASLGTYHDLLKIIKDKDFLDNEENEDILEDIVLTLTLFEDREMIEERLKTYAHLFDDKVMKQLKRRRYTGWGRLSRKLINGIRDKQSGKTILDFLKSDGFANRNFMQLIHDDSLTFKEDIQKAQVSGQGDSLHEHIANLAGSPAIKKGILQTVKVVDELVKVMGRHKPENIVIEMARENQTTQKGQKNSRERMKRIEEGIKELGSQILKEHPVENTQLQNEKLYLYYLQNGRDMYVDQELDINRLSDYDVDHIVPQSFLKDDSIDNKVLTRSDKARGKSDNVPSEEVVKKMKNYWRQLLNAKLITQRKFDNLTKAERGGLSELDKAGFIKRQLVETRQITKHVAQILDSRMNTKYDENDKLIREVKVITLKSKLVSDFRKDFQFYKVREINNYHHAHDAYLNAVVGTALIKKYPKLESEFVYGDYKVYDVRKMIAKSEQEIGKATAKYFFYSNIMNFFKTEITLANGEIRKRPLIETNGETGEIVWDKGRDFATVRKVLSMPQVNIVKKTEVQTGGFSKESILPKRNSDKLIARKKDWDPKKYGGFDSPTVAYSVLVVAKVEKGKSKKLKSVKELLGITIMERSSFEKNPIDFLEAKGYKEVKKDLIIKLPKYSLFELENGRKRMLASAGELQKGNELALPSKYVNFLYLASHYEKLKGSPEDNEQKQLFVEQHKHYLDEIIEQISEFSKRVILADANLDKVLSAYNKHRDKPIREQAENIIHLFTLTNLGAPAAFKYFDTTIDRKRYTSTKEVLDATLIHQSITGLYETRIDLSQLGGDGGEAAAKEAAAKEAAAKEAAAKGGIPWLMKKPLQLTTLVPLQEYEERLLKQTMLTGSYKEKLQSLFLKYDALWQHWENQVGHRRIKPHHIATGTVNPRPQKQYPINPKAKASIQTVINDLLKQGVLIQQNSIMNTPVYPVPKPDGKWRMVLDYREVNKTIPLIAAQNQHSAGILSSIFRGKYKTTLDLSNGFWAHSITPESYWLTAFTWLGQQYCWTRLPQGFLNSPALFNADVVDLLKEVPNVQVYVDDIYISHDDPREHLEQLEKVFSLLLNAGYVVSLKKSEIAQHEVEFLGFNITKEGRGLTETFKQKLLNITPPRDLKQLQSILGLLNFARNFIPNFSELVKPLYNIIATAPGKYITWTTDNSQQLQNIISMLNSAENLEERNPEVRLIMKVNTSPSAGYIRFYNEFAKRPIMYLNYVYTKAEVKFTNTEKLLTTIHKGLIKALDLGMGQEILVYSPIVSMTKIQKTPLPERKALPIRWITWMSYLEDPRIQFHYDKTLPELQQVPTVTDDIIAKIKHPSEFSMVFYTDGSAIKHPNVNKSHNAGMGIAQVQFKPEFTVINTWSIPLGDHTAQLAEVAAVEFACKKALKIDGPVLIVTDSFYVAESVNKELPYWQSNGFFNNKKKPLKHVSKWKSIADCIQLKPDIIIIHEKGHQPTASTFHTEGNNLADKLATQGSYVVNAGKRTADGSEFEKRTADGSEFESPKKKAKVE

SEQ ID NO: 540 - protein, 2085 aa, synthetic construct
MPAAKRVKLDGGDKKYSIGLDIGTNSVGWAVITDEYKVPSKKFKVLGNTDRHSIKKNLIGALLFDSGETAEATRLKRTARRRYTRRKNRICYLQEIFSNEMAKVDDSFFHRLEESFLVEEDKKHERHPIFGNIVDEVAYHEKYPTIYHLRKKLVDSTDKADLRLIYLALAHMIKFRGHFLIEGDLNPDNSDVDKLFIQLVQTYNQLFEENPINASGVDAKAILSARLSKSRRLENLIAQLPGEKKNGLFGNLIALSLGLTPNFKSNFDLAEDAKLQLSKDTYDDDLDNLLAQIGDQYADLFLAAKNLSDAILLSDILRVNTEITKAPLSASMIKRYDEHHQDLTLLKALVRQQLPEKYKEIFFDQSKNGYAGYIDGGASQEEFYKFIKPILEKMDGTEELLVKLNREDLLRKQRTFDNGSIPHQIHLGELHAILRRQEDFYPFLKDNREKIEKILTFRIPYYVGPLARGNSRFAWMTRKSEETITPWNFEEVVDKGASAQSFIERMTNFDKNLPNEKVLPKHSLLYEYFTVYNELTKVKYVTEGMRKPAFLSGEQKKAIVDLLFKTNRKVTVKQLKEDYFKKIECFDSVEISGVEDRFNASLGTYHDLLKIIKDKDFLDNEENEDILEDIVLTLTLFEDREMIEERLKTYAHLFDDKVMKQLKRRRYTGWGRLSRKLINGIRDKQSGKTILDFLKSDGFANRNFMQLIHDDSLTFKEDIQKAQVSGQGDSLHEHIANLAGSPAIKKGILQTVKVVDELVKVMGRHKPENIVIEMARENQTTQKGQKNSRERMKRIEEGIKELGSQILKEHPVENTQLQNEKLYLYYLQNGRDMYVDQELDINRLSDYDVDHIVPQSFLKDDSIDNKVLTRSDKARGKSDNVPSEEVVKKMKNYWRQLLNAKLITQRKFDNLTKAERGGLSELDKAGFIKRQLVETRQITKHVAQILDSRMNTKYDENDKLIREVKVITLKSKLVSDFRKDFQFYKVREINNYHHAHDAYLNAVVGTALIKKYPKLESEFVYGDYKVYDVRKMIAKSEQEIGKATAKYFFYSNIMNFFKTEITLANGEIRKRPLIETNGETGEIVWDKGRDFATVRKVLSMPQVNIVKKTEVQTGGFSKESILPKRNSDKLIARKKDWDPKKYGGFDSPTVAYSVLVVAKVEKGKSKKLKSVKELLGITIMERSSFEKNPIDFLEAKGYKEVKKDLIIKLPKYSLFELENGRKRMLASAGELQKGNELALPSKYVNFLYLASHYEKLKGSPEDNEQKQLFVEQHKHYLDEIIEQISEFSKRVILADANLDKVLSAYNKHRDKPIREQAENIIHLFTLTNLGAPAAFKYFDTTIDRKRYTSTKEVLDATLIHQSITGLYETRIDLSQLGGDGGGGSPAPGSSGGIPWLMKKPLQLTTLVPLQEYEERLLKQTMLTGSYKEKLQSLFLKYDALWQHWENQVGHRRIKPHHIATGTVNPRPQKQYPINPKAKASIQTVINDLLKQGVLIQQNSIMNTPVYPVPKPDGKWRMVLDYREVNKTIPLIAAQNQHSAGILSSIFRGKYKTTLDLSNGFWAHSITPESYWLTAFTWLGQQYCWTRLPQGFLNSPALFNADVVDLLKEVPNVQVYVDDIYISHDDPREHLEQLEKVFSLLLNAGYVVSLKKSEIAQHEVEFLGFNITKEGRGLTETFKQKLLNITPPRDLKQLQSILGLLNFARNFIPNFSELVKPLYNIIATAPGKYITWTTDNSQQLQNIISMLNSAENLEERNPEVRLIMKVNTSPSAGYIRFYNEFAKRPIMYLNYVYTKAEVKFTNTEKLLTTIHKGLIKALDLGMGQEILVYSPIVSMTKIQKTPLPERKALPIRWITWMSYLEDPRIQFHYDKTLPELQQVPTVTDDIIAKIKHPSEFSMVFYTDGSAIKHPNVNKSHNAGMGIAQVQFKPEFTVINTWSIPLGDHTAQLAEVAAVEFACKKALKIDGPVLIVTDSFYVAESVNKELPYWQSNGFFNNKKKPLKHVSKWKSIADCIQLKPDIIIIHEKGHQPTASTFHTEGNNLADKLATQGSYVVNAGKRTADGSEFEKRTADGSEFESPKKKAKVE

SEQ ID NO: 541 - protein, 2091 aa, synthetic construct
MPAAKRVKLDGGDKKYSIGLDIGTNSVGWAVITDEYKVPSKKFKVLGNTDRHSIKKNLIGALLFDSGETAEATRLKRTARRRYTRRKNRICYLQEIFSNEMAKVDDSFFHRLEESFLVEEDKKHERHPIFGNIVDEVAYHEKYPTIYHLRKKLVDSTDKADLRLIYLALAHMIKFRGHFLIEGDLNPDNSDVDKLFIQLVQTYNQLFEENPINASGVDAKAILSARLSKSRRLENLIAQLPGEKKNGLFGNLIALSLGLTPNFKSNFDLAEDAKLQLSKDTYDDDLDNLLAQIGDQYADLFLAAKNLSDAILLSDILRVNTEITKAPLSASMIKRYDEHHQDLTLLKALVRQQLPEKYKEIFFDQSKNGYAGYIDGGASQEEFYKFIKPILEKMDGTEELLVKLNREDLLRKQRTFDNGSIPHQIHLGELHAILRRQEDFYPFLKDNREKIEKILTFRIPYYVGPLARGNSRFAWMTRKSEETITPWNFEEVVDKGASAQSFIERMTNFDKNLPNEKVLPKHSLLYEYFTVYNELTKVKYVTEGMRKPAFLSGEQKKAIVDLLFKTNRKVTVKQLKEDYFKKIECFDSVEISGVEDRFNASLGTYHDLLKIIKDKDFLDNEENEDILEDIVLTLTLFEDREMIEERLKTYAHLFDDKVMKQLKRRRYTGWGRLSRKLINGIRDKQSGKTILDFLKSDGFANRNFMQLIHDDSLTFKEDIQKAQVSGQGDSLHEHIANLAGSPAIKKGILQTVKVVDELVKVMGRHKPENIVIEMARENQTTQKGQKNSRERMKRIEEGIKELGSQILKEHPVENTQLQNEKLYLYYLQNGRDMYVDQELDINRLSDYDVDHIVPQSFLKDDSIDNKVLTRSDKARGKSDNVPSEEVVKKMKNYWRQLLNAKLITQRKFDNLTKAERGGLSELDKAGFIKRQLVETRQITKHVAQILDSRMNTKYDENDKLIREVKVITLKSKLVSDFRKDFQFYKVREINNYHHAHDAYLNAVVGTALIKKYPKLESEFVYGDYKVYDVRKMIAKSEQEIGKATAKYFFYSNIMNFFKTEITLANGEIRKRPLIETNGETGEIVWDKGRDFATVRKVLSMPQVNIVKKTEVQTGGFSKESILPKRNSDKLIARKKDWDPKKYGGFDSPTVAYSVLVVAKVEKGKSKKLKSVKELLGITIMERSSFEKNPIDFLEAKGYKEVKKDLIIKLPKYSLFELENGRKRMLASAGELQKGNELALPSKYVNFLYLASHYEKLKGSPEDNEQKQLFVEQHKHYLDEIIEQISEFSKRVILADANLDKVLSAYNKHRDKPIREQAENIIHLFTLTNLGAPAAFKYFDTTIDRKRYTSTKEVLDATLIHQSITGLYETRIDLSQLGGDGGEAAAKGGGGSEAAAKGGIPWLMKKPLQLTTLVPLQEYEERLLKQTMLTGSYKEKLQSLFLKYDALWQHWENQVGHRRIKPHHIATGTVNPRPQKQYPINPKAKASIQTVINDLLKQGVLIQQNSIMNTPVYPVPKPDGKWRMVLDYREVNKTIPLIAAQNQHSAGILSSIFRGKYKTTLDLSNGFWAHSITPESYWLTAFTWLGQQYCWTRLPQGFLNSPALFNADVVDLLKEVPNVQVYVDDIYISHDDPREHLEQLEKVFSLLLNAGYVVSLKKSEIAQHEVEFLGFNITKEGRGLTETFKQKLLNITPPRDLKQLQSILGLLNFARNFIPNFSELVKPLYNIIATAPGKYITWTTDNSQQLQNIISMLNSAENLEERNPEVRLIMKVNTSPSAGYIRFYNEFAKRPIMYLNYVYTKAEVKFTNTEKLLTTIHKGLIKALDLGMGQEILVYSPIVSMTKIQKTPLPERKALPIRWITWMSYLEDPRIQFHYDKTLPELQQVPTVTDDIIAKIKHPSEFSMVFYTDGSAIKHPNVNKSHNAGMGIAQVQFKPEFTVINTWSIPLGDHTAQLAEVAAVEFACKKALKIDGPVLIVTDSFYVAESVNKELPYWQSNGFFNNKKKPLKHVSKWKSIADCIQLKPDIIIIHEKGHQPTASTFHTEGNNLADKLATQGSYVVNAGKRTADGSEFEKRTADGSEFESPKKKAKVE

SEQ ID NO: 542 - protein, 2085 aa, synthetic construct
MPAAKRVKLDGGDKKYSIGLDIGTNSVGWAVITDEYKVPSKKFKVLGNTDRHSIKKNLIGALLFDSGETAEATRLKRTARRRYTRRKNRICYLQEIFSNEMAKVDDSFFHRLEESFLVEEDKKHERHPIFGNIVDEVAYHEKYPTIYHLRKKLVDSTDKADLRLIYLALAHMIKFRGHFLIEGDLNPDNSDVDKLFIQLVQTYNQLFEENPINASGVDAKAILSARLSKSRRLENLIAQLPGEKKNGLFGNLIALSLGLTPNFKSNFDLAEDAKLQLSKDTYDDDLDNLLAQIGDQYADLFLAAKNLSDAILLSDILRVNTEITKAPLSASMIKRYDEHHQDLTLLKALVRQQLPEKYKEIFFDQSKNGYAGYIDGGASQEEFYKFIKPILEKMDGTEELLVKLNREDLLRKQRTFDNGSIPHQIHLGELHAILRRQEDFYPFLKDNREKIEKILTFRIPYYVGPLARGNSRFAWMTRKSEETITPWNFEEVVDKGASAQSFIERMTNFDKNLPNEKVLPKHSLLYEYFTVYNELTKVKYVTEGMRKPAFLSGEQKKAIVDLLFKTNRKVTVKQLKEDYFKKIECFDSVEISGVEDRFNASLGTYHDLLKIIKDKDFLDNEENEDILEDIVLTLTLFEDREMIEERLKTYAHLFDDKVMKQLKRRRYTGWGRLSRKLINGIRDKQSGKTILDFLKSDGFANRNFMQLIHDDSLTFKEDIQKAQVSGQGDSLHEHIANLAGSPAIKKGILQTVKVVDELVKVMGRHKPENIVIEMARENQTTQKGQKNSRERMKRIEEGIKELGSQILKEHPVENTQLQNEKLYLYYLQNGRDMYVDQELDINRLSDYDVDHIVPQSFLKDDSIDNKVLTRSDKARGKSDNVPSEEVVKKMKNYWRQLLNAKLITQRKFDNLTKAERGGLSELDKAGFIKRQLVETRQITKHVAQILDSRMNTKYDENDKLIREVKVITLKSKLVSDFRKDFQFYKVREINNYHHAHDAYLNAVVGTALIKKYPKLESEFVYGDYKVYDVRKMIAKSEQEIGKATAKYFFYSNIMNFFKTEITLANGEIRKRPLIETNGETGEIVWDKGRDFATVRKVLSMPQVNIVKKTEVQTGGFSKESILPKRNSDKLIARKKDWDPKKYGGFDSPTVAYSVLVVAKVEKGKSKKLKSVKELLGITIMERSSFEKNPIDFLEAKGYKEVKKDLIIKLPKYSLFELENGRKRMLASAGELQKGNELALPSKYVNFLYLASHYEKLKGSPEDNEQKQLFVEQHKHYLDEIIEQISEFSKRVILADANLDKVLSAYNKHRDKPIREQAENIIHLFTLTNLGAPAAFKYFDTTIDRKRYTSTKEVLDATLIHQSITGLYETRIDLSQLGGDGGPAPGGGGGSGGIPWLMKKPLQLTTLVPLQEYEERLLKQTMLTGSYKEKLQSLFLKYDALWQHWENQVGHRRIKPHHIATGTVNPRPQKQYPINPKAKASIQTVINDLLKQGVLIQQNSIMNTPVYPVPKPDGKWRMVLDYREVNKTIPLIAAQNQHSAGILSSIFRGKYKTTLDLSNGFWAHSITPESYWLTAFTWLGQQYCWTRLPQGFLNSPALFNADVVDLLKEVPNVQVYVDDIYISHDDPREHLEQLEKVFSLLLNAGYVVSLKKSEIAQHEVEFLGFNITKEGRGLTETFKQKLLNITPPRDLKQLQSILGLLNFARNFIPNFSELVKPLYNIIATAPGKYITWTTDNSQQLQNIISMLNSAENLEERNPEVRLIMKVNTSPSAGYIRFYNEFAKRPIMYLNYVYTKAEVKFTNTEKLLTTIHKGLIKALDLGMGQEILVYSPIVSMTKIQKTPLPERKALPIRWITWMSYLEDPRIQFHYDKTLPELQQVPTVTDDIIAKIKHPSEFSMVFYTDGSAIKHPNVNKSHNAGMGIAQVQFKPEFTVINTWSIPLGDHTAQLAEVAAVEFACKKALKIDGPVLIVTDSFYVAESVNKELPYWQSNGFFNNKKKPLKHVSKWKSIADCIQLKPDIIIIHEKGHQPTASTFHTEGNNLADKLATQGSYVVNAGKRTADGSEFEKRTADGSEFESPKKKAKVE

SEQ ID NO: 543 - protein, 2087 aa, synthetic construct
MPAAKRVKLDGGDKKYSIGLDIGTNSVGWAVITDEYKVPSKKFKVLGNTDRHSIKKNLIGALLFDSGETAEATRLKRTARRRYTRRKNRICYLQEIFSNEMAKVDDSFFHRLEESFLVEEDKKHERHPIFGNIVDEVAYHEKYPTIYHLRKKLVDSTDKADLRLIYLALAHMIKFRGHFLIEGDLNPDNSDVDKLFIQLVQTYNQLFEENPINASGVDAKAILSARLSKSRRLENLIAQLPGEKKNGLFGNLIALSLGLTPNFKSNFDLAEDAKLQLSKDTYDDDLDNLLAQIGDQYADLFLAAKNLSDAILLSDILRVNTEITKAPLSASMIKRYDEHHQDLTLLKALVRQQLPEKYKEIFFDQSKNGYAGYIDGGASQEEFYKFIKPILEKMDGTEELLVKLNREDLLRKQRTFDNGSIPHQIHLGELHAILRRQEDFYPFLKDNREKIEKILTFRIPYYVGPLARGNSRFAWMTRKSEETITPWNFEEVVDKGASAQSFIERMTNFDKNLPNEKVLPKHSLLYEYFTVYNELTKVKYVTEGMRKPAFLSGEQKKAIVDLLFKTNRKVTVKQLKEDYFKKIECFDSVEISGVEDRFNASLGTYHDLLKIIKDKDFLDNEENEDILEDIVLTLTLFEDREMIEERLKTYAHLFDDKVMKQLKRRRYTGWGRLSRKLINGIRDKQSGKTILDFLKSDGFANRNFMQLIHDDSLTFKEDIQKAQVSGQGDSLHEHIANLAGSPAIKKGILQTVKVVDELVKVMGRHKPENIVIEMARENQTTQKGQKNSRERMKRIEEGIKELGSQILKEHPVENTQLQNEKLYLYYLQNGRDMYVDQELDINRLSDYDVDHIVPQSFLKDDSIDNKVLTRSDKARGKSDNVPSEEVVKKMKNYWRQLLNAKLITQRKFDNLTKAERGGLSELDKAGFIKRQLVETRQITKHVAQILDSRMNTKYDENDKLIREVKVITLKSKLVSDFRKDFQFYKVREINNYHHAHDAYLNAVVGTALIKKYPKLESEFVYGDYKVYDVRKMIAKSEQEIGKATAKYFFYSNIMNFFKTEITLANGEIRKRPLIETNGETGEIVWDKGRDFATVRKVLSMPQVNIVKKTEVQTGGFSKESILPKRNSDKLIARKKDWDPKKYGGFDSPTVAYSVLVVAKVEKGKSKKLKSVKELLGITIMERSSFEKNPIDFLEAKGYKEVKKDLIIKLPKYSLFELENGRKRMLASAGELQKGNELALPSKYVNFLYLASHYEKLKGSPEDNEQKQLFVEQHKHYLDEIIEQISEFSKRVILADANLDKVLSAYNKHRDKPIREQAENIIHLFTLTNLGAPAAFKYFDTTIDRKRYTSTKEVLDATLIHQSITGLYETRIDLSQLGGDGGGGSEAAAKGGGGGIPWLMKKPLQLTTLVPLQEYEERLLKQTMLTGSYKEKLQSLFLKYDALWQHWENQVGHRRIKPHHIATGTVNPRPQKQYPINPKAKASIQTVINDLLKQGVLIQQNSIMNTPVYPVPKPDGKWRMVLDYREVNKTIPLIAAQNQHSAGILSSIFRGKYKTTLDLSNGFWAHSITPESYWLTAFTWLGQQYCWTRLPQGFLNSPALFNADVVDLLKEVPNVQVYVDDIYISHDDPREHLEQLEKVFSLLLNAGYVVSLKKSEIAQHEVEFLGFNITKEGRGLTETFKQKLLNITPPRDLKQLQSILGLLNFARNFIPNFSELVKPLYNIIATAPGKYITWTTDNSQQLQNIISMLNSAENLEERNPEVRLIMKVNTSPSAGYIRFYNEFAKRPIMYLNYVYTKAEVKFTNTEKLLTTIHKGLIKALDLGMGQEILVYSPIVSMTKIQKTPLPERKALPIRWITWMSYLEDPRIQFHYDKTLPELQQVPTVTDDIIAKIKHPSEFSMVFYTDGSAIKHPNVNKSHNAGMGIAQVQFKPEFTVINTWSIPLGDHTAQLAEVAAVEFACKKALKIDGPVLIVTDSFYVAESVNKELPYWQSNGFFNNKKKPLKHVSKWKSIADCIQLKPDIIIIHEKGHQPTASTFHTEGNNLADKLATQGSYVVNAGKRTADGSEFEKRTADGSEFESPKKKAKVE

SEQ ID NO: 544 - protein, 2082 aa, synthetic construct
MPAAKRVKLDGGDKKYSIGLDIGTNSVGWAVITDEYKVPSKKFKVLGNTDRHSIKKNLIGALLFDSGETAEATRLKRTARRRYTRRKNRICYLQEIFSNEMAKVDDSFFHRLEESFLVEEDKKHERHPIFGNIVDEVAYHEKYPTIYHLRKKLVDSTDKADLRLIYLALAHMIKFRGHFLIEGDLNPDNSDVDKLFIQLVQTYNQLFEENPINASGVDAKAILSARLSKSRRLENLIAQLPGEKKNGLFGNLIALSLGLTPNFKSNFDLAEDAKLQLSKDTYDDDLDNLLAQIGDQYADLFLAAKNLSDAILLSDILRVNTEITKAPLSASMIKRYDEHHQDLTLLKALVRQQLPEKYKEIFFDQSKNGYAGYIDGGASQEEFYKFIKPILEKMDGTEELLVKLNREDLLRKQRTFDNGSIPHQIHLGELHAILRRQEDFYPFLKDNREKIEKILTFRIPYYVGPLARGNSRFAWMTRKSEETITPWNFEEVVDKGASAQSFIERMTNFDKNLPNEKVLPKHSLLYEYFTVYNELTKVKYVTEGMRKPAFLSGEQKKAIVDLLFKTNRKVTVKQLKEDYFKKIECFDSVEISGVEDRFNASLGTYHDLLKIIKDKDFLDNEENEDILEDIVLTLTLFEDREMIEERLKTYAHLFDDKVMKQLKRRRYTGWGRLSRKLINGIRDKQSGKTILDFLKSDGFANRNFMQLIHDDSLTFKEDIQKAQVSGQGDSLHEHIANLAGSPAIKKGILQTVKVVDELVKVMGRHKPENIVIEMARENQTTQKGQKNSRERMKRIEEGIKELGSQILKEHPVENTQLQNEKLYLYYLQNGRDMYVDQELDINRLSDYDVDHIVPQSFLKDDSIDNKVLTRSDKARGKSDNVPSEEVVKKMKNYWRQLLNAKLITQRKFDNLTKAERGGLSELDKAGFIKRQLVETRQITKHVAQILDSRMNTKYDENDKLIREVKVITLKSKLVSDFRKDFQFYKVREINNYHHAHDAYLNAVVGTALIKKYPKLESEFVYGDYKVYDVRKMIAKSEQEIGKATAKYFFYSNIMNFFKTEITLANGEIRKRPLIETNGETGEIVWDKGRDFATVRKVLSMPQVNIVKKTEVQTGGFSKESILPKRNSDKLIARKKDWDPKKYGGFDSPTVAYSVLVVAKVEKGKSKKLKSVKELLGITIMERSSFEKNPIDFLEAKGYKEVKKDLIIKLPKYSLFELENGRKRMLASAGELQKGNELALPSKYVNFLYLASHYEKLKGSPEDNEQKQLFVEQHKHYLDEIIEQISEFSKRVILADANLDKVLSAYNKHRDKPIREQAENIIHLFTLTNLGAPAAFKYFDTTIDRKRYTSTKEVLDATLIHQSITGLYETRIDLSQLGGDGGGSSGGGGGIPWLMKKPLQLTTLVPLQEYEERLLKQTMLTGSYKEKLQSLFLKYDALWQHWENQVGHRRIKPHHIATGTVNPRPQKQYPINPKAKASIQTVINDLLKQGVLIQQNSIMNTPVYPVPKPDGKWRMVLDYREVNKTIPLIAAQNQHSAGILSSIFRGKYKTTLDLSNGFWAHSITPESYWLTAFTWLGQQYCWTRLPQGFLNSPALFNADVVDLLKEVPNVQVYVDDIYISHDDPREHLEQLEKVFSLLLNAGYVVSLKKSEIAQHEVEFLGFNITKEGRGLTETFKQKLLNITPPRDLKQLQSILGLLNFARNFIPNFSELVKPLYNIIATAPGKYITWTTDNSQQLQNIISMLNSAENLEERNPEVRLIMKVNTSPSAGYIRFYNEFAKRPIMYLNYVYTKAEVKFTNTEKLLTTIHKGLIKALDLGMGQEILVYSPIVSMTKIQKTPLPERKALPIRWITWMSYLEDPRIQFHYDKTLPELQQVPTVTDDIIAKIKHPSEFSMVFYTDGSAIKHPNVNKSHNAGMGIAQVQFKPEFTVINTWSIPLGDHTAQLAEVAAVEFACKKALKIDGPVLIVTDSFYVAESVNKELPYWQSNGFFNNKKKPLKHVSKWKSIADCIQLKPDIIIIHEKGHQPTASTFHTEGNNLADKLATQGSYVVNAGKRTADGSEFEKRTADGSEFESPKKKAKVE

SEQ ID NO: 545 - protein, 2085 aa, synthetic construct
MPAAKRVKLDGGDKKYSIGLDIGTNSVGWAVITDEYKVPSKKFKVLGNTDRHSIKKNLIGALLFDSGETAEATRLKRTARRRYTRRKNRICYLQEIFSNEMAKVDDSFFHRLEESFLVEEDKKHERHPIFGNIVDEVAYHEKYPTIYHLRKKLVDSTDKADLRLIYLALAHMIKFRGHFLIEGDLNPDNSDVDKLFIQLVQTYNQLFEENPINASGVDAKAILSARLSKSRRLENLIAQLPGEKKNGLFGNLIALSLGLTPNFKSNFDLAEDAKLQLSKDTYDDDLDNLLAQIGDQYADLFLAAKNLSDAILLSDILRVNTEITKAPLSASMIKRYDEHHQDLTLLKALVRQQLPEKYKEIFFDQSKNGYAGYIDGGASQEEFYKFIKPILEKMDGTEELLVKLNREDLLRKQRTFDNGSIPHQIHLGELHAILRRQEDFYPFLKDNREKIEKILTFRIPYYVGPLARGNSRFAWMTRKSEETITPWNFEEVVDKGASAQSFIERMTNFDKNLPNEKVLPKHSLLYEYFTVYNELTKVKYVTEGMRKPAFLSGEQKKAIVDLLFKTNRKVTVKQLKEDYFKKIECFDSVEISGVEDRFNASLGTYHDLLKIIKDKDFLDNEENEDILEDIVLTLTLFEDREMIEERLKTYAHLFDDKVMKQLKRRRYTGWGRLSRKLINGIRDKQSGKTILDFLKSDGFANRNFMQLIHDDSLTFKEDIQKAQVSGQGDSLHEHIANLAGSPAIKKGILQTVKVVDELVKVMGRHKPENIVIEMARENQTTQKGQKNSRERMKRIEEGIKELGSQILKEHPVENTQLQNEKLYLYYLQNGRDMYVDQELDINRLSDYDVDHIVPQSFLKDDSIDNKVLTRSDKARGKSDNVPSEEVVKKMKNYWRQLLNAKLITQRKFDNLTKAERGGLSELDKAGFIKRQLVETRQITKHVAQILDSRMNTKYDENDKLIREVKVITLKSKLVSDFRKDFQFYKVREINNYHHAHDAYLNAVVGTALIKKYPKLESEFVYGDYKVYDVRKMIAKSEQEIGKATAKYFFYSNIMNFFKTEITLANGEIRKRPLIETNGETGEIVWDKGRDFATVRKVLSMPQVNIVKKTEVQTGGFSKESILPKRNSDKLIARKKDWDPKKYGGFDSPTVAYSVLVVAKVEKGKSKKLKSVKELLGITIMERSSFEKNPIDFLEAKGYKEVKKDLIIKLPKYSLFELENGRKRMLASAGELQKGNELALPSKYVNFLYLASHYEKLKGSPEDNEQKQLFVEQHKHYLDEIIEQISEFSKRVILADANLDKVLSAYNKHRDKPIREQAENIIHLFTLTNLGAPAAFKYFDTTIDRKRYTSTKEVLDATLIHQSITGLYETRIDLSQLGGDGGGSSGGSPAPGGIPWLMKKPLQLTTLVPLQEYEERLLKQTMLTGSYKEKLQSLFLKYDALWQHWENQVGHRRIKPHHIATGTVNPRPQKQYPINPKAKASIQTVINDLLKQGVLIQQNSIMNTPVYPVPKPDGKWRMVLDYREVNKTIPLIAAQNQHSAGILSSIFRGKYKTTLDLSNGFWAHSITPESYWLTAFTWLGQQYCWTRLPQGFLNSPALFNADVVDLLKEVPNVQVYVDDIYISHDDPREHLEQLEKVFSLLLNAGYVVSLKKSEIAQHEVEFLGFNITKEGRGLTETFKQKLLNITPPRDLKQLQSILGLLNFARNFIPNFSELVKPLYNIIATAPGKYITWTTDNSQQLQNIISMLNSAENLEERNPEVRLIMKVNTSPSAGYIRFYNEFAKRPIMYLNYVYTKAEVKFTNTEKLLTTIHKGLIKALDLGMGQEILVYSPIVSMTKIQKTPLPERKALPIRWITWMSYLEDPRIQFHYDKTLPELQQVPTVTDDIIAKIKHPSEFSMVFYTDGSAIKHPNVNKSHNAGMGIAQVQFKPEFTVINTWSIPLGDHTAQLAEVAAVEFACKKALKIDGPVLIVTDSFYVAESVNKELPYWQSNGFFNNKKKPLKHVSKWKSIADCIQLKPDIIIIHEKGHQPTASTFHTEGNNLADKLATQGSYVVNAGKRTADGSEFEKRTADGSEFESPKKKAKVE

SEQ ID NO: 546 - protein, 2085 aa, synthetic construct
MPAAKRVKLDGGDKKYSIGLDIGTNSVGWAVITDEYKVPSKKFKVLGNTDRHSIKKNLIGALLFDSGETAEATRLKRTARRRYTRRKNRICYLQEIFSNEMAKVDDSFFHRLEESFLVEEDKKHERHPIFGNIVDEVAYHEKYPTIYHLRKKLVDSTDKADLRLIYLALAHMIKFRGHFLIEGDLNPDNSDVDKLFIQLVQTYNQLFEENPINASGVDAKAILSARLSKSRRLENLIAQLPGEKKNGLFGNLIALSLGLTPNFKSNFDLAEDAKLQLSKDTYDDDLDNLLAQIGDQYADLFLAAKNLSDAILLSDILRVNTEITKAPLSASMIKRYDEHHQDLTLLKALVRQQLPEKYKEIFFDQSKNGYAGYIDGGASQEEFYKFIKPILEKMDGTEELLVKLNREDLLRKQRTFDNGSIPHQIHLGELHAILRRQEDFYPFLKDNREKIEKILTFRIPYYVGPLARGNSRFAWMTRKSEETITPWNFEEVVDKGASAQSFIERMTNFDKNLPNEKVLPKHSLLYEYFTVYNELTKVKYVTEGMRKPAFLSGEQKKAIVDLLFKTNRKVTVKQLKEDYFKKIECFDSVEISGVEDRFNASLGTYHDLLKIIKDKDFLDNEENEDILEDIVLTLTLFEDREMIEERLKTYAHLFDDKVMKQLKRRRYTGWGRLSRKLINGIRDKQSGKTILDFLKSDGFANRNFMQLIHDDSLTFKEDIQKAQVSGQGDSLHEHIANLAGSPAIKKGILQTVKVVDELVKVMGRHKPENIVIEMARENQTTQKGQKNSRERMKRIEEGIKELGSQILKEHPVENTQLQNEKLYLYYLQNGRDMYVDQELDINRLSDYDVDHIVPQSFLKDDSIDNKVLTRSDKARGKSDNVPSEEVVKKMKNYWRQLLNAKLITQRKFDNLTKAERGGLSELDKAGFIKRQLVETRQITKHVAQILDSRMNTKYDENDKLIREVKVITLKSKLVSDFRKDFQFYKVREINNYHHAHDAYLNAVVGTALIKKYPKLESEFVYGDYKVYDVRKMIAKSEQEIGKATAKYFFYSNIMNFFKTEITLANGEIRKRPLIETNGETGEIVWDKGRDFATVRKVLSMPQVNIVKKTEVQTGGFSKESILPKRNSDKLIARKKDWDPKKYGGFDSPTVAYSVLVVAKVEKGKSKKLKSVKELLGITIMERSSFEKNPIDFLEAKGYKEVKKDLIIKLPKYSLFELENGRKRMLASAGELQKGNELALPSKYVNFLYLASHYEKLKGSPEDNEQKQLFVEQHKHYLDEIIEQISEFSKRVILADANLDKVLSAYNKHRDKPIREQAENIIHLFTLTNLGAPAAFKYFDTTIDRKRYTSTKEVLDATLIHQSITGLYETRIDLSQLGGDGGPAPGSSGGGGGIPWLMKKPLQLTTLVPLQEYEERLLKQTMLTGSYKEKLQSLFLKYDALWQHWENQVGHRRIKPHHIATGTVNPRPQKQYPINPKAKASIQTVINDLLKQGVLIQQNSIMNTPVYPVPKPDGKWRMVLDYREVNKTIPLIAAQNQHSAGILSSIFRGKYKTTLDLSNGFWAHSITPESYWLTAFTWLGQQYCWTRLPQGFLNSPALFNADVVDLLKEVPNVQVYVDDIYISHDDPREHLEQLEKVFSLLLNAGYVVSLKKSEIAQHEVEFLGFNITKEGRGLTETFKQKLLNITPPRDLKQLQSILGLLNFARNFIPNFSELVKPLYNIIATAPGKYITWTTDNSQQLQNIISMLNSAENLEERNPEVRLIMKVNTSPSAGYIRFYNEFAKRPIMYLNYVYTKAEVKFTNTEKLLTTIHKGLIKALDLGMGQEILVYSPIVSMTKIQKTPLPERKALPIRWITWMSYLEDPRIQFHYDKTLPELQQVPTVTDDIIAKIKHPSEFSMVFYTDGSAIKHPNVNKSHNAGMGIAQVQFKPEFTVINTWSIPLGDHTAQLAEVAAVEFACKKALKIDGPVLIVTDSFYVAESVNKELPYWQSNGFFNNKKKPLKHVSKWKSIADCIQLKPDIIIIHEKGHQPTASTFHTEGNNLADKLATQGSYVVNAGKRTADGSEFEKRTADGSEFESPKKKAKVE

SEQ ID NO: 547 - protein, 2085 aa, synthetic construct
MPAAKRVKLDGGDKKYSIGLDIGTNSVGWAVITDEYKVPSKKFKVLGNTDRHSIKKNLIGALLFDSGETAEATRLKRTARRRYTRRKNRICYLQEIFSNEMAKVDDSFFHRLEESFLVEEDKKHERHPIFGNIVDEVAYHEKYPTIYHLRKKLVDSTDKADLRLIYLALAHMIKFRGHFLIEGDLNPDNSDVDKLFIQLVQTYNQLFEENPINASGVDAKAILSARLSKSRRLENLIAQLPGEKKNGLFGNLIALSLGLTPNFKSNFDLAEDAKLQLSKDTYDDDLDNLLAQIGDQYADLFLAAKNLSDAILLSDILRVNTEITKAPLSASMIKRYDEHHQDLTLLKALVRQQLPEKYKEIFFDQSKNGYAGYIDGGASQEEFYKFIKPILEKMDGTEELLVKLNREDLLRKQRTFDNGSIPHQIHLGELHAILRRQEDFYPFLKDNREKIEKILTFRIPYYVGPLARGNSRFAWMTRKSEETITPWNFEEVVDKGASAQSFIERMTNFDKNLPNEKVLPKHSLLYEYFTVYNELTKVKYVTEGMRKPAFLSGEQKKAIVDLLFKTNRKVTVKQLKEDYFKKIECFDSVEISGVEDRFNASLGTYHDLLKIIKDKDFLDNEENEDILEDIVLTLTLFEDREMIEERLKTYAHLFDDKVMKQLKRRRYTGWGRLSRKLINGIRDKQSGKTILDFLKSDGFANRNFMQLIHDDSLTFKEDIQKAQVSGQGDSLHEHIANLAGSPAIKKGILQTVKVVDELVKVMGRHKPENIVIEMARENQTTQKGQKNSRERMKRIEEGIKELGSQILKEHPVENTQLQNEKLYLYYLQNGRDMYVDQELDINRLSDYDVDHIVPQSFLKDDSIDNKVLTRSDKARGKSDNVPSEEVVKKMKNYWRQLLNAKLITQRKFDNLTKAERGGLSELDKAGFIKRQLVETRQITKHVAQILDSRMNTKYDENDKLIREVKVITLKSKLVSDFRKDFQFYKVREINNYHHAHDAYLNAVVGTALIKKYPKLESEFVYGDYKVYDVRKMIAKSEQEIGKATAKYFFYSNIMNFFKTEITLANGEIRKRPLIETNGETGEIVWDKGRDFATVRKVLSMPQVNIVKKTEVQTGGFSKESILPKRNSDKLIARKKDWDPKKYGGFDSPTVAYSVLVVAKVEKGKSKKLKSVKELLGITIMERSSFEKNPIDFLEAKGYKEVKKDLIIKLPKYSLFELENGRKRMLASAGELQKGNELALPSKYVNFLYLASHYEKLKGSPEDNEQKQLFVEQHKHYLDEIIEQISEFSKRVILADANLDKVLSAYNKHRDKPIREQAENIIHLFTLTNLGAPAAFKYFDTTIDRKRYTSTKEVLDATLIHQSITGLYETRIDLSQLGGDGGGSSGGGPAPGGIPWLMKKPLQLTTLVPLQEYEERLLKQTMLTGSYKEKLQSLFLKYDALWQHWENQVGHRRIKPHHIATGTVNPRPQKQYPINPKAKASIQTVINDLLKQGVLIQQNSIMNTPVYPVPKPDGKWRMVLDYREVNKTIPLIAAQNQHSAGILSSIFRGKYKTTLDLSNGFWAHSITPESYWLTAFTWLGQQYCWTRLPQGFLNSPALFNADVVDLLKEVPNVQVYVDDIYISHDDPREHLEQLEKVFSLLLNAGYVVSLKKSEIAQHEVEFLGFNITKEGRGLTETFKQKLLNITPPRDLKQLQSILGLLNFARNFIPNFSELVKPLYNIIATAPGKYITWTTDNSQQLQNIISMLNSAENLEERNPEVRLIMKVNTSPSAGYIRFYNEFAKRPIMYLNYVYTKAEVKFTNTEKLLTTIHKGLIKALDLGMGQEILVYSPIVSMTKIQKTPLPERKALPIRWITWMSYLEDPRIQFHYDKTLPELQQVPTVTDDIIAKIKHPSEFSMVFYTDGSAIKHPNVNKSHNAGMGIAQVQFKPEFTVINTWSIPLGDHTAQLAEVAAVEFACKKALKIDGPVLIVTDSFYVAESVNKELPYWQSNGFFNNKKKPLKHVSKWKSIADCIQLKPDIIIIHEKGHQPTASTFHTEGNNLADKLATQGSYVVNAGKRTADGSEFEKRTADGSEFESPKKKAKVE

SEQ ID NO: 548 - protein, 2087 aa, synthetic construct
MPAAKRVKLDGGDKKYSIGLDIGTNSVGWAVITDEYKVPSKKFKVLGNTDRHSIKKNLIGALLFDSGETAEATRLKRTARRRYTRRKNRICYLQEIFSNEMAKVDDSFFHRLEESFLVEEDKKHERHPIFGNIVDEVAYHEKYPTIYHLRKKLVDSTDKADLRLIYLALAHMIKFRGHFLIEGDLNPDNSDVDKLFIQLVQTYNQLFEENPINASGVDAKAILSARLSKSRRLENLIAQLPGEKKNGLFGNLIALSLGLTPNFKSNFDLAEDAKLQLSKDTYDDDLDNLLAQIGDQYADLFLAAKNLSDAILLSDILRVNTEITKAPLSASMIKRYDEHHQDLTLLKALVRQQLPEKYKEIFFDQSKNGYAGYIDGGASQEEFYKFIKPILEKMDGTEELLVKLNREDLLRKQRTFDNGSIPHQIHLGELHAILRRQEDFYPFLKDNREKIEKILTFRIPYYVGPLARGNSRFAWMTRKSEETITPWNFEEVVDKGASAQSFIERMTNFDKNLPNEKVLPKHSLLYEYFTVYNELTKVKYVTEGMRKPAFLSGEQKKAIVDLLFKTNRKVTVKQLKEDYFKKIECFDSVEISGVEDRFNASLGTYHDLLKIIKDKDFLDNEENEDILEDIVLTLTLFEDREMIEERLKTYAHLFDDKVMKQLKRRRYTGWGRLSRKLINGIRDKQSGKTILDFLKSDGFANRNFMQLIHDDSLTFKEDIQKAQVSGQGDSLHEHIANLAGSPAIKKGILQTVKVVDELVKVMGRHKPENIVIEMARENQTTQKGQKNSRERMKRIEEGIKELGSQILKEHPVENTQLQNEKLYLYYLQNGRDMYVDQELDINRLSDYDVDHIVPQSFLKDDSIDNKVLTRSDKARGKSDNVPSEEVVKKMKNYWRQLLNAKLITQRKFDNLTKAERGGLSELDKAGFIKRQLVETRQITKHVAQILDSRMNTKYDENDKLIREVKVITLKSKLVSDFRKDFQFYKVREINNYHHAHDAYLNAVVGTALIKKYPKLESEFVYGDYKVYDVRKMIAKSEQEIGKATAKYFFYSNIMNFFKTEITLANGEIRKRPLIETNGETGEIVWDKGRDFATVRKVLSMPQVNIVKKTEVQTGGFSKESILPKRNSDKLIARKKDWDPKKYGGFDSPTVAYSVLVVAKVEKGKSKKLKSVKELLGITIMERSSFEKNPIDFLEAKGYKEVKKDLIIKLPKYSLFELENGRKRMLASAGELQKGNELALPSKYVNFLYLASHYEKLKGSPEDNEQKQLFVEQHKHYLDEIIEQISEFSKRVILADANLDKVLSAYNKHRDKPIREQAENIIHLFTLTNLGAPAAFKYFDTTIDRKRYTSTKEVLDATLIHQSITGLYETRIDLSQLGGDGGGGSEAAAKPAPGGIPWLMKKPLQLTTLVPLQEYEERLLKQTMLTGSYKEKLQSLFLKYDALWQHWENQVGHRRIKPHHIATGTVNPRPQKQYPINPKAKASIQTVINDLLKQGVLIQQNSIMNTPVYPVPKPDGKWRMVLDYREVNKTIPLIAAQNQHSAGILSSIFRGKYKTTLDLSNGFWAHSITPESYWLTAFTWLGQQYCWTRLPQGFLNSPALFNADVVDLLKEVPNVQVYVDDIYISHDDPREHLEQLEKVFSLLLNAGYVVSLKKSEIAQHEVEFLGFNITKEGRGLTETFKQKLLNITPPRDLKQLQSILGLLNFARNFIPNFSELVKPLYNIIATAPGKYITWTTDNSQQLQNIISMLNSAENLEERNPEVRLIMKVNTSPSAGYIRFYNEFAKRPIMYLNYVYTKAEVKFTNTEKLLTTIHKGLIKALDLGMGQEILVYSPIVSMTKIQKTPLPERKALPIRWITWMSYLEDPRIQFHYDKTLPELQQVPTVTDDIIAKIKHPSEFSMVFYTDGSAIKHPNVNKSHNAGMGIAQVQFKPEFTVINTWSIPLGDHTAQLAEVAAVEFACKKALKIDGPVLIVTDSFYVAESVNKELPYWQSNGFFNNKKKPLKHVSKWKSIADCIQLKPDIIIIHEKGHQPTASTFHTEGNNLADKLATQGSYVVNAGKRTADGSEFEKRTADGSEFESPKKKAKVE

SEQ ID NO: 549 - protein, 2087 aa, synthetic construct
MPAAKRVKLDGGDKKYSIGLDIGTNSVGWAVITDEYKVPSKKFKVLGNTDRHSIKKNLIGALLFDSGETAEATRLKRTARRRYTRRKNRICYLQEIFSNEMAKVDDSFFHRLEESFLVEEDKKHERHPIFGNIVDEVAYHEKYPTIYHLRKKLVDSTDKADLRLIYLALAHMIKFRGHFLIEGDLNPDNSDVDKLFIQLVQTYNQLFEENPINASGVDAKAILSARLSKSRRLENLIAQLPGEKKNGLFGNLIALSLGLTPNFKSNFDLAEDAKLQLSKDTYDDDLDNLLAQIGDQYADLFLAAKNLSDAILLSDILRVNTEITKAPLSASMIKRYDEHHQDLTLLKALVRQQLPEKYKEIFFDQSKNGYAGYIDGGASQEEFYKFIKPILEKMDGTEELLVKLNREDLLRKQRTFDNGSIPHQIHLGELHAILRRQEDFYPFLKDNREKIEKILTFRIPYYVGPLARGNSRFAWMTRKSEETITPWNFEEVVDKGASAQSFIERMTNFDKNLPNEKVLPKHSLLYEYFTVYNELTKVKYVTEGMRKPAFLSGEQKKAIVDLLFKTNRKVTVKQLKEDYFKKIECFDSVEISGVEDRFNASLGTYHDLLKIIKDKDFLDNEENEDILEDIVLTLTLFEDREMIEERLKTYAHLFDDKVMKQLKRRRYTGWGRLSRKLINGIRDKQSGKTILDFLKSDGFANRNFMQLIHDDSLTFKEDIQKAQVSGQGDSLHEHIANLAGSPAIKKGILQTVKVVDELVKVMGRHKPENIVIEMARENQTTQKGQKNSRERMKRIEEGIKELGSQILKEHPVENTQLQNEKLYLYYLQNGRDMYVDQELDINRLSDYDVDHIVPQSFLKDDSIDNKVLTRSDKARGKSDNVPSEEVVKKMKNYWRQLLNAKLITQRKFDNLTKAERGGLSELDKAGFIKRQLVETRQITKHVAQILDSRMNTKYDENDKLIREVKVITLKSKLVSDFRKDFQFYKVREINNYHHAHDAYLNAVVGTALIKKYPKLESEFVYGDYKVYDVRKMIAKSEQEIGKATAKYFFYSNIMNFFKTEITLANGEIRKRPLIETNGETGEIVWDKGRDFATVRKVLSMPQVNIVKKTEVQTGGFSKESILPKRNSDKLIARKKDWDPKKYGGFDSPTVAYSVLVVAKVEKGKSKKLKSVKELLGITIMERSSFEKNPIDFLEAKGYKEVKKDLIIKLPKYSLFELENGRKRMLASAGELQKGNELALPSKYVNFLYLASHYEKLKGSPEDNEQKQLFVEQHKHYLDEIIEQISEFSKRVILADANLDKVLSAYNKHRDKPIREQAENIIHLFTLTNLGAPAAFKYFDTTIDRKRYTSTKEVLDATLIHQSITGLYETRIDLSQLGGDGGGGGPAPEAAAKGGIPWLMKKPLQLTTLVPLQEYEERLLKQTMLTGSYKEKLQSLFLKYDALWQHWENQVGHRRIKPHHIATGTVNPRPQKQYPINPKAKASIQTVINDLLKQGVLIQQNSIMNTPVYPVPKPDGKWRMVLDYREVNKTIPLIAAQNQHSAGILSSIFRGKYKTTLDLSNGFWAHSITPESYWLTAFTWLGQQYCWTRLPQGFLNSPALFNADVVDLLKEVPNVQVYVDDIYISHDDPREHLEQLEKVFSLLLNAGYVVSLKKSEIAQHEVEFLGFNITKEGRGLTETFKQKLLNITPPRDLKQLQSILGLLNFARNFIPNFSELVKPLYNIIATAPGKYITWTTDNSQQLQNIISMLNSAENLEERNPEVRLIMKVNTSPSAGYIRFYNEFAKRPIMYLNYVYTKAEVKFTNTEKLLTTIHKGLIKALDLGMGQEILVYSPIVSMTKIQKTPLPERKALPIRWITWMSYLEDPRIQFHYDKTLPELQQVPTVTDDIIAKIKHPSEFSMVFYTDGSAIKHPNVNKSHNAGMGIAQVQFKPEFTVINTWSIPLGDHTAQLAEVAAVEFACKKALKIDGPVLIVTDSFYVAESVNKELPYWQSNGFFNNKKKPLKHVSKWKSIADCIQLKPDIIIIHEKGHQPTASTFHTEGNNLADKLATQGSYVVNAGKRTADGSEFEKRTADGSEFESPKKKAKVE

SEQ ID NO: 550 - protein, 2106 aa, synthetic construct
MPAAKRVKLDGGDKKYSIGLDIGTNSVGWAVITDEYKVPSKKFKVLGNTDRHSIKKNLIGALLFDSGETAEATRLKRTARRRYTRRKNRICYLQEIFSNEMAKVDDSFFHRLEESFLVEEDKKHERHPIFGNIVDEVAYHEKYPTIYHLRKKLVDSTDKADLRLIYLALAHMIKFRGHFLIEGDLNPDNSDVDKLFIQLVQTYNQLFEENPINASGVDAKAILSARLSKSRRLENLIAQLPGEKKNGLFGNLIALSLGLTPNFKSNFDLAEDAKLQLSKDTYDDDLDNLLAQIGDQYADLFLAAKNLSDAILLSDILRVNTEITKAPLSASMIKRYDEHHQDLTLLKALVRQQLPEKYKEIFFDQSKNGYAGYIDGGASQEEFYKFIKPILEKMDGTEELLVKLNREDLLRKQRTFDNGSIPHQIHLGELHAILRRQEDFYPFLKDNREKIEKILTFRIPYYVGPLARGNSRFAWMTRKSEETITPWNFEEVVDKGASAQSFIERMTNFDKNLPNEKVLPKHSLLYEYFTVYNELTKVKYVTEGMRKPAFLSGEQKKAIVDLLFKTNRKVTVKQLKEDYFKKIECFDSVEISGVEDRFNASLGTYHDLLKIIKDKDFLDNEENEDILEDIVLTLTLFEDREMIEERLKTYAHLFDDKVMKQLKRRRYTGWGRLSRKLINGIRDKQSGKTILDFLKSDGFANRNFMQLIHDDSLTFKEDIQKAQVSGQGDSLHEHIANLAGSPAIKKGILQTVKVVDELVKVMGRHKPENIVIEMARENQTTQKGQKNSRERMKRIEEGIKELGSQILKEHPVENTQLQNEKLYLYYLQNGRDMYVDQELDINRLSDYDVDHIVPQSFLKDDSIDNKVLTRSDKARGKSDNVPSEEVVKKMKNYWRQLLNAKLITQRKFDNLTKAERGGLSELDKAGFIKRQLVETRQITKHVAQILDSRMNTKYDENDKLIREVKVITLKSKLVSDFRKDFQFYKVREINNYHHAHDAYLNAVVGTALIKKYPKLESEFVYGDYKVYDVRKMIAKSEQEIGKATAKYFFYSNIMNFFKTEITLANGEIRKRPLIETNGETGEIVWDKGRDFATVRKVLSMPQVNIVKKTEVQTGGFSKESILPKRNSDKLIARKKDWDPKKYGGFDSPTVAYSVLVVAKVEKGKSKKLKSVKELLGITIMERSSFEKNPIDFLEAKGYKEVKKDLIIKLPKYSLFELENGRKRMLASAGELQKGNELALPSKYVNFLYLASHYEKLKGSPEDNEQKQLFVEQHKHYLDEIIEQISEFSKRVILADANLDKVLSAYNKHRDKPIREQAENIIHLFTLTNLGAPAAFKYFDTTIDRKRYTSTKEVLDATLIHQSITGLYETRIDLSQLGGDGGEAAAKEAAAKEAAAKEAAAKEAAAKEAAAKGGIPWLMKKPLQLTTLVPLQEYEERLLKQTMLTGSYKEKLQSLFLKYDALWQHWENQVGHRRIKPHHIATGTVNPRPQKQYPINPKAKASIQTVINDLLKQGVLIQQNSIMNTPVYPVPKPDGKWRMVLDYREVNKTIPLIAAQNQHSAGILSSIFRGKYKTTLDLSNGFWAHSITPESYWLTAFTWLGQQYCWTRLPQGFLNSPALFNADVVDLLKEVPNVQVYVDDIYISHDDPREHLEQLEKVFSLLLNAGYVVSLKKSEIAQHEVEFLGFNITKEGRGLTETFKQKLLNITPPRDLKQLQSILGKLNFARNFIPNFSELVKPLYNIIATAPGKYITWTTDNSQQLQNIISMLNSAENLEERNPEVRLIMKVNTSPSAGYIRFYNEFAKRPIMYLNYVYTKAEVKFTNTEKLLTTIHKGLIKALDLGMGQEILVYSPIVSMTKIQKTPLPERKALPIRWITWMSYLEDPRIQFHYDKTLPELQQVPTVTDDIIAKIKHPSEFSMVFYTDGSAIKHPNVNKSHNAGMGIAQVQFKPEFTVINTWSIPLGDHTAQLAEVAAVEFACKKALKIDGPVLIVTDSFYVAESVNKELPYWQSNGFFNNKKKPLKHVSKWKSIADCIQLKPDIIIIHEKGHQPTASTFHTEGNNLADKLATQGSYVVNAGKRTADGSEFEKRTADGSEFESPKKKAKVE

SEQ ID NO: 551 - protein, 2079 aa, synthetic construct
MPAAKRVKLDGGDKKYSIGLDIGTNSVGWAVITDEYKVPSKKFKVLGNTDRHSIKKNLIGALLFDSGETAEATRLKRTARRRYTRRKNRICYLQEIFSNEMAKVDDSFFHRLEESFLVEEDKKHERHPIFGNIVDEVAYHEKYPTIYHLRKKLVDSTDKADLRLIYLALAHMIKFRGHFLIEGDLNPDNSDVDKLFIQLVQTYNQLFEENPINASGVDAKAILSARLSKSRRLENLIAQLPGEKKNGLFGNLIALSLGLTPNFKSNFDLAEDAKLQLSKDTYDDDLDNLLAQIGDQYADLFLAAKNLSDAILLSDILRVNTEITKAPLSASMIKRYDEHHQDLTLLKALVRQQLPEKYKEIFFDQSKNGYAGYIDGGASQEEFYKFIKPILEKMDGTEELLVKLNREDLLRKQRTFDNGSIPHQIHLGELHAILRRQEDFYPFLKDNREKIEKILTFRIPYYVGPLARGNSRFAWMTRKSEETITPWNFEEVVDKGASAQSFIERMTNFDKNLPNEKVLPKHSLLYEYFTVYNELTKVKYVTEGMRKPAFLSGEQKKAIVDLLFKTNRKVTVKQLKEDYFKKIECFDSVEISGVEDRFNASLGTYHDLLKIIKDKDFLDNEENEDILEDIVLTLTLFEDREMIEERLKTYAHLFDDKVMKQLKRRRYTGWGRLSRKLINGIRDKQSGKTILDFLKSDGFANRNFMQLIHDDSLTFKEDIQKAQVSGQGDSLHEHIANLAGSPAIKKGILQTVKVVDELVKVMGRHKPENIVIEMARENQTTQKGQKNSRERMKRIEEGIKELGSQILKEHPVENTQLQNEKLYLYYLQNGRDMYVDQELDINRLSDYDVDHIVPQSFLKDDSIDNKVLTRSDKARGKSDNVPSEEVVKKMKNYWRQLLNAKLITQRKFDNLTKAERGGLSELDKAGFIKRQLVETRQITKHVAQILDSRMNTKYDENDKLIREVKVITLKSKLVSDFRKDFQFYKVREINNYHHAHDAYLNAVVGTALIKKYPKLESEFVYGDYKVYDVRKMIAKSEQEIGKATAKYFFYSNIMNFFKTEITLANGEIRKRPLIETNGETGEIVWDKGRDFATVRKVLSMPQVNIVKKTEVQTGGFSKESILPKRNSDKLIARKKDWDPKKYGGFDSPTVAYSVLVVAKVEKGKSKKLKSVKELLGITIMERSSFEKNPIDFLEAKGYKEVKKDLIIKLPKYSLFELENGRKRMLASAGELQKGNELALPSKYVNFLYLASHYEKLKGSPEDNEQKQLFVEQHKHYLDEIIEQISEFSKRVILADANLDKVLSAYNKHRDKPIREQAENIIHLFTLTNLGAPAAFKYFDTTIDRKRYTSTKEVLDATLIHQSITGLYETRIDLSQLGGDGGGSSGGIPWLMKKPLQLTTLVPLQEYEERLLKQTMLTGSYKEKLQSLFLKYDALWQHWENQVGHRRIKPHHIATGTVNPRPQKQYPINPKAKASIQTVINDLLKQGVLIQQNSIMNTPVYPVPKPDGKWRMVLDYREVNKTIPLIAAQNQHSAGILSSIFRGKYKTTLDLSNGFWAHSITPESYWLTAFTWLGQQYCWTRLPQGFLNSPALFNADVVDLLKEVPNVQVYVDDIYISHDDPREHLEQLEKVFSLLLNAGYVVSLKKSEIAQHEVEFLGFNITKEGRGLTETFKQKLLNITPPRDLKQLQSILGKLNFARNFIPNFSELVKPLYNIIATAPGKYITWTTDNSQQLQNIISMLNSAENLEERNPEVRLIMKVNTSPSAGYIRFYNEFAKRPIMYLNYVYTKAEVKFTNTEKLLTTIHKGLIKALDLGMGQEILVYSPIVSMTKIQKTPLPERKALPIRWITWMSYLEDPRIQFHYDKTLPELQQVPTVTDDIIAKIKHPSEFSMVFYTDGSAIKHPNVNKSHNAGMGIAQVQFKPEFTVINTWSIPLGDHTAQLAEVAAVEFACKKALKIDGPVLIVTDSFYVAESVNKELPYWQSNGFFNNKKKPLKHVSKWKSIADCIQLKPDIIIIHEKGHQPTASTFHTEGNNLADKLATQGSYVVNAGKRTADGSEFEKRTADGSEFESPKKKAKVE

SEQ ID NO: 552 - protein, 2079 aa, synthetic construct
MPAAKRVKLDGGDKKYSIGLDIGTNSVGWAVITDEYKVPSKKFKVLGNTDRHSIKKNLIGALLFDSGETAEATRLKRTARRRYTRRKNRICYLQEIFSNEMAKVDDSFFHRLEESFLVEEDKKHERHPIFGNIVDEVAYHEKYPTIYHLRKKLVDSTDKADLRLIYLALAHMIKFRGHFLIEGDLNPDNSDVDKLFIQLVQTYNQLFEENPINASGVDAKAILSARLSKSRRLENLIAQLPGEKKNGLFGNLIALSLGLTPNFKSNFDLAEDAKLQLSKDTYDDDLDNLLAQIGDQYADLFLAAKNLSDAILLSDILRVNTEITKAPLSASMIKRYDEHHQDLTLLKALVRQQLPEKYKEIFFDQSKNGYAGYIDGGASQEEFYKFIKPILEKMDGTEELLVKLNREDLLRKQRTFDNGSIPHQIHLGELHAILRRQEDFYPFLKDNREKIEKILTFRIPYYVGPLARGNSRFAWMTRKSEETITPWNFEEVVDKGASAQSFIERMTNFDKNLPNEKVLPKHSLLYEYFTVYNELTKVKYVTEGMRKPAFLSGEQKKAIVDLLFKTNRKVTVKQLKEDYFKKIECFDSVEISGVEDRFNASLGTYHDLLKIIKDKDFLDNEENEDILEDIVLTLTLFEDREMIEERLKTYAHLFDDKVMKQLKRRRYTGWGRLSRKLINGIRDKQSGKTILDFLKSDGFANRNFMQLIHDDSLTFKEDIQKAQVSGQGDSLHEHIANLAGSPAIKKGILQTVKVVDELVKVMGRHKPENIVIEMARENQTTQKGQKNSRERMKRIEEGIKELGSQILKEHPVENTQLQNEKLYLYYLQNGRDMYVDQELDINRLSDYDVDHIVPQSFLKDDSIDNKVLTRSDKARGKSDNVPSEEVVKKMKNYWRQLLNAKLITQRKFDNLTKAERGGLSELDKAGFIKRQLVETRQITKHVAQILDSRMNTKYDENDKLIREVKVITLKSKLVSDFRKDFQFYKVREINNYHHAHDAYLNAVVGTALIKKYPKLESEFVYGDYKVYDVRKMIAKSEQEIGKATAKYFFYSNIMNFFKTEITLANGEIRKRPLIETNGETGEIVWDKGRDFATVRKVLSMPQVNIVKKTEVQTGGFSKESILPKRNSDKLIARKKDWDPKKYGGFDSPTVAYSVLVVAKVEKGKSKKLKSVKELLGITIMERSSFEKNPIDFLEAKGYKEVKKDLIIKLPKYSLFELENGRKRMLASAGELQKGNELALPSKYVNFLYLASHYEKLKGSPEDNEQKQLFVEQHKHYLDEIIEQISEFSKRVILADANLDKVLSAYNKHRDKPIREQAENIIHLFTLTNLGAPAAFKYFDTTIDRKRYTSTKEVLDATLIHQSITGLYETRIDLSQLGGDGGGGSGGIPWLMKKPLQLTTLVPLQEYEERLLKQTMLTGSYKEKLQSLFLKYDALWQHWENQVGHRRIKPHHIATGTVNPRPQKQYPINPKAKASIQTVINDLLKQGVLIQQNSIMNTPVYPVPKPDGKWRMVLDYREVNKTIPLIAAQNQHSAGILSSIFRGKYKTTLDLSNGFWAHSITPESYWLTAFTWLGQQYCWTRLPQGFLNSPALFNADVVDLLKEVPNVQVYVDDIYISHDDPREHLEQLEKVFSLLLNAGYVVSLKKSEIAQHEVEFLGFNITKEGRGLTETFKQKLLNITPPRDLKQLQSILGKLNFARNFIPNFSELVKPLYNIIATAPGKYITWTTDNSQQLQNIISMLNSAENLEERNPEVRLIMKVNTSPSAGYIRFYNEFAKRPIMYLNYVYTKAEVKFTNTEKLLTTIHKGLIKALDLGMGQEILVYSPIVSMTKIQKTPLPERKALPIRWITWMSYLEDPRIQFHYDKTLPELQQVPTVTDDIIAKIKHPSEFSMVFYTDGSAIKHPNVNKSHNAGMGIAQVQFKPEFTVINTWSIPLGDHTAQLAEVAAVEFACKKALKIDGPVLIVTDSFYVAESVNKELPYWQSNGFFNNKKKPLKHVSKWKSIADCIQLKPDIIIIHEKGHQPTASTFHTEGNNLADKLATQGSYVVNAGKRTADGSEFEKRTADGSEFESPKKKAKVE

SEQ ID NO: 553 - protein, 2087 aa, synthetic construct
MPAAKRVKLDGGDKKYSIGLDIGTNSVGWAVITDEYKVPSKKFKVLGNTDRHSIKKNLIGALLFDSGETAEATRLKRTARRRYTRRKNRICYLQEIFSNEMAKVDDSFFHRLEESFLVEEDKKHERHPIFGNIVDEVAYHEKYPTIYHLRKKLVDSTDKADLRLIYLALAHMIKFRGHFLIEGDLNPDNSDVDKLFIQLVQTYNQLFEENPINASGVDAKAILSARLSKSRRLENLIAQLPGEKKNGLFGNLIALSLGLTPNFKSNFDLAEDAKLQLSKDTYDDDLDNLLAQIGDQYADLFLAAKNLSDAILLSDILRVNTEITKAPLSASMIKRYDEHHQDLTLLKALVRQQLPEKYKEIFFDQSKNGYAGYIDGGASQEEFYKFIKPILEKMDGTEELLVKLNREDLLRKQRTFDNGSIPHQIHLGELHAILRRQEDFYPFLKDNREKIEKILTFRIPYYVGPLARGNSRFAWMTRKSEETITPWNFEEVVDKGASAQSFIERMTNFDKNLPNEKVLPKHSLLYEYFTVYNELTKVKYVTEGMRKPAFLSGEQKKAIVDLLFKTNRKVTVKQLKEDYFKKIECFDSVEISGVEDRFNASLGTYHDLLKIIKDKDFLDNEENEDILEDIVLTLTLFEDREMIEERLKTYAHLFDDKVMKQLKRRRYTGWGRLSRKLINGIRDKQSGKTILDFLKSDGFANRNFMQLIHDDSLTFKEDIQKAQVSGQGDSLHEHIANLAGSPAIKKGILQTVKVVDELVKVMGRHKPENIVIEMARENQTTQKGQKNSRERMKRIEEGIKELGSQILKEHPVENTQLQNEKLYLYYLQNGRDMYVDQELDINRLSDYDVDHIVPQSFLKDDSIDNKVLTRSDKARGKSDNVPSEEVVKKMKNYWRQLLNAKLITQRKFDNLTKAERGGLSELDKAGFIKRQLVETRQITKHVAQILDSRMNTKYDENDKLIREVKVITLKSKLVSDFRKDFQFYKVREINNYHHAHDAYLNAVVGTALIKKYPKLESEFVYGDYKVYDVRKMIAKSEQEIGKATAKYFFYSNIMNFFKTEITLANGEIRKRPLIETNGETGEIVWDKGRDFATVRKVLSMPQVNIVKKTEVQTGGFSKESILPKRNSDKLIARKKDWDPKKYGGFDSPTVAYSVLVVAKVEKGKSKKLKSVKELLGITIMERSSFEKNPIDFLEAKGYKEVKKDLIIKLPKYSLFELENGRKRMLASAGELQKGNELALPSKYVNFLYLASHYEKLKGSPEDNEQKQLFVEQHKHYLDEIIEQISEFSKRVILADANLDKVLSAYNKHRDKPIREQAENIIHLFTLTNLGAPAAFKYFDTTIDRKRYTSTKEVLDATLIHQSITGLYETRIDLSQLGGDGGGSSEAAAKPAPGGIPWLMKKPLQLTTLVPLQEYEERLLKQTMLTGSYKEKLQSLFLKYDALWQHWENQVGHRRIKPHHIATGTVNPRPQKQYPINPKAKASIQTVINDLLKQGVLIQQNSIMNTPVYPVPKPDGKWRMVLDYREVNKTIPLIAAQNQHSAGILSSIFRGKYKTTLDLSNGFWAHSITPESYWLTAFTWLGQQYCWTRLPQGFLNSPALFNADVVDLLKEVPNVQVYVDDIYISHDDPREHLEQLEKVFSLLLNAGYVVSLKKSEIAQHEVEFLGFNITKEGRGLTETFKQKLLNITPPRDLKQLQSILGKLNFARNFIPNFSELVKPLYNIIATAPGKYITWTTDNSQQLQNIISMLNSAENLEERNPEVRLIMKVNTSPSAGYIRFYNEFAKRPIMYLNYVYTKAEVKFTNTEKLLTTIHKGLIKALDLGMGQEILVYSPIVSMTKIQKTPLPERKALPIRWITWMSYLEDPRIQFHYDKTLPELQQVPTVTDDIIAKIKHPSEFSMVFYTDGSAIKHPNVNKSHNAGMGIAQVQFKPEFTVINTWSIPLGDHTAQLAEVAAVEFACKKALKIDGPVLIVTDSFYVAESVNKELPYWQSNGFFNNKKKPLKHVSKWKSIADCIQLKPDIIIIHEKGHQPTASTFHTEGNNLADKLATQGSYVVNAGKRTADGSEFEKRTADGSEFESPKKKAKVE

SEQ ID NO: 554 - protein, 2081 aa, synthetic construct
MPAAKRVKLDGGDKKYSIGLDIGTNSVGWAVITDEYKVPSKKFKVLGNTDRHSIKKNLIGALLFDSGETAEATRLKRTARRRYTRRKNRICYLQEIFSNEMAKVDDSFFHRLEESFLVEEDKKHERHPIFGNIVDEVAYHEKYPTIYHLRKKLVDSTDKADLRLIYLALAHMIKFRGHFLIEGDLNPDNSDVDKLFIQLVQTYNQLFEENPINASGVDAKAILSARLSKSRRLENLIAQLPGEKKNGLFGNLIALSLGLTPNFKSNFDLAEDAKLQLSKDTYDDDLDNLLAQIGDQYADLFLAAKNLSDAILLSDILRVNTEITKAPLSASMIKRYDEHHQDLTLLKALVRQQLPEKYKEIFFDQSKNGYAGYIDGGASQEEFYKFIKPILEKMDGTEELLVKLNREDLLRKQRTFDNGSIPHQIHLGELHAILRRQEDFYPFLKDNREKIEKILTFRIPYYVGPLARGNSRFAWMTRKSEETITPWNFEEVVDKGASAQSFIERMTNFDKNLPNEKVLPKHSLLYEYFTVYNELTKVKYVTEGMRKPAFLSGEQKKAIVDLLFKTNRKVTVKQLKEDYFKKIECFDSVEISGVEDRFNASLGTYHDLLKIIKDKDFLDNEENEDILEDIVLTLTLFEDREMIEERLKTYAHLFDDKVMKQLKRRRYTGWGRLSRKLINGIRDKQSGKTILDFLKSDGFANRNFMQLIHDDSLTFKEDIQKAQVSGQGDSLHEHIANLAGSPAIKKGILQTVKVVDELVKVMGRHKPENIVIEMARENQTTQKGQKNSRERMKRIEEGIKELGSQILKEHPVENTQLQNEKLYLYYLQNGRDMYVDQELDINRLSDYDVDHIVPQSFLKDDSIDNKVLTRSDKARGKSDNVPSEEVVKKMKNYWRQLLNAKLITQRKFDNLTKAERGGLSELDKAGFIKRQLVETRQITKHVAQILDSRMNTKYDENDKLIREVKVITLKSKLVSDFRKDFQFYKVREINNYHHAHDAYLNAVVGTALIKKYPKLESEFVYGDYKVYDVRKMIAKSEQEIGKATAKYFFYSNIMNFFKTEITLANGEIRKRPLIETNGETGEIVWDKGRDFATVRKVLSMPQVNIVKKTEVQTGGFSKESILPKRNSDKLIARKKDWDPKKYGGFDSPTVAYSVLVVAKVEKGKSKKLKSVKELLGITIMERSSFEKNPIDFLEAKGYKEVKKDLIIKLPKYSLFELENGRKRMLASAGELQKGNELALPSKYVNFLYLASHYEKLKGSPEDNEQKQLFVEQHKHYLDEIIEQISEFSKRVILADANLDKVLSAYNKHRDKPIREQAENIIHLFTLTNLGAPAAFKYFDTTIDRKRYTSTKEVLDATLIHQSITGLYETRIDLSQLGGDGGEAAAKGGIPWLMKKPLQLTTLVPLQEYEERLLKQTMLTGSYKEKLQSLFLKYDALWQHWENQVGHRRIKPHHIATGTVNPRPQKQYPINPKAKASIQTVINDLLKQGVLIQQNSIMNTPVYPVPKPDGKWRMVLDYREVNKTIPLIAAQNQHSAGILSSIFRGKYKTTLDLSNGFWAHSITPESYWLTAFTWLGQQYCWTRLPQGFLNSPALFNADVVDLLKEVPNVQVYVDDIYISHDDPREHLEQLEKVFSLLLNAGYVVSLKKSEIAQHEVEFLGFNITKEGRGLTETFKQKLLNITPPRDLKQLQSILGKLNFARNFIPNFSELVKPLYNIIATAPGKYITWTTDNSQQLQNIISMLNSAENLEERNPEVRLIMKVNTSPSAGYIRFYNEFAKRPIMYLNYVYTKAEVKFTNTEKLLTTIHKGLIKALDLGMGQEILVYSPIVSMTKIQKTPLPERKALPIRWITWMSYLEDPRIQFHYDKTLPELQQVPTVTDDIIAKIKHPSEFSMVFYTDGSAIKHPNVNKSHNAGMGIAQVQFKPEFTVINTWSIPLGDHTAQLAEVAAVEFACKKALKIDGPVLIVTDSFYVAESVNKELPYWQSNGFFNNKKKPLKHVSKWKSIADCIQLKPDIIIIHEKGHQPTASTFHTEGNNLADKLATQGSYVVNAGKRTADGSEFEKRTADGSEFESPKKKAKVE

SEQ ID NO: 555 - protein, 2087 aa, synthetic construct
MPAAKRVKLDGGDKKYSIGLDIGTNSVGWAVITDEYKVPSKKFKVLGNTDRHSIKKNLIGALLFDSGETAEATRLKRTARRRYTRRKNRICYLQEIFSNEMAKVDDSFFHRLEESFLVEEDKKHERHPIFGNIVDEVAYHEKYPTIYHLRKKLVDSTDKADLRLIYLALAHMIKFRGHFLIEGDLNPDNSDVDKLFIQLVQTYNQLFEENPINASGVDAKAILSARLSKSRRLENLIAQLPGEKKNGLFGNLIALSLGLTPNFKSNFDLAEDAKLQLSKDTYDDDLDNLLAQIGDQYADLFLAAKNLSDAILLSDILRVNTEITKAPLSASMIKRYDEHHQDLTLLKALVRQQLPEKYKEIFFDQSKNGYAGYIDGGASQEEFYKFIKPILEKMDGTEELLVKLNREDLLRKQRTFDNGSIPHQIHLGELHAILRRQEDFYPFLKDNREKIEKILTFRIPYYVGPLARGNSRFAWMTRKSEETITPWNFEEVVDKGASAQSFIERMTNFDKNLPNEKVLPKHSLLYEYFTVYNELTKVKYVTEGMRKPAFLSGEQKKAIVDLLFKTNRKVTVKQLKEDYFKKIECFDSVEISGVEDRFNASLGTYHDLLKIIKDKDFLDNEENEDILEDIVLTLTLFEDREMIEERLKTYAHLFDDKVMKQLKRRRYTGWGRLSRKLINGIRDKQSGKTILDFLKSDGFANRNFMQLIHDDSLTFKEDIQKAQVSGQGDSLHEHIANLAGSPAIKKGILQTVKVVDELVKVMGRHKPENIVIEMARENQTTQKGQKNSRERMKRIEEGIKELGSQILKEHPVENTQLQNEKLYLYYLQNGRDMYVDQELDINRLSDYDVDHIVPQSFLKDDSIDNKVLTRSDKARGKSDNVPSEEVVKKMKNYWRQLLNAKLITQRKFDNLTKAERGGLSELDKAGFIKRQLVETRQITKHVAQILDSRMNTKYDENDKLIREVKVITLKSKLVSDFRKDFQFYKVREINNYHHAHDAYLNAVVGTALIKKYPKLESEFVYGDYKVYDVRKMIAKSEQEIGKATAKYFFYSNIMNFFKTEITLANGEIRKRPLIETNGETGEIVWDKGRDFATVRKVLSMPQVNIVKKTEVQTGGFSKESILPKRNSDKLIARKKDWDPKKYGGFDSPTVAYSVLVVAKVEKGKSKKLKSVKELLGITIMERSSFEKNPIDFLEAKGYKEVKKDLIIKLPKYSLFELENGRKRMLASAGELQKGNELALPSKYVNFLYLASHYEKLKGSPEDNEQKQLFVEQHKHYLDEIIEQISEFSKRVILADANLDKVLSAYNKHRDKPIREQAENIIHLFTLTNLGAPAAFKYFDTTIDRKRYTSTKEVLDATLIHQSITGLYETRIDLSQLGGDGGEAAAKGGSGGGGGIPWLMKKPLQLTTLVPLQEYEERLLKQTMLTGSYKEKLQSLFLKYDALWQHWENQVGHRRIKPHHIATGTVNPRPQKQYPINPKAKASIQTVINDLLKQGVLIQQNSIMNTPVYPVPKPDGKWRMVLDYREVNKTIPLIAAQNQHSAGILSSIFRGKYKTTLDLSNGFWAHSITPESYWLTAFTWLGQQYCWTRLPQGFLNSPALFNADVVDLLKEVPNVQVYVDDIYISHDDPREHLEQLEKVFSLLLNAGYVVSLKKSEIAQHEVEFLGFNITKEGRGLTETFKQKLLNITPPRDLKQLQSILGKLNFARNFIPNFSELVKPLYNIIATAPGKYITWTTDNSQQLQNIISMLNSAENLEERNPEVRLIMKVNTSPSAGYIRFYNEFAKRPIMYLNYVYTKAEVKFTNTEKLLTTIHKGLIKALDLGMGQEILVYSPIVSMTKIQKTPLPERKALPIRWITWMSYLEDPRIQFHYDKTLPELQQVPTVTDDIIAKIKHPSEFSMVFYTDGSAIKHPNVNKSHNAGMGIAQVQFKPEFTVINTWSIPLGDHTAQLAEVAAVEFACKKALKIDGPVLIVTDSFYVAESVNKELPYWQSNGFFNNKKKPLKHVSKWKSIADCIQLKPDIIIIHEKGHQPTASTFHTEGNNLADKLATQGSYVVNAGKRTADGSEFEKRTADGSEFESPKKKAKVE

SEQ ID NO: 556 - protein, 2096 aa, synthetic construct
MPAAKRVKLDGGDKKYSIGLDIGTNSVGWAVITDEYKVPSKKFKVLGNTDRHSIKKNLIGALLFDSGETAEATRLKRTARRRYTRRKNRICYLQEIFSNEMAKVDDSFFHRLEESFLVEEDKKHERHPIFGNIVDEVAYHEKYPTIYHLRKKLVDSTDKADLRLIYLALAHMIKFRGHFLIEGDLNPDNSDVDKLFIQLVQTYNQLFEENPINASGVDAKAILSARLSKSRRLENLIAQLPGEKKNGLFGNLIALSLGLTPNFKSNFDLAEDAKLQLSKDTYDDDLDNLLAQIGDQYADLFLAAKNLSDAILLSDILRVNTEITKAPLSASMIKRYDEHHQDLTLLKALVRQQLPEKYKEIFFDQSKNGYAGYIDGGASQEEFYKFIKPILEKMDGTEELLVKLNREDLLRKQRTFDNGSIPHQIHLGELHAILRRQEDFYPFLKDNREKIEKILTFRIPYYVGPLARGNSRFAWMTRKSEETITPWNFEEVVDKGASAQSFIERMTNFDKNLPNEKVLPKHSLLYEYFTVYNELTKVKYVTEGMRKPAFLSGEQKKAIVDLLFKTNRKVTVKQLKEDYFKKIECFDSVEISGVEDRFNASLGTYHDLLKIIKDKDFLDNEENEDILEDIVLTLTLFEDREMIEERLKTYAHLFDDKVMKQLKRRRYTGWGRLSRKLINGIRDKQSGKTILDFLKSDGFANRNFMQLIHDDSLTFKEDIQKAQVSGQGDSLHEHIANLAGSPAIKKGILQTVKVVDELVKVMGRHKPENIVIEMARENQTTQKGQKNSRERMKRIEEGIKELGSQILKEHPVENTQLQNEKLYLYYLQNGRDMYVDQELDINRLSDYDVDHIVPQSFLKDDSIDNKVLTRSDKARGKSDNVPSEEVVKKMKNYWRQLLNAKLITQRKFDNLTKAERGGLSELDKAGFIKRQLVETRQITKHVAQILDSRMNTKYDENDKLIREVKVITLKSKLVSDFRKDFQFYKVREINNYHHAHDAYLNAVVGTALIKKYPKLESEFVYGDYKVYDVRKMIAKSEQEIGKATAKYFFYSNIMNFFKTEITLANGEIRKRPLIETNGETGEIVWDKGRDFATVRKVLSMPQVNIVKKTEVQTGGFSKESILPKRNSDKLIARKKDWDPKKYGGFDSPTVAYSVLVVAKVEKGKSKKLKSVKELLGITIMERSSFEKNPIDFLEAKGYKEVKKDLIIKLPKYSLFELENGRKRMLASAGELQKGNELALPSKYVNFLYLASHYEKLKGSPEDNEQKQLFVEQHKHYLDEIIEQISEFSKRVILADANLDKVLSAYNKHRDKPIREQAENIIHLFTLTNLGAPAAFKYFDTTIDRKRYTSTKEVLDATLIHQSITGLYETRIDLSQLGGDGGEAAAKEAAAKEAAAKEAAAKGGIPWLMKKPLQLTTLVPLQEYEERLLKQTMLTGSYKEKLQSLFLKYDALWQHWENQVGHRRIKPHHIATGTVNPRPQKQYPINPKAKASIQTVINDLLKQGVLIQQNSIMNTPVYPVPKPDGKWRMVLDYREVNKTIPLIAAQNQHSAGILSSIFRGKYKTTLDLSNGFWAHSITPESYWLTAFTWLGQQYCWTRLPQGFLNSPALFNADVVDLLKEVPNVQVYVDDIYISHDDPREHLEQLEKVFSLLLNAGYVVSLKKSEIAQHEVEFLGFNITKEGRGLTETFKQKLLNITPPRDLKQLQSILGKLNFARNFIPNFSELVKPLYNIIATAPGKYITWTTDNSQQLQNIISMLNSAENLEERNPEVRLIMKVNTSPSAGYIRFYNEFAKRPIMYLNYVYTKAEVKFTNTEKLLTTIHKGLIKALDLGMGQEILVYSPIVSMTKIQKTPLPERKALPIRWITWMSYLEDPRIQFHYDKTLPELQQVPTVTDDIIAKIKHPSEFSMVFYTDGSAIKHPNVNKSHNAGMGIAQVQFKPEFTVINTWSIPLGDHTAQLAEVAAVEFACKKALKIDGPVLIVTDSFYVAESVNKELPYWQSNGFFNNKKKPLKHVSKWKSIADCIQLKPDIIIIHEKGHQPTASTFHTEGNNLADKLATQGSYVVNAGKRTADGSEFEKRTADGSEFESPKKKAKVE

SEQ ID NO: 557 - protein, 2086 aa, synthetic construct
MPAAKRVKLDGGDKKYSIGLDIGTNSVGWAVITDEYKVPSKKFKVLGNTDRHSIKKNLIGALLFDSGETAEATRLKRTARRRYTRRKNRICYLQEIFSNEMAKVDDSFFHRLEESFLVEEDKKHERHPIFGNIVDEVAYHEKYPTIYHLRKKLVDSTDKADLRLIYLALAHMIKFRGHFLIEGDLNPDNSDVDKLFIQLVQTYNQLFEENPINASGVDAKAILSARLSKSRRLENLIAQLPGEKKNGLFGNLIALSLGLTPNFKSNFDLAEDAKLQLSKDTYDDDLDNLLAQIGDQYADLFLAAKNLSDAILLSDILRVNTEITKAPLSASMIKRYDEHHQDLTLLKALVRQQLPEKYKEIFFDQSKNGYAGYIDGGASQEEFYKFIKPILEKMDGTEELLVKLNREDLLRKQRTFDNGSIPHQIHLGELHAILRRQEDFYPFLKDNREKIEKILTFRIPYYVGPLARGNSRFAWMTRKSEETITPWNFEEVVDKGASAQSFIERMTNFDKNLPNEKVLPKHSLLYEYFTVYNELTKVKYVTEGMRKPAFLSGEQKKAIVDLLFKTNRKVTVKQLKEDYFKKIECFDSVEISGVEDRFNASLGTYHDLLKIIKDKDFLDNEENEDILEDIVLTLTLFEDREMIEERLKTYAHLFDDKVMKQLKRRRYTGWGRLSRKLINGIRDKQSGKTILDFLKSDGFANRNFMQLIHDDSLTFKEDIQKAQVSGQGDSLHEHIANLAGSPAIKKGILQTVKVVDELVKVMGRHKPENIVIEMARENQTTQKGQKNSRERMKRIEEGIKELGSQILKEHPVENTQLQNEKLYLYYLQNGRDMYVDQELDINRLSDYDVDHIVPQSFLKDDSIDNKVLTRSDKARGKSDNVPSEEVVKKMKNYWRQLLNAKLITQRKFDNLTKAERGGLSELDKAGFIKRQLVETRQITKHVAQILDSRMNTKYDENDKLIREVKVITLKSKLVSDFRKDFQFYKVREINNYHHAHDAYLNAVVGTALIKKYPKLESEFVYGDYKVYDVRKMIAKSEQEIGKATAKYFFYSNIMNFFKTEITLANGEIRKRPLIETNGETGEIVWDKGRDFATVRKVLSMPQVNIVKKTEVQTGGFSKESILPKRNSDKLIARKKDWDPKKYGGFDSPTVAYSVLVVAKVEKGKSKKLKSVKELLGITIMERSSFEKNPIDFLEAKGYKEVKKDLIIKLPKYSLFELENGRKRMLASAGELQKGNELALPSKYVNFLYLASHYEKLKGSPEDNEQKQLFVEQHKHYLDEIIEQISEFSKRVILADANLDKVLSAYNKHRDKPIREQAENIIHLFTLTNLGAPAAFKYFDTTIDRKRYTSTKEVLDATLIHQSITGLYETRIDLSQLGGDGGGGGGSGGGGSGGIPWLMKKPLQLTTLVPLQEYEERLLKQTMLTGSYKEKLQSLFLKYDALWQHWENQVGHRRIKPHHIATGTVNPRPQKQYPINPKAKASIQTVINDLLKQGVLIQQNSIMNTPVYPVPKPDGKWRMVLDYREVNKTIPLIAAQNQHSAGILSSIFRGKYKTTLDLSNGFWAHSITPESYWLTAFTWLGQQYCWTRLPQGFLNSPALFNADVVDLLKEVPNVQVYVDDIYISHDDPREHLEQLEKVFSLLLNAGYVVSLKKSEIAQHEVEFLGFNITKEGRGLTETFKQKLLNITPPRDLKQLQSILGKLNFARNFIPNFSELVKPLYNIIATAPGKYITWTTDNSQQLQNIISMLNSAENLEERNPEVRLIMKVNTSPSAGYIRFYNEFAKRPIMYLNYVYTKAEVKFTNTEKLLTTIHKGLIKALDLGMGQEILVYSPIVSMTKIQKTPLPERKALPIRWITWMSYLEDPRIQFHYDKTLPELQQVPTVTDDIIAKIKHPSEFSMVFYTDGSAIKHPNVNKSHNAGMGIAQVQFKPEFTVINTWSIPLGDHTAQLAEVAAVEFACKKALKIDGPVLIVTDSFYVAESVNKELPYWQSNGFFNNKKKPLKHVSKWKSIADCIQLKPDIIIIHEKGHQPTASTFHTEGNNLADKLATQGSYVVNAGKRTADGSEFEKRTADGSEFESPKKKAKVE

SEQ ID NO: 558 - protein, 2087 aa, synthetic construct
MPAAKRVKLDGGDKKYSIGLDIGTNSVGWAVITDEYKVPSKKFKVLGNTDRHSIKKNLIGALLFDSGETAEATRLKRTARRRYTRRKNRICYLQEIFSNEMAKVDDSFFHRLEESFLVEEDKKHERHPIFGNIVDEVAYHEKYPTIYHLRKKLVDSTDKADLRLIYLALAHMIKFRGHFLIEGDLNPDNSDVDKLFIQLVQTYNQLFEENPINASGVDAKAILSARLSKSRRLENLIAQLPGEKKNGLFGNLIALSLGLTPNFKSNFDLAEDAKLQLSKDTYDDDLDNLLAQIGDQYADLFLAAKNLSDAILLSDILRVNTEITKAPLSASMIKRYDEHHQDLTLLKALVRQQLPEKYKEIFFDQSKNGYAGYIDGGASQEEFYKFIKPILEKMDGTEELLVKLNREDLLRKQRTFDNGSIPHQIHLGELHAILRRQEDFYPFLKDNREKIEKILTFRIPYYVGPLARGNSRFAWMTRKSEETITPWNFEEVVDKGASAQSFIERMTNFDKNLPNEKVLPKHSLLYEYFTVYNELTKVKYVTEGMRKPAFLSGEQKKAIVDLLFKTNRKVTVKQLKEDYFKKIECFDSVEISGVEDRFNASLGTYHDLLKIIKDKDFLDNEENEDILEDIVLTLTLFEDREMIEERLKTYAHLFDDKVMKQLKRRRYTGWGRLSRKLINGIRDKQSGKTILDFLKSDGFANRNFMQLIHDDSLTFKEDIQKAQVSGQGDSLHEHIANLAGSPAIKKGILQTVKVVDELVKVMGRHKPENIVIEMARENQTTQKGQKNSRERMKRIEEGIKELGSQILKEHPVENTQLQNEKLYLYYLQNGRDMYVDQELDINRLSDYDVDHIVPQSFLKDDSIDNKVLTRSDKARGKSDNVPSEEVVKKMKNYWRQLLNAKLITQRKFDNLTKAERGGLSELDKAGFIKRQLVETRQITKHVAQILDSRMNTKYDENDKLIREVKVITLKSKLVSDFRKDFQFYKVREINNYHHAHDAYLNAVVGTALIKKYPKLESEFVYGDYKVYDVRKMIAKSEQEIGKATAKYFFYSNIMNFFKTEITLANGEIRKRPLIETNGETGEIVWDKGRDFATVRKVLSMPQVNIVKKTEVQTGGFSKESILPKRNSDKLIARKKDWDPKKYGGFDSPTVAYSVLVVAKVEKGKSKKLKSVKELLGITIMERSSFEKNPIDFLEAKGYKEVKKDLIIKLPKYSLFELENGRKRMLASAGELQKGNELALPSKYVNFLYLASHYEKLKGSPEDNEQKQLFVEQHKHYLDEIIEQISEFSKRVILADANLDKVLSAYNKHRDKPIREQAENIIHLFTLTNLGAPAAFKYFDTTIDRKRYTSTKEVLDATLIHQSITGLYETRIDLSQLGGDGGEAAAKPAPGSSGGIPWLMKKPLQLTTLVPLQEYEERLLKQTMLTGSYKEKLQSLFLKYDALWQHWENQVGHRRIKPHHIATGTVNPRPQKQYPINPKAKASIQTVINDLLKQGVLIQQNSIMNTPVYPVPKPDGKWRMVLDYREVNKTIPLIAAQNQHSAGILSSIFRGKYKTTLDLSNGFWAHSITPESYWLTAFTWLGQQYCWTRLPQGFLNSPALFNADVVDLLKEVPNVQVYVDDIYISHDDPREHLEQLEKVFSLLLNAGYVVSLKKSEIAQHEVEFLGFNITKEGRGLTETFKQKLLNITPPRDLKQLQSILGKLNFARNFIPNFSELVKPLYNIIATAPGKYITWTTDNSQQLQNIISMLNSAENLEERNPEVRLIMKVNTSPSAGYIRFYNEFAKRPIMYLNYVYTKAEVKFTNTEKLLTTIHKGLIKALDLGMGQEILVYSPIVSMTKIQKTPLPERKALPIRWITWMSYLEDPRIQFHYDKTLPELQQVPTVTDDIIAKIKHPSEFSMVFYTDGSAIKHPNVNKSHNAGMGIAQVQFKPEFTVINTWSIPLGDHTAQLAEVAAVEFACKKALKIDGPVLIVTDSFYVAESVNKELPYWQSNGFFNNKKKPLKHVSKWKSIADCIQLKPDIIIIHEKGHQPTASTFHTEGNNLADKLATQGSYVVNAGKRTADGSEFEKRTADGSEFESPKKKAKVE

SEQ ID NO: 559 - protein, 2087 aa, synthetic construct
MPAAKRVKLDGGDKKYSIGLDIGTNSVGWAVITDEYKVPSKKFKVLGNTDRHSIKKNLIGALLFDSGETAEATRLKRTARRRYTRRKNRICYLQEIFSNEMAKVDDSFFHRLEESFLVEEDKKHERHPIFGNIVDEVAYHEKYPTIYHLRKKLVDSTDKADLRLIYLALAHMIKFRGHFLIEGDLNPDNSDVDKLFIQLVQTYNQLFEENPINASGVDAKAILSARLSKSRRLENLIAQLPGEKKNGLFGNLIALSLGLTPNFKSNFDLAEDAKLQLSKDTYDDDLDNLLAQIGDQYADLFLAAKNLSDAILLSDILRVNTEITKAPLSASMIKRYDEHHQDLTLLKALVRQQLPEKYKEIFFDQSKNGYAGYIDGGASQEEFYKFIKPILEKMDGTEELLVKLNREDLLRKQRTFDNGSIPHQIHLGELHAILRRQEDFYPFLKDNREKIEKILTFRIPYYVGPLARGNSRFAWMTRKSEETITPWNFEEVVDKGASAQSFIERMTNFDKNLPNEKVLPKHSLLYEYFTVYNELTKVKYVTEGMRKPAFLSGEQKKAIVDLLFKTNRKVTVKQLKEDYFKKIECFDSVEISGVEDRFNASLGTYHDLLKIIKDKDFLDNEENEDILEDIVLTLTLFEDREMIEERLKTYAHLFDDKVMKQLKRRRYTGWGRLSRKLINGIRDKQSGKTILDFLKSDGFANRNFMQLIHDDSLTFKEDIQKAQVSGQGDSLHEHIANLAGSPAIKKGILQTVKVVDELVKVMGRHKPENIVIEMARENQTTQKGQKNSRERMKRIEEGIKELGSQILKEHPVENTQLQNEKLYLYYLQNGRDMYVDQELDINRLSDYDVDHIVPQSFLKDDSIDNKVLTRSDKARGKSDNVPSEEVVKKMKNYWRQLLNAKLITQRKFDNLTKAERGGLSELDKAGFIKRQLVETRQITKHVAQILDSRMNTKYDENDKLIREVKVITLKSKLVSDFRKDFQFYKVREINNYHHAHDAYLNAVVGTALIKKYPKLESEFVYGDYKVYDVRKMIAKSEQEIGKATAKYFFYSNIMNFFKTEITLANGEIRKRPLIETNGETGEIVWDKGRDFATVRKVLSMPQVNIVKKTEVQTGGFSKESILPKRNSDKLIARKKDWDPKKYGGFDSPTVAYSVLVVAKVEKGKSKKLKSVKELLGITIMERSSFEKNPIDFLEAKGYKEVKKDLIIKLPKYSLFELENGRKRMLASAGELQKGNELALPSKYVNFLYLASHYEKLKGSPEDNEQKQLFVEQHKHYLDEIIEQISEFSKRVILADANLDKVLSAYNKHRDKPIREQAENIIHLFTLTNLGAPAAFKYFDTTIDRKRYTSTKEVLDATLIHQSITGLYETRIDLSQLGGDGGPAPEAAAKGGGGGIPWLMKKPLQLTTLVPLQEYEERLLKQTMLTGSYKEKLQSLFLKYDALWQHWENQVGHRRIKPHHIATGTVNPRPQKQYPINPKAKASIQTVINDLLKQGVLIQQNSIMNTPVYPVPKPDGKWRMVLDYREVNKTIPLIAAQNQHSAGILSSIFRGKYKTTLDLSNGFWAHSITPESYWLTAFTWLGQQYCWTRLPQGFLNSPALFNADVVDLLKEVPNVQVYVDDIYISHDDPREHLEQLEKVFSLLLNAGYVVSLKKSEIAQHEVEFLGFNITKEGRGLTETFKQKLLNITPPRDLKQLQSILGKLNFARNFIPNFSELVKPLYNIIATAPGKYITWTTDNSQQLQNIISMLNSAENLEERNPEVRLIMKVNTSPSAGYIRFYNEFAKRPIMYLNYVYTKAEVKFTNTEKLLTTIHKGLIKALDLGMGQEILVYSPIVSMTKIQKTPLPERKALPIRWITWMSYLEDPRIQFHYDKTLPELQQVPTVTDDIIAKIKHPSEFSMVFYTDGSAIKHPNVNKSHNAGMGIAQVQFKPEFTVINTWSIPLGDHTAQLAEVAAVEFACKKALKIDGPVLIVTDSFYVAESVNKELPYWQSNGFFNNKKKPLKHVSKWKSIADCIQLKPDIIIIHEKGHQPTASTFHTEGNNLADKLATQGSYVVNAGKRTADGSEFEKRTADGSEFESPKKKAKVE

SEQ ID NO: 560 - protein, 2083 aa, synthetic construct
MPAAKRVKLDGGDKKYSIGLDIGTNSVGWAVITDEYKVPSKKFKVLGNTDRHSIKKNLIGALLFDSGETAEATRLKRTARRRYTRRKNRICYLQEIFSNEMAKVDDSFFHRLEESFLVEEDKKHERHPIFGNIVDEVAYHEKYPTIYHLRKKLVDSTDKADLRLIYLALAHMIKFRGHFLIEGDLNPDNSDVDKLFIQLVQTYNQLFEENPINASGVDAKAILSARLSKSRRLENLIAQLPGEKKNGLFGNLIALSLGLTPNFKSNFDLAEDAKLQLSKDTYDDDLDNLLAQIGDQYADLFLAAKNLSDAILLSDILRVNTEITKAPLSASMIKRYDEHHQDLTLLKALVRQQLPEKYKEIFFDQSKNGYAGYIDGGASQEEFYKFIKPILEKMDGTEELLVKLNREDLLRKQRTFDNGSIPHQIHLGELHAILRRQEDFYPFLKDNREKIEKILTFRIPYYVGPLARGNSRFAWMTRKSEETITPWNFEEVVDKGASAQSFIERMTNFDKNLPNEKVLPKHSLLYEYFTVYNELTKVKYVTEGMRKPAFLSGEQKKAIVDLLFKTNRKVTVKQLKEDYFKKIECFDSVEISGVEDRFNASLGTYHDLLKIIKDKDFLDNEENEDILEDIVLTLTLFEDREMIEERLKTYAHLFDDKVMKQLKRRRYTGWGRLSRKLINGIRDKQSGKTILDFLKSDGFANRNFMQLIHDDSLTFKEDIQKAQVSGQGDSLHEHIANLAGSPAIKKGILQTVKVVDELVKVMGRHKPENIVIEMARENQTTQKGQKNSRERMKRIEEGIKELGSQILKEHPVENTQLQNEKLYLYYLQNGRDMYVDQELDINRLSDYDVDHIVPQSFLKDDSIDNKVLTRSDKARGKSDNVPSEEVVKKMKNYWRQLLNAKLITQRKFDNLTKAERGGLSELDKAGFIKRQLVETRQITKHVAQILDSRMNTKYDENDKLIREVKVITLKSKLVSDFRKDFQFYKVREINNYHHAHDAYLNAVVGTALIKKYPKLESEFVYGDYKVYDVRKMIAKSEQEIGKATAKYFFYSNIMNFFKTEITLANGEIRKRPLIETNGETGEIVWDKGRDFATVRKVLSMPQVNIVKKTEVQTGGFSKESILPKRNSDKLIARKKDWDPKKYGGFDSPTVAYSVLVVAKVEKGKSKKLKSVKELLGITIMERSSFEKNPIDFLEAKGYKEVKKDLIIKLPKYSLFELENGRKRMLASAGELQKGNELALPSKYVNFLYLASHYEKLKGSPEDNEQKQLFVEQHKHYLDEIIEQISEFSKRVILADANLDKVLSAYNKHRDKPIREQAENIIHLFTLTNLGAPAAFKYFDTTIDRKRYTSTKEVLDATLIHQSITGLYETRIDLSQLGGDGGPAPAPAPGGIPWLMKKPLQLTTLVPLQEYEERLLKQTMLTGSYKEKLQSLFLKYDALWQHWENQVGHRRIKPHHIATGTVNPRPQKQYPINPKAKASIQTVINDLLKQGVLIQQNSIMNTPVYPVPKPDGKWRMVLDYREVNKTIPLIAAQNQHSAGILSSIFRGKYKTTLDLSNGFWAHSITPESYWLTAFTWLGQQYCWTRLPQGFLNSPALFNADVVDLLKEVPNVQVYVDDIYISHDDPREHLEQLEKVFSLLLNAGYVVSLKKSEIAQHEVEFLGFNITKEGRGLTETFKQKLLNITPPRDLKQLQSILGKLNFARNFIPNFSELVKPLYNIIATAPGKYITWTTDNSQQLQNIISMLNSAENLEERNPEVRLIMKVNTSPSAGYIRFYNEFAKRPIMYLNYVYTKAEVKFTNTEKLLTTIHKGLIKALDLGMGQEILVYSPIVSMTKIQKTPLPERKALPIRWITWMSYLEDPRIQFHYDKTLPELQQVPTVTDDIIAKIKHPSEFSMVFYTDGSAIKHPNVNKSHNAGMGIAQVQFKPEFTVINTWSIPLGDHTAQLAEVAAVEFACKKALKIDGPVLIVTDSFYVAESVNKELPYWQSNGFFNNKKKPLKHVSKWKSIADCIQLKPDIIIIHEKGHQPTASTFHTEGNNLADKLATQGSYVVNAGKRTADGSEFEKRTADGSEFESPKKKAKVE

SEQ ID NO: 561 - protein, 2087 aa, synthetic construct
MPAAKRVKLDGGDKKYSIGLDIGTNSVGWAVITDEYKVPSKKFKVLGNTDRHSIKKNLIGALLFDSGETAEATRLKRTARRRYTRRKNRICYLQEIFSNEMAKVDDSFFHRLEESFLVEEDKKHERHPIFGNIVDEVAYHEKYPTIYHLRKKLVDSTDKADLRLIYLALAHMIKFRGHFLIEGDLNPDNSDVDKLFIQLVQTYNQLFEENPINASGVDAKAILSARLSKSRRLENLIAQLPGEKKNGLFGNLIALSLGLTPNFKSNFDLAEDAKLQLSKDTYDDDLDNLLAQIGDQYADLFLAAKNLSDAILLSDILRVNTEITKAPLSASMIKRYDEHHQDLTLLKALVRQQLPEKYKEIFFDQSKNGYAGYIDGGASQEEFYKFIKPILEKMDGTEELLVKLNREDLLRKQRTFDNGSIPHQIHLGELHAILRRQEDFYPFLKDNREKIEKILTFRIPYYVGPLARGNSRFAWMTRKSEETITPWNFEEVVDKGASAQSFIERMTNFDKNLPNEKVLPKHSLLYEYFTVYNELTKVKYVTEGMRKPAFLSGEQKKAIVDLLFKTNRKVTVKQLKEDYFKKIECFDSVEISGVEDRFNASLGTYHDLLKIIKDKDFLDNEENEDILEDIVLTLTLFEDREMIEERLKTYAHLFDDKVMKQLKRRRYTGWGRLSRKLINGIRDKQSGKTILDFLKSDGFANRNFMQLIHDDSLTFKEDIQKAQVSGQGDSLHEHIANLAGSPAIKKGILQTVKVVDELVKVMGRHKPENIVIEMARENQTTQKGQKNSRERMKRIEEGIKELGSQILKEHPVENTQLQNEKLYLYYLQNGRDMYVDQELDINRLSDYDVDHIVPQSFLKDDSIDNKVLTRSDKARGKSDNVPSEEVVKKMKNYWRQLLNAKLITQRKFDNLTKAERGGLSELDKAGFIKRQLVETRQITKHVAQILDSRMNTKYDENDKLIREVKVITLKSKLVSDFRKDFQFYKVREINNYHHAHDAYLNAVVGTALIKKYPKLESEFVYGDYKVYDVRKMIAKSEQEIGKATAKYFFYSNIMNFFKTEITLANGEIRKRPLIETNGETGEIVWDKGRDFATVRKVLSMPQVNIVKKTEVQTGGFSKESILPKRNSDKLIARKKDWDPKKYGGFDSPTVAYSVLVVAKVEKGKSKKLKSVKELLGITIMERSSFEKNPIDFLEAKGYKEVKKDLIIKLPKYSLFELENGRKRMLASAGELQKGNELALPSKYVNFLYLASHYEKLKGSPEDNEQKQLFVEQHKHYLDEIIEQISEFSKRVILADANLDKVLSAYNKHRDKPIREQAENIIHLFTLTNLGAPAAFKYFDTTIDRKRYTSTKEVLDATLIHQSITGLYETRIDLSQLGGDGGGGSEAAAKGSSGGIPWLMKKPLQLTTLVPLQEYEERLLKQTMLTGSYKEKLQSLFLKYDALWQHWENQVGHRRIKPHHIATGTVNPRPQKQYPINPKAKASIQTVINDLLKQGVLIQQNSIMNTPVYPVPKPDGKWRMVLDYREVNKTIPLIAAQNQHSAGILSSIFRGKYKTTLDLSNGFWAHSITPESYWLTAFTWLGQQYCWTRLPQGFLNSPALFNADVVDLLKEVPNVQVYVDDIYISHDDPREHLEQLEKVFSLLLNAGYVVSLKKSEIAQHEVEFLGFNITKEGRGLTETFKQKLLNITPPRDLKQLQSILGKLNFARNFIPNFSELVKPLYNIIATAPGKYITWTTDNSQQLQNIISMLNSAENLEERNPEVRLIMKVNTSPSAGYIRFYNEFAKRPIMYLNYVYTKAEVKFTNTEKLLTTIHKGLIKALDLGMGQEILVYSPIVSMTKIQKTPLPERKALPIRWITWMSYLEDPRIQFHYDKTLPELQQVPTVTDDIIAKIKHPSEFSMVFYTDGSAIKHPNVNKSHNAGMGIAQVQFKPEFTVINTWSIPLGDHTAQLAEVAAVEFACKKALKIDGPVLIVTDSFYVAESVNKELPYWQSNGFFNNKKKPLKHVSKWKSIADCIQLKPDIIIIHEKGHQPTASTFHTEGNNLADKLATQGSYVVNAGKRTADGSEFEKRTADGSEFESPKKKAKVE

SEQ ID NO: 562 - protein, 2085 aa, synthetic construct
MPAAKRVKLDGGDKKYSIGLDIGTNSVGWAVITDEYKVPSKKFKVLGNTDRHSIKKNLIGALLFDSGETAEATRLKRTARRRYTRRKNRICYLQEIFSNEMAKVDDSFFHRLEESFLVEEDKKHERHPIFGNIVDEVAYHEKYPTIYHLRKKLVDSTDKADLRLIYLALAHMIKFRGHFLIEGDLNPDNSDVDKLFIQLVQTYNQLFEENPINASGVDAKAILSARLSKSRRLENLIAQLPGEKKNGLFGNLIALSLGLTPNFKSNFDLAEDAKLQLSKDTYDDDLDNLLAQIGDQYADLFLAAKNLSDAILLSDILRVNTEITKAPLSASMIKRYDEHHQDLTLLKALVRQQLPEKYKEIFFDQSKNGYAGYIDGGASQEEFYKFIKPILEKMDGTEELLVKLNREDLLRKQRTFDNGSIPHQIHLGELHAILRRQEDFYPFLKDNREKIEKILTFRIPYYVGPLARGNSRFAWMTRKSEETITPWNFEEVVDKGASAQSFIERMTNFDKNLPNEKVLPKHSLLYEYFTVYNELTKVKYVTEGMRKPAFLSGEQKKAIVDLLFKTNRKVTVKQLKEDYFKKIECFDSVEISGVEDRFNASLGTYHDLLKIIKDKDFLDNEENEDILEDIVLTLTLFEDREMIEERLKTYAHLFDDKVMKQLKRRRYTGWGRLSRKLINGIRDKQSGKTILDFLKSDGFANRNFMQLIHDDSLTFKEDIQKAQVSGQGDSLHEHIANLAGSPAIKKGILQTVKVVDELVKVMGRHKPENIVIEMARENQTTQKGQKNSRERMKRIEEGIKELGSQILKEHPVENTQLQNEKLYLYYLQNGRDMYVDQELDINRLSDYDVDHIVPQSFLKDDSIDNKVLTRSDKARGKSDNVPSEEVVKKMKNYWRQLLNAKLITQRKFDNLTKAERGGLSELDKAGFIKRQLVETRQITKHVAQILDSRMNTKYDENDKLIREVKVITLKSKLVSDFRKDFQFYKVREINNYHHAHDAYLNAVVGTALIKKYPKLESEFVYGDYKVYDVRKMIAKSEQEIGKATAKYFFYSNIMNFFKTEITLANGEIRKRPLIETNGETGEIVWDKGRDFATVRKVLSMPQVNIVKKTEVQTGGFSKESILPKRNSDKLIARKKDWDPKKYGGFDSPTVAYSVLVVAKVEKGKSKKLKSVKELLGITIMERSSFEKNPIDFLEAKGYKEVKKDLIIKLPKYSLFELENGRKRMLASAGELQKGNELALPSKYVNFLYLASHYEKLKGSPEDNEQKQLFVEQHKHYLDEIIEQISEFSKRVILADANLDKVLSAYNKHRDKPIREQAENIIHLFTLTNLGAPAAFKYFDTTIDRKRYTSTKEVLDATLIHQSITGLYETRIDLSQLGGDGGGSSPAPGGGGGIPWLMKKPLQLTTLVPLQEYEERLLKQTMLTGSYKEKLQSLFLKYDALWQHWENQVGHRRIKPHHIATGTVNPRPQKQYPINPKAKASIQTVINDLLKQGVLIQQNSIMNTPVYPVPKPDGKWRMVLDYREVNKTIPLIAAQNQHSAGILSSIFRGKYKTTLDLSNGFWAHSITPESYWLTAFTWLGQQYCWTRLPQGFLNSPALFNADVVDLLKEVPNVQVYVDDIYISHDDPREHLEQLEKVFSLLLNAGYVVSLKKSEIAQHEVEFLGFNITKEGRGLTETFKQKLLNITPPRDLKQLQSILGKLNFARNFIPNFSELVKPLYNIIATAPGKYITWTTDNSQQLQNIISMLNSAENLEERNPEVRLIMKVNTSPSAGYIRFYNEFAKRPIMYLNYVYTKAEVKFTNTEKLLTTIHKGLIKALDLGMGQEILVYSPIVSMTKIQKTPLPERKALPIRWITWMSYLEDPRIQFHYDKTLPELQQVPTVTDDIIAKIKHPSEFSMVFYTDGSAIKHPNVNKSHNAGMGIAQVQFKPEFTVINTWSIPLGDHTAQLAEVAAVEFACKKALKIDGPVLIVTDSFYVAESVNKELPYWQSNGFFNNKKKPLKHVSKWKSIADCIQLKPDIIIIHEKGHQPTASTFHTEGNNLADKLATQGSYVVNAGKRTADGSEFEKRTADGSEFESPKKKAKVE

SEQ ID NO: 563 - protein, 2087 aa, synthetic construct
MPAAKRVKLDGGDKKYSIGLDIGTNSVGWAVITDEYKVPSKKFKVLGNTDRHSIKKNLIGALLFDSGETAEATRLKRTARRRYTRRKNRICYLQEIFSNEMAKVDDSFFHRLEESFLVEEDKKHERHPIFGNIVDEVAYHEKYPTIYHLRKKLVDSTDKADLRLIYLALAHMIKFRGHFLIEGDLNPDNSDVDKLFIQLVQTYNQLFEENPINASGVDAKAILSARLSKSRRLENLIAQLPGEKKNGLFGNLIALSLGLTPNFKSNFDLAEDAKLQLSKDTYDDDLDNLLAQIGDQYADLFLAAKNLSDAILLSDILRVNTEITKAPLSASMIKRYDEHHQDLTLLKALVRQQLPEKYKEIFFDQSKNGYAGYIDGGASQEEFYKFIKPILEKMDGTEELLVKLNREDLLRKQRTFDNGSIPHQIHLGELHAILRRQEDFYPFLKDNREKIEKILTFRIPYYVGPLARGNSRFAWMTRKSEETITPWNFEEVVDKGASAQSFIERMTNFDKNLPNEKVLPKHSLLYEYFTVYNELTKVKYVTEGMRKPAFLSGEQKKAIVDLLFKTNRKVTVKQLKEDYFKKIECFDSVEISGVEDRFNASLGTYHDLLKIIKDKDFLDNEENEDILEDIVLTLTLFEDREMIEERLKTYAHLFDDKVMKQLKRRRYTGWGRLSRKLINGIRDKQSGKTILDFLKSDGFANRNFMQLIHDDSLTFKEDIQKAQVSGQGDSLHEHIANLAGSPAIKKGILQTVKVVDELVKVMGRHKPENIVIEMARENQTTQKGQKNSRERMKRIEEGIKELGSQILKEHPVENTQLQNEKLYLYYLQNGRDMYVDQELDINRLSDYDVDHIVPQSFLKDDSIDNKVLTRSDKARGKSDNVPSEEVVKKMKNYWRQLLNAKLITQRKFDNLTKAERGGLSELDKAGFIKRQLVETRQITKHVAQILDSRMNTKYDENDKLIREVKVITLKSKLVSDFRKDFQFYKVREINNYHHAHDAYLNAVVGTALIKKYPKLESEFVYGDYKVYDVRKMIAKSEQEIGKATAKYFFYSNIMNFFKTEITLANGEIRKRPLIETNGETGEIVWDKGRDFATVRKVLSMPQVNIVKKTEVQTGGFSKESILPKRNSDKLIARKKDWDPKKYGGFDSPTVAYSVLVVAKVEKGKSKKLKSVKELLGITIMERSSFEKNPIDFLEAKGYKEVKKDLIIKLPKYSLFELENGRKRMLASAGELQKGNELALPSKYVNFLYLASHYEKLKGSPEDNEQKQLFVEQHKHYLDEIIEQISEFSKRVILADANLDKVLSAYNKHRDKPIREQAENIIHLFTLTNLGAPAAFKYFDTTIDRKRYTSTKEVLDATLIHQSITGLYETRIDLSQLGGDGGGGSEAAAKGGGGGIPWLMKKPLQLTTLVPLQEYEERLLKQTMLTGSYKEKLQSLFLKYDALWQHWENQVGHRRIKPHHIATGTVNPRPQKQYPINPKAKASIQTVINDLLKQGVLIQQNSIMNTPVYPVPKPDGKWRMVLDYREVNKTIPLIAAQNQHSAGILSSIFRGKYKTTLDLSNGFWAHSITPESYWLTAFTWLGQQYCWTRLPQGFLNSPALFNADVVDLLKEVPNVQVYVDDIYISHDDPREHLEQLEKVFSLLLNAGYVVSLKKSEIAQHEVEFLGFNITKEGRGLTETFKQKLLNITPPRDLKQLQSILGKLNFARNFIPNFSELVKPLYNIIATAPGKYITWTTDNSQQLQNIISMLNSAENLEERNPEVRLIMKVNTSPSAGYIRFYNEFAKRPIMYLNYVYTKAEVKFTNTEKLLTTIHKGLIKALDLGMGQEILVYSPIVSMTKIQKTPLPERKALPIRWITWMSYLEDPRIQFHYDKTLPELQQVPTVTDDIIAKIKHPSEFSMVFYTDGSAIKHPNVNKSHNAGMGIAQVQFKPEFTVINTWSIPLGDHTAQLAEVAAVEFACKKALKIDGPVLIVTDSFYVAESVNKELPYWQSNGFFNNKKKPLKHVSKWKSIADCIQLKPDIIIIHEKGHQPTASTFHTEGNNLADKLATQGSYVVNAGKRTADGSEFEKRTADGSEFESPKKKAKVE

SEQ ID NO: 564 - protein, 2082 aa, synthetic construct
MPAAKRVKLDGGDKKYSIGLDIGTNSVGWAVITDEYKVPSKKFKVLGNTDRHSIKKNLIGALLFDSGETAEATRLKRTARRRYTRRKNRICYLQEIFSNEMAKVDDSFFHRLEESFLVEEDKKHERHPIFGNIVDEVAYHEKYPTIYHLRKKLVDSTDKADLRLIYLALAHMIKFRGHFLIEGDLNPDNSDVDKLFIQLVQTYNQLFEENPINASGVDAKAILSARLSKSRRLENLIAQLPGEKKNGLFGNLIALSLGLTPNFKSNFDLAEDAKLQLSKDTYDDDLDNLLAQIGDQYADLFLAAKNLSDAILLSDILRVNTEITKAPLSASMIKRYDEHHQDLTLLKALVRQQLPEKYKEIFFDQSKNGYAGYIDGGASQEEFYKFIKPILEKMDGTEELLVKLNREDLLRKQRTFDNGSIPHQIHLGELHAILRRQEDFYPFLKDNREKIEKILTFRIPYYVGPLARGNSRFAWMTRKSEETITPWNFEEVVDKGASAQSFIERMTNFDKNLPNEKVLPKHSLLYEYFTVYNELTKVKYVTEGMRKPAFLSGEQKKAIVDLLFKTNRKVTVKQLKEDYFKKIECFDSVEISGVEDRFNASLGTYHDLLKIIKDKDFLDNEENEDILEDIVLTLTLFEDREMIEERLKTYAHLFDDKVMKQLKRRRYTGWGRLSRKLINGIRDKQSGKTILDFLKSDGFANRNFMQLIHDDSLTFKEDIQKAQVSGQGDSLHEHIANLAGSPAIKKGILQTVKVVDELVKVMGRHKPENIVIEMARENQTTQKGQKNSRERMKRIEEGIKELGSQILKEHPVENTQLQNEKLYLYYLQNGRDMYVDQELDINRLSDYDVDHIVPQSFLKDDSIDNKVLTRSDKARGKSDNVPSEEVVKKMKNYWRQLLNAKLITQRKFDNLTKAERGGLSELDKAGFIKRQLVETRQITKHVAQILDSRMNTKYDENDKLIREVKVITLKSKLVSDFRKDFQFYKVREINNYHHAHDAYLNAVVGTALIKKYPKLESEFVYGDYKVYDVRKMIAKSEQEIGKATAKYFFYSNIMNFFKTEITLANGEIRKRPLIETNGETGEIVWDKGRDFATVRKVLSMPQVNIVKKTEVQTGGFSKESILPKRNSDKLIARKKDWDPKKYGGFDSPTVAYSVLVVAKVEKGKSKKLKSVKELLGITIMERSSFEKNPIDFLEAKGYKEVKKDLIIKLPKYSLFELENGRKRMLASAGELQKGNELALPSKYVNFLYLASHYEKLKGSPEDNEQKQLFVEQHKHYLDEIIEQISEFSKRVILADANLDKVLSAYNKHRDKPIREQAENIIHLFTLTNLGAPAAFKYFDTTIDRKRYTSTKEVLDATLIHQSITGLYETRIDLSQLGGDGGGGGGSSGGIPWLMKKPLQLTTLVPLQEYEERLLKQTMLTGSYKEKLQSLFLKYDALWQHWENQVGHRRIKPHHIATGTVNPRPQKQYPINPKAKASIQTVINDLLKQGVLIQQNSIMNTPVYPVPKPDGKWRMVLDYREVNKTIPLIAAQNQHSAGILSSIFRGKYKTTLDLSNGFWAHSITPESYWLTAFTWLGQQYCWTRLPQGFLNSPALFNADVVDLLKEVPNVQVYVDDIYISHDDPREHLEQLEKVFSLLLNAGYVVSLKKSEIAQHEVEFLGFNITKEGRGLTETFKQKLLNITPPRDLKQLQSILGKLNFARNFIPNFSELVKPLYNIIATAPGKYITWTTDNSQQLQNIISMLNSAENLEERNPEVRLIMKVNTSPSAGYIRFYNEFAKRPIMYLNYVYTKAEVKFTNTEKLLTTIHKGLIKALDLGMGQEILVYSPIVSMTKIQKTPLPERKALPIRWITWMSYLEDPRIQFHYDKTLPELQQVPTVTDDIIAKIKHPSEFSMVFYTDGSAIKHPNVNKSHNAGMGIAQVQFKPEFTVINTWSIPLGDHTAQLAEVAAVEFACKKALKIDGPVLIVTDSFYVAESVNKELPYWQSNGFFNNKKKPLKHVSKWKSIADCIQLKPDIIIIHEKGHQPTASTFHTEGNNLADKLATQGSYVVNAGKRTADGSEFEKRTADGSEFESPKKKAKVE

SEQ ID NO: 565 - protein, 2085 aa, synthetic construct
MPAAKRVKLDGGDKKYSIGLDIGTNSVGWAVITDEYKVPSKKFKVLGNTDRHSIKKNLIGALLFDSGETAEATRLKRTARRRYTRRKNRICYLQEIFSNEMAKVDDSFFHRLEESFLVEEDKKHERHPIFGNIVDEVAYHEKYPTIYHLRKKLVDSTDKADLRLIYLALAHMIKFRGHFLIEGDLNPDNSDVDKLFIQLVQTYNQLFEENPINASGVDAKAILSARLSKSRRLENLIAQLPGEKKNGLFGNLIALSLGLTPNFKSNFDLAEDAKLQLSKDTYDDDLDNLLAQIGDQYADLFLAAKNLSDAILLSDILRVNTEITKAPLSASMIKRYDEHHQDLTLLKALVRQQLPEKYKEIFFDQSKNGYAGYIDGGASQEEFYKFIKPILEKMDGTEELLVKLNREDLLRKQRTFDNGSIPHQIHLGELHAILRRQEDFYPFLKDNREKIEKILTFRIPYYVGPLARGNSRFAWMTRKSEETITPWNFEEVVDKGASAQSFIERMTNFDKNLPNEKVLPKHSLLYEYFTVYNELTKVKYVTEGMRKPAFLSGEQKKAIVDLLFKTNRKVTVKQLKEDYFKKIECFDSVEISGVEDRFNASLGTYHDLLKIIKDKDFLDNEENEDILEDIVLTLTLFEDREMIEERLKTYAHLFDDKVMKQLKRRRYTGWGRLSRKLINGIRDKQSGKTILDFLKSDGFANRNFMQLIHDDSLTFKEDIQKAQVSGQGDSLHEHIANLAGSPAIKKGILQTVKVVDELVKVMGRHKPENIVIEMARENQTTQKGQKNSRERMKRIEEGIKELGSQILKEHPVENTQLQNEKLYLYYLQNGRDMYVDQELDINRLSDYDVDHIVPQSFLKDDSIDNKVLTRSDKARGKSDNVPSEEVVKKMKNYWRQLLNAKLITQRKFDNLTKAERGGLSELDKAGFIKRQLVETRQITKHVAQILDSRMNTKYDENDKLIREVKVITLKSKLVSDFRKDFQFYKVREINNYHHAHDAYLNAVVGTALIKKYPKLESEFVYGDYKVYDVRKMIAKSEQEIGKATAKYFFYSNIMNFFKTEITLANGEIRKRPLIETNGETGEIVWDKGRDFATVRKVLSMPQVNIVKKTEVQTGGFSKESILPKRNSDKLIARKKDWDPKKYGGFDSPTVAYSVLVVAKVEKGKSKKLKSVKELLGITIMERSSFEKNPIDFLEAKGYKEVKKDLIIKLPKYSLFELENGRKRMLASAGELQKGNELALPSKYVNFLYLASHYEKLKGSPEDNEQKQLFVEQHKHYLDEIIEQISEFSKRVILADANLDKVLSAYNKHRDKPIREQAENIIHLFTLTNLGAPAAFKYFDTTIDRKRYTSTKEVLDATLIHQSITGLYETRIDLSQLGGDGGGGSGSSGGGGGIPWLMKKPLQLTTLVPLQEYEERLLKQTMLTGSYKEKLQSLFLKYDALWQHWENQVGHRRIKPHHIATGTVNPRPQKQYPINPKAKASIQTVINDLLKQGVLIQQNSIMNTPVYPVPKPDGKWRMVLDYREVNKTIPLIAAQNQHSAGILSSIFRGKYKTTLDLSNGFWAHSITPESYWLTAFTWLGQQYCWTRLPQGFLNSPALFNADVVDLLKEVPNVQVYVDDIYISHDDPREHLEQLEKVFSLLLNAGYVVSLKKSEIAQHEVEFLGFNITKEGRGLTETFKQKLLNITPPRDLKQLQSILGKLNFARNFIPNFSELVKPLYNIIATAPGKYITWTTDNSQQLQNIISMLNSAENLEERNPEVRLIMKVNTSPSAGYIRFYNEFAKRPIMYLNYVYTKAEVKFTNTEKLLTTIHKGLIKALDLGMGQEILVYSPIVSMTKIQKTPLPERKALPIRWITWMSYLEDPRIQFHYDKTLPELQQVPTVTDDIIAKIKHPSEFSMVFYTDGSAIKHPNVNKSHNAGMGIAQVQFKPEFTVINTWSIPLGDHTAQLAEVAAVEFACKKALKIDGPVLIVTDSFYVAESVNKELPYWQSNGFFNNKKKPLKHVSKWKSIADCIQLKPDIIIIHEKGHQPTASTFHTEGNNLADKLATQGSYVVNAGKRTADGSEFEKRTADGSEFESPKKKAKVE

SEQ ID NO: 566 - protein, 2091 aa, synthetic construct
MPAAKRVKLDGGDKKYSIGLDIGTNSVGWAVITDEYKVPSKKFKVLGNTDRHSIKKNLIGALLFDSGETAEATRLKRTARRRYTRRKNRICYLQEIFSNEMAKVDDSFFHRLEESFLVEEDKKHERHPIFGNIVDEVAYHEKYPTIYHLRKKLVDSTDKADLRLIYLALAHMIKFRGHFLIEGDLNPDNSDVDKLFIQLVQTYNQLFEENPINASGVDAKAILSARLSKSRRLENLIAQLPGEKKNGLFGNLIALSLGLTPNFKSNFDLAEDAKLQLSKDTYDDDLDNLLAQIGDQYADLFLAAKNLSDAILLSDILRVNTEITKAPLSASMIKRYDEHHQDLTLLKALVRQQLPEKYKEIFFDQSKNGYAGYIDGGASQEEFYKFIKPILEKMDGTEELLVKLNREDLLRKQRTFDNGSIPHQIHLGELHAILRRQEDFYPFLKDNREKIEKILTFRIPYYVGPLARGNSRFAWMTRKSEETITPWNFEEVVDKGASAQSFIERMTNFDKNLPNEKVLPKHSLLYEYFTVYNELTKVKYVTEGMRKPAFLSGEQKKAIVDLLFKTNRKVTVKQLKEDYFKKIECFDSVEISGVEDRFNASLGTYHDLLKIIKDKDFLDNEENEDILEDIVLTLTLFEDREMIEERLKTYAHLFDDKVMKQLKRRRYTGWGRLSRKLINGIRDKQSGKTILDFLKSDGFANRNFMQLIHDDSLTFKEDIQKAQVSGQGDSLHEHIANLAGSPAIKKGILQTVKVVDELVKVMGRHKPENIVIEMARENQTTQKGQKNSRERMKRIEEGIKELGSQILKEHPVENTQLQNEKLYLYYLQNGRDMYVDQELDINRLSDYDVDHIVPQSFLKDDSIDNKVLTRSDKARGKSDNVPSEEVVKKMKNYWRQLLNAKLITQRKFDNLTKAERGGLSELDKAGFIKRQLVETRQITKHVAQILDSRMNTKYDENDKLIREVKVITLKSKLVSDFRKDFQFYKVREINNYHHAHDAYLNAVVGTALIKKYPKLESEFVYGDYKVYDVRKMIAKSEQEIGKATAKYFFYSNIMNFFKTEITLANGEIRKRPLIETNGETGEIVWDKGRDFATVRKVLSMPQVNIVKKTEVQTGGFSKESILPKRNSDKLIARKKDWDPKKYGGFDSPTVAYSVLVVAKVEKGKSKKLKSVKELLGITIMERSSFEKNPIDFLEAKGYKEVKKDLIIKLPKYSLFELENGRKRMLASAGELQKGNELALPSKYVNFLYLASHYEKLKGSPEDNEQKQLFVEQHKHYLDEIIEQISEFSKRVILADANLDKVLSAYNKHRDKPIREQAENIIHLFTLTNLGAPAAFKYFDTTIDRKRYTSTKEVLDATLIHQSITGLYETRIDLSQLGGDGGGGSGGSGGSGGSGGSGGIPWLMKKPLQLTTLVPLQEYEERLLKQTMLTGSYKEKLQSLFLKYDALWQHWENQVGHRRIKPHHIATGTVNPRPQKQYPINPKAKASIQTVINDLLKQGVLIQQNSIMNTPVYPVPKPDGKWRMVLDYREVNKTIPLIAAQNQHSAGILSSIFRGKYKTTLDLSNGFWAHSITPESYWLTAFTWLGQQYCWTRLPQGFLNSPALFNADVVDLLKEVPNVQVYVDDIYISHDDPREHLEQLEKVFSLLLNAGYVVSLKKSEIAQHEVEFLGFNITKEGRGLTETFKQKLLNITPPRDLKQLQSILGKLNFARNFIPNFSELVKPLYNIIATAPGKYITWTTDNSQQLQNIISMLNSAENLEERNPEVRLIMKVNTSPSAGYIRFYNEFAKRPIMYLNYVYTKAEVKFTNTEKLLTTIHKGLIKALDLGMGQEILVYSPIVSMTKIQKTPLPERKALPIRWITWMSYLEDPRIQFHYDKTLPELQQVPTVTDDIIAKIKHPSEFSMVFYTDGSAIKHPNVNKSHNAGMGIAQVQFKPEFTVINTWSIPLGDHTAQLAEVAAVEFACKKALKIDGPVLIVTDSFYVAESVNKELPYWQSNGFFNNKKKPLKHVSKWKSIADCIQLKPDIIIIHEKGHQPTASTFHTEGNNLADKLATQGSYVVNAGKRTADGSEFEKRTADGSEFESPKKKAKVE

SEQ ID NO: 567 - protein, 2087 aa, synthetic construct
MPAAKRVKLDGGDKKYSIGLDIGTNSVGWAVITDEYKVPSKKFKVLGNTDRHSIKKNLIGALLFDSGETAEATRLKRTARRRYTRRKNRICYLQEIFSNEMAKVDDSFFHRLEESFLVEEDKKHERHPIFGNIVDEVAYHEKYPTIYHLRKKLVDSTDKADLRLIYLALAHMIKFRGHFLIEGDLNPDNSDVDKLFIQLVQTYNQLFEENPINASGVDAKAILSARLSKSRRLENLIAQLPGEKKNGLFGNLIALSLGLTPNFKSNFDLAEDAKLQLSKDTYDDDLDNLLAQIGDQYADLFLAAKNLSDAILLSDILRVNTEITKAPLSASMIKRYDEHHQDLTLLKALVRQQLPEKYKEIFFDQSKNGYAGYIDGGASQEEFYKFIKPILEKMDGTEELLVKLNREDLLRKQRTFDNGSIPHQIHLGELHAILRRQEDFYPFLKDNREKIEKILTFRIPYYVGPLARGNSRFAWMTRKSEETITPWNFEEVVDKGASAQSFIERMTNFDKNLPNEKVLPKHSLLYEYFTVYNELTKVKYVTEGMRKPAFLSGEQKKAIVDLLFKTNRKVTVKQLKEDYFKKIECFDSVEISGVEDRFNASLGTYHDLLKIIKDKDFLDNEENEDILEDIVLTLTLFEDREMIEERLKTYAHLFDDKVMKQLKRRRYTGWGRLSRKLINGIRDKQSGKTILDFLKSDGFANRNFMQLIHDDSLTFKEDIQKAQVSGQGDSLHEHIANLAGSPAIKKGILQTVKVVDELVKVMGRHKPENIVIEMARENQTTQKGQKNSRERMKRIEEGIKELGSQILKEHPVENTQLQNEKLYLYYLQNGRDMYVDQELDINRLSDYDVDHIVPQSFLKDDSIDNKVLTRSDKARGKSDNVPSEEVVKKMKNYWRQLLNAKLITQRKFDNLTKAERGGLSELDKAGFIKRQLVETRQITKHVAQILDSRMNTKYDENDKLIREVKVITLKSKLVSDFRKDFQFYKVREINNYHHAHDAYLNAVVGTALIKKYPKLESEFVYGDYKVYDVRKMIAKSEQEIGKATAKYFFYSNIMNFFKTEITLANGEIRKRPLIETNGETGEIVWDKGRDFATVRKVLSMPQVNIVKKTEVQTGGFSKESILPKRNSDKLIARKKDWDPKKYGGFDSPTVAYSVLVVAKVEKGKSKKLKSVKELLGITIMERSSFEKNPIDFLEAKGYKEVKKDLIIKLPKYSLFELENGRKRMLASAGELQKGNELALPSKYVNFLYLASHYEKLKGSPEDNEQKQLFVEQHKHYLDEIIEQISEFSKRVILADANLDKVLSAYNKHRDKPIREQAENIIHLFTLTNLGAPAAFKYFDTTIDRKRYTSTKEVLDATLIHQSITGLYETRIDLSQLGGDGGGSSEAAAKGGGGGIPWLMKKPLQLTTLVPLQEYEERLLKQTMLTGSYKEKLQSLFLKYDALWQHWENQVGHRRIKPHHIATGTVNPRPQKQYPINPKAKASIQTVINDLLKQGVLIQQNSIMNTPVYPVPKPDGKWRMVLDYREVNKTIPLIAAQNQHSAGILSSIFRGKYKTTLDLSNGFWAHSITPESYWLTAFTWLGQQYCWTRLPQGFLNSPALFNADVVDLLKEVPNVQVYVDDIYISHDDPREHLEQLEKVFSLLLNAGYVVSLKKSEIAQHEVEFLGFNITKEGRGLTETFKQKLLNITPPRDLKQLQSILGKLNFARNFIPNFSELVKPLYNIIATAPGKYITWTTDNSQQLQNIISMLNSAENLEERNPEVRLIMKVNTSPSAGYIRFYNEFAKRPIMYLNYVYTKAEVKFTNTEKLLTTIHKGLIKALDLGMGQEILVYSPIVSMTKIQKTPLPERKALPIRWITWMSYLEDPRIQFHYDKTLPELQQVPTVTDDIIAKIKHPSEFSMVFYTDGSAIKHPNVNKSHNAGMGIAQVQFKPEFTVINTWSIPLGDHTAQLAEVAAVEFACKKALKIDGPVLIVTDSFYVAESVNKELPYWQSNGFFNNKKKPLKHVSKWKSIADCIQLKPDIIIIHEKGHQPTASTFHTEGNNLADKLATQGSYVVNAGKRTADGSEFEKRTADGSEFESPKKKAKVE

SEQ ID NO: 568 - protein, 2085 aa, synthetic construct
MPAAKRVKLDGGDKKYSIGLDIGTNSVGWAVITDEYKVPSKKFKVLGNTDRHSIKKNLIGALLFDSGETAEATRLKRTARRRYTRRKNRICYLQEIFSNEMAKVDDSFFHRLEESFLVEEDKKHERHPIFGNIVDEVAYHEKYPTIYHLRKKLVDSTDKADLRLIYLALAHMIKFRGHFLIEGDLNPDNSDVDKLFIQLVQTYNQLFEENPINASGVDAKAILSARLSKSRRLENLIAQLPGEKKNGLFGNLIALSLGLTPNFKSNFDLAEDAKLQLSKDTYDDDLDNLLAQIGDQYADLFLAAKNLSDAILLSDILRVNTEITKAPLSASMIKRYDEHHQDLTLLKALVRQQLPEKYKEIFFDQSKNGYAGYIDGGASQEEFYKFIKPILEKMDGTEELLVKLNREDLLRKQRTFDNGSIPHQIHLGELHAILRRQEDFYPFLKDNREKIEKILTFRIPYYVGPLARGNSRFAWMTRKSEETITPWNFEEVVDKGASAQSFIERMTNFDKNLPNEKVLPKHSLLYEYFTVYNELTKVKYVTEGMRKPAFLSGEQKKAIVDLLFKTNRKVTVKQLKEDYFKKIECFDSVEISGVEDRFNASLGTYHDLLKIIKDKDFLDNEENEDILEDIVLTLTLFEDREMIEERLKTYAHLFDDKVMKQLKRRRYTGWGRLSRKLINGIRDKQSGKTILDFLKSDGFANRNFMQLIHDDSLTFKEDIQKAQVSGQGDSLHEHIANLAGSPAIKKGILQTVKVVDELVKVMGRHKPENIVIEMARENQTTQKGQKNSRERMKRIEEGIKELGSQILKEHPVENTQLQNEKLYLYYLQNGRDMYVDQELDINRLSDYDVDHIVPQSFLKDDSIDNKVLTRSDKARGKSDNVPSEEVVKKMKNYWRQLLNAKLITQRKFDNLTKAERGGLSELDKAGFIKRQLVETRQITKHVAQILDSRMNTKYDENDKLIREVKVITLKSKLVSDFRKDFQFYKVREINNYHHAHDAYLNAVVGTALIKKYPKLESEFVYGDYKVYDVRKMIAKSEQEIGKATAKYFFYSNIMNFFKTEITLANGEIRKRPLIETNGETGEIVWDKGRDFATVRKVLSMPQVNIVKKTEVQTGGFSKESILPKRNSDKLIARKKDWDPKKYGGFDSPTVAYSVLVVAKVEKGKSKKLKSVKELLGITIMERSSFEKNPIDFLEAKGYKEVKKDLIIKLPKYSLFELENGRKRMLASAGELQKGNELALPSKYVNFLYLASHYEKLKGSPEDNEQKQLFVEQHKHYLDEIIEQISEFSKRVILADANLDKVLSAYNKHRDKPIREQAENIIHLFTLTNLGAPAAFKYFDTTIDRKRYTSTKEVLDATLIHQSITGLYETRIDLSQLGGDGGGGGPAPGSSGGIPWLMKKPLQLTTLVPLQEYEERLLKQTMLTGSYKEKLQSLFLKYDALWQHWENQVGHRRIKPHHIATGTVNPRPQKQYPINPKAKASIQTVINDLLKQGVLIQQNSIMNTPVYPVPKPDGKWRMVLDYREVNKTIPLIAAQNQHSAGILSSIFRGKYKTTLDLSNGFWAHSITPESYWLTAFTWLGQQYCWTRLPQGFLNSPALFNADVVDLLKEVPNVQVYVDDIYISHDDPREHLEQLEKVFSLLLNAGYVVSLKKSEIAQHEVEFLGFNITKEGRGLTETFKQKLLNITPPRDLKQLQSILGKLNFARNFIPNFSELVKPLYNIIATAPGKYITWTTDNSQQLQNIISMLNSAENLEERNPEVRLIMKVNTSPSAGYIRFYNEFAKRPIMYLNYVYTKAEVKFTNTEKLLTTIHKGLIKALDLGMGQEILVYSPIVSMTKIQKTPLPERKALPIRWITWMSYLEDPRIQFHYDKTLPELQQVPTVTDDIIAKIKHPSEFSMVFYTDGSAIKHPNVNKSHNAGMGIAQVQFKPEFTVINTWSIPLGDHTAQLAEVAAVEFACKKALKIDGPVLIVTDSFYVAESVNKELPYWQSNGFFNNKKKPLKHVSKWKSIADCIQLKPDIIIIHEKGHQPTASTFHTEGNNLADKLATQGSYVVNAGKRTADGSEFEKRTADGSEFESPKKKAKVE

SEQ ID NO: 569 - protein, 2087 aa, synthetic construct
MPAAKRVKLDGGDKKYSIGLDIGTNSVGWAVITDEYKVPSKKFKVLGNTDRHSIKKNLIGALLFDSGETAEATRLKRTARRRYTRRKNRICYLQEIFSNEMAKVDDSFFHRLEESFLVEEDKKHERHPIFGNIVDEVAYHEKYPTIYHLRKKLVDSTDKADLRLIYLALAHMIKFRGHFLIEGDLNPDNSDVDKLFIQLVQTYNQLFEENPINASGVDAKAILSARLSKSRRLENLIAQLPGEKKNGLFGNLIALSLGLTPNFKSNFDLAEDAKLQLSKDTYDDDLDNLLAQIGDQYADLFLAAKNLSDAILLSDILRVNTEITKAPLSASMIKRYDEHHQDLTLLKALVRQQLPEKYKEIFFDQSKNGYAGYIDGGASQEEFYKFIKPILEKMDGTEELLVKLNREDLLRKQRTFDNGSIPHQIHLGELHAILRRQEDFYPFLKDNREKIEKILTFRIPYYVGPLARGNSRFAWMTRKSEETITPWNFEEVVDKGASAQSFIERMTNFDKNLPNEKVLPKHSLLYEYFTVYNELTKVKYVTEGMRKPAFLSGEQKKAIVDLLFKTNRKVTVKQLKEDYFKKIECFDSVEISGVEDRFNASLGTYHDLLKIIKDKDFLDNEENEDILEDIVLTLTLFEDREMIEERLKTYAHLFDDKVMKQLKRRRYTGWGRLSRKLINGIRDKQSGKTILDFLKSDGFANRNFMQLIHDDSLTFKEDIQKAQVSGQGDSLHEHIANLAGSPAIKKGILQTVKVVDELVKVMGRHKPENIVIEMARENQTTQKGQKNSRERMKRIEEGIKELGSQILKEHPVENTQLQNEKLYLYYLQNGRDMYVDQELDINRLSDYDVDHIVPQSFLKDDSIDNKVLTRSDKARGKSDNVPSEEVVKKMKNYWRQLLNAKLITQRKFDNLTKAERGGLSELDKAGFIKRQLVETRQITKHVAQILDSRMNTKYDENDKLIREVKVITLKSKLVSDFRKDFQFYKVREINNYHHAHDAYLNAVVGTALIKKYPKLESEFVYGDYKVYDVRKMIAKSEQEIGKATAKYFFYSNIMNFFKTEITLANGEIRKRPLIETNGETGEIVWDKGRDFATVRKVLSMPQVNIVKKTEVQTGGFSKESILPKRNSDKLIARKKDWDPKKYGGFDSPTVAYSVLVVAKVEKGKSKKLKSVKELLGITIMERSSFEKNPIDFLEAKGYKEVKKDLIIKLPKYSLFELENGRKRMLASAGELQKGNELALPSKYVNFLYLASHYEKLKGSPEDNEQKQLFVEQHKHYLDEIIEQISEFSKRVILADANLDKVLSAYNKHRDKPIREQAENIIHLFTLTNLGAPAAFKYFDTTIDRKRYTSTKEVLDATLIHQSITGLYETRIDLSQLGGDGGPAPAPAPAPAPGGIPWLMKKPLQLTTLVPLQEYEERLLKQTMLTGSYKEKLQSLFLKYDALWQHWENQVGHRRIKPHHIATGTVNPRPQKQYPINPKAKASIQTVINDLLKQGVLIQQNSIMNTPVYPVPKPDGKWRMVLDYREVNKTIPLIAAQNQHSAGILSSIFRGKYKTTLDLSNGFWAHSITPESYWLTAFTWLGQQYCWTRLPQGFLNSPALFNADVVDLLKEVPNVQVYVDDIYISHDDPREHLEQLEKVFSLLLNAGYVVSLKKSEIAQHEVEFLGFNITKEGRGLTETFKQKLLNITPPRDLKQLQSILGKLNFARNFIPNFSELVKPLYNIIATAPGKYITWTTDNSQQLQNIISMLNSAENLEERNPEVRLIMKVNTSPSAGYIRFYNEFAKRPIMYLNYVYTKAEVKFTNTEKLLTTIHKGLIKALDLGMGQEILVYSPIVSMTKIQKTPLPERKALPIRWITWMSYLEDPRIQFHYDKTLPELQQVPTVTDDIIAKIKHPSEFSMVFYTDGSAIKHPNVNKSHNAGMGIAQVQFKPEFTVINTWSIPLGDHTAQLAEVAAVEFACKKALKIDGPVLIVTDSFYVAESVNKELPYWQSNGFFNNKKKPLKHVSKWKSIADCIQLKPDIIIIHEKGHQPTASTFHTEGNNLADKLATQGSYVVNAGKRTADGSEFEKRTADGSEFESPKKKAKVE

SEQ ID NO: 570 - protein, 2101 aa, synthetic construct
MPAAKRVKLDGGDKKYSIGLDIGTNSVGWAVITDEYKVPSKKFKVLGNTDRHSIKKNLIGALLFDSGETAEATRLKRTARRRYTRRKNRICYLQEIFSNEMAKVDDSFFHRLEESFLVEEDKKHERHPIFGNIVDEVAYHEKYPTIYHLRKKLVDSTDKADLRLIYLALAHMIKFRGHFLIEGDLNPDNSDVDKLFIQLVQTYNQLFEENPINASGVDAKAILSARLSKSRRLENLIAQLPGEKKNGLFGNLIALSLGLTPNFKSNFDLAEDAKLQLSKDTYDDDLDNLLAQIGDQYADLFLAAKNLSDAILLSDILRVNTEITKAPLSASMIKRYDEHHQDLTLLKALVRQQLPEKYKEIFFDQSKNGYAGYIDGGASQEEFYKFIKPILEKMDGTEELLVKLNREDLLRKQRTFDNGSIPHQIHLGELHAILRRQEDFYPFLKDNREKIEKILTFRIPYYVGPLARGNSRFAWMTRKSEETITPWNFEEVVDKGASAQSFIERMTNFDKNLPNEKVLPKHSLLYEYFTVYNELTKVKYVTEGMRKPAFLSGEQKKAIVDLLFKTNRKVTVKQLKEDYFKKIECFDSVEISGVEDRFNASLGTYHDLLKIIKDKDFLDNEENEDILEDIVLTLTLFEDREMIEERLKTYAHLFDDKVMKQLKRRRYTGWGRLSRKLINGIRDKQSGKTILDFLKSDGFANRNFMQLIHDDSLTFKEDIQKAQVSGQGDSLHEHIANLAGSPAIKKGILQTVKVVDELVKVMGRHKPENIVIEMARENQTTQKGQKNSRERMKRIEEGIKELGSQILKEHPVENTQLQNEKLYLYYLQNGRDMYVDQELDINRLSDYDVDHIVPQSFLKDDSIDNKVLTRSDKARGKSDNVPSEEVVKKMKNYWRQLLNAKLITQRKFDNLTKAERGGLSELDKAGFIKRQLVETRQITKHVAQILDSRMNTKYDENDKLIREVKVITLKSKLVSDFRKDFQFYKVREINNYHHAHDAYLNAVVGTALIKKYPKLESEFVYGDYKVYDVRKMIAKSEQEIGKATAKYFFYSNIMNFFKTEITLANGEIRKRPLIETNGETGEIVWDKGRDFATVRKVLSMPQVNIVKKTEVQTGGFSKESILPKRNSDKLIARKKDWDPKKYGGFDSPTVAYSVLVVAKVEKGKSKKLKSVKELLGITIMERSSFEKNPIDFLEAKGYKEVKKDLIIKLPKYSLFELENGRKRMLASAGELQKGNELALPSKYVNFLYLASHYEKLKGSPEDNEQKQLFVEQHKHYLDEIIEQISEFSKRVILADANLDKVLSAYNKHRDKPIREQAENIIHLFTLTNLGAPAAFKYFDTTIDRKRYTSTKEVLDATLIHQSITGLYETRIDLSQLGGDGGEAAAKEAAAKEAAAKEAAAKEAAAKGGIPWLMKKPLQLTTLVPLQEYEERLLKQTMLTGSYKEKLQSLFLKYDALWQHWENQVGHRRIKPHHIATGTVNPRPQKQYPINPKAKASIQTVINDLLKQGVLIQQNSIMNTPVYPVPKPDGKWRMVLDYREVNKTIPLIAAQNQHSAGILSSIFRGKYKTTLDLSNGFWAHSITPESYWLTAFTWLGQQYCWTRLPQGFLNSPALFNADVVDLLKEVPNVQVYVDDIYISHDDPREHLEQLEKVFSLLLNAGYVVSLKKSEIAQHEVEFLGFNITKEGRGLTETFKQKLLNITPPRDLKQLQSILGKLNFARNFIPNFSELVKPLYNIIATAPGKYITWTTDNSQQLQNIISMLNSAENLEERNPEVRLIMKVNTSPSAGYIRFYNEFAKRPIMYLNYVYTKAEVKFTNTEKLLTTIHKGLIKALDLGMGQEILVYSPIVSMTKIQKTPLPERKALPIRWITWMSYLEDPRIQFHYDKTLPELQQVPTVTDDIIAKIKHPSEFSMVFYTDGSAIKHPNVNKSHNAGMGIAQVQFKPEFTVINTWSIPLGDHTAQLAEVAAVEFACKKALKIDGPVLIVTDSFYVAESVNKELPYWQSNGFFNNKKKPLKHVSKWKSIADCIQLKPDIIIIHEKGHQPTASTFHTEGNNLADKLATQGSYVVNAGKRTADGSEFEKRTADGSEFESPKKKAKVE

SEQ ID NO: 571 - protein, 2087 aa, synthetic construct
MPAAKRVKLDGGDKKYSIGLDIGTNSVGWAVITDEYKVPSKKFKVLGNTDRHSIKKNLIGALLFDSGETAEATRLKRTARRRYTRRKNRICYLQEIFSNEMAKVDDSFFHRLEESFLVEEDKKHERHPIFGNIVDEVAYHEKYPTIYHLRKKLVDSTDKADLRLIYLALAHMIKFRGHFLIEGDLNPDNSDVDKLFIQLVQTYNQLFEENPINASGVDAKAILSARLSKSRRLENLIAQLPGEKKNGLFGNLIALSLGLTPNFKSNFDLAEDAKLQLSKDTYDDDLDNLLAQIGDQYADLFLAAKNLSDAILLSDILRVNTEITKAPLSASMIKRYDEHHQDLTLLKALVRQQLPEKYKEIFFDQSKNGYAGYIDGGASQEEFYKFIKPILEKMDGTEELLVKLNREDLLRKQRTFDNGSIPHQIHLGELHAILRRQEDFYPFLKDNREKIEKILTFRIPYYVGPLARGNSRFAWMTRKSEETITPWNFEEVVDKGASAQSFIERMTNFDKNLPNEKVLPKHSLLYEYFTVYNELTKVKYVTEGMRKPAFLSGEQKKAIVDLLFKTNRKVTVKQLKEDYFKKIECFDSVEISGVEDRFNASLGTYHDLLKIIKDKDFLDNEENEDILEDIVLTLTLFEDREMIEERLKTYAHLFDDKVMKQLKRRRYTGWGRLSRKLINGIRDKQSGKTILDFLKSDGFANRNFMQLIHDDSLTFKEDIQKAQVSGQGDSLHEHIANLAGSPAIKKGILQTVKVVDELVKVMGRHKPENIVIEMARENQTTQKGQKNSRERMKRIEEGIKELGSQILKEHPVENTQLQNEKLYLYYLQNGRDMYVDQELDINRLSDYDVDHIVPQSFLKDDSIDNKVLTRSDKARGKSDNVPSEEVVKKMKNYWRQLLNAKLITQRKFDNLTKAERGGLSELDKAGFIKRQLVETRQITKHVAQILDSRMNTKYDENDKLIREVKVITLKSKLVSDFRKDFQFYKVREINNYHHAHDAYLNAVVGTALIKKYPKLESEFVYGDYKVYDVRKMIAKSEQEIGKATAKYFFYSNIMNFFKTEITLANGEIRKRPLIETNGETGEIVWDKGRDFATVRKVLSMPQVNIVKKTEVQTGGFSKESILPKRNSDKLIARKKDWDPKKYGGFDSPTVAYSVLVVAKVEKGKSKKLKSVKELLGITIMERSSFEKNPIDFLEAKGYKEVKKDLIIKLPKYSLFELENGRKRMLASAGELQKGNELALPSKYVNFLYLASHYEKLKGSPEDNEQKQLFVEQHKHYLDEIIEQISEFSKRVILADANLDKVLSAYNKHRDKPIREQAENIIHLFTLTNLGAPAAFKYFDTTIDRKRYTSTKEVLDATLIHQSITGLYETRIDLSQLGGDGGGGSGSSEAAAKGGIPWLMKKPLQLTTLVPLQEYEERLLKQTMLTGSYKEKLQSLFLKYDALWQHWENQVGHRRIKPHHIATGTVNPRPQKQYPINPKAKASIQTVINDLLKQGVLIQQNSIMNTPVYPVPKPDGKWRMVLDYREVNKTIPLIAAQNQHSAGILSSIFRGKYKTTLDLSNGFWAHSITPESYWLTAFTWLGQQYCWTRLPQGFLNSPALFNADVVDLLKEVPNVQVYVDDIYISHDDPREHLEQLEKVFSLLLNAGYVVSLKKSEIAQHEVEFLGFNITKEGRGLTETFKQKLLNITPPRDLKQLQSILGKLNFARNFIPNFSELVKPLYNIIATAPGKYITWTTDNSQQLQNIISMLNSAENLEERNPEVRLIMKVNTSPSAGYIRFYNEFAKRPIMYLNYVYTKAEVKFTNTEKLLTTIHKGLIKALDLGMGQEILVYSPIVSMTKIQKTPLPERKALPIRWITWMSYLEDPRIQFHYDKTLPELQQVPTVTDDIIAKIKHPSEFSMVFYTDGSAIKHPNVNKSHNAGMGIAQVQFKPEFTVINTWSIPLGDHTAQLAEVAAVEFACKKALKIDGPVLIVTDSFYVAESVNKELPYWQSNGFFNNKKKPLKHVSKWKSIADCIQLKPDIIIIHEKGHQPTASTFHTEGNNLADKLATQGSYVVNAGKRTADGSEFEKRTADGSEFESPKKKAKVE

SEQ ID NO: 572 - protein, 2087 aa, synthetic construct
MPAAKRVKLDGGDKKYSIGLDIGTNSVGWAVITDEYKVPSKKFKVLGNTDRHSIKKNLIGALLFDSGETAEATRLKRTARRRYTRRKNRICYLQEIFSNEMAKVDDSFFHRLEESFLVEEDKKHERHPIFGNIVDEVAYHEKYPTIYHLRKKLVDSTDKADLRLIYLALAHMIKFRGHFLIEGDLNPDNSDVDKLFIQLVQTYNQLFEENPINASGVDAKAILSARLSKSRRLENLIAQLPGEKKNGLFGNLIALSLGLTPNFKSNFDLAEDAKLQLSKDTYDDDLDNLLAQIGDQYADLFLAAKNLSDAILLSDILRVNTEITKAPLSASMIKRYDEHHQDLTLLKALVRQQLPEKYKEIFFDQSKNGYAGYIDGGASQEEFYKFIKPILEKMDGTEELLVKLNREDLLRKQRTFDNGSIPHQIHLGELHAILRRQEDFYPFLKDNREKIEKILTFRIPYYVGPLARGNSRFAWMTRKSEETITPWNFEEVVDKGASAQSFIERMTNFDKNLPNEKVLPKHSLLYEYFTVYNELTKVKYVTEGMRKPAFLSGEQKKAIVDLLFKTNRKVTVKQLKEDYFKKIECFDSVEISGVEDRFNASLGTYHDLLKIIKDKDFLDNEENEDILEDIVLTLTLFEDREMIEERLKTYAHLFDDKVMKQLKRRRYTGWGRLSRKLINGIRDKQSGKTILDFLKSDGFANRNFMQLIHDDSLTFKEDIQKAQVSGQGDSLHEHIANLAGSPAIKKGILQTVKVVDELVKVMGRHKPENIVIEMARENQTTQKGQKNSRERMKRIEEGIKELGSQILKEHPVENTQLQNEKLYLYYLQNGRDMYVDQELDINRLSDYDVDHIVPQSFLKDDSIDNKVLTRSDKARGKSDNVPSEEVVKKMKNYWRQLLNAKLITQRKFDNLTKAERGGLSELDKAGFIKRQLVETRQITKHVAQILDSRMNTKYDENDKLIREVKVITLKSKLVSDFRKDFQFYKVREINNYHHAHDAYLNAVVGTALIKKYPKLESEFVYGDYKVYDVRKMIAKSEQEIGKATAKYFFYSNIMNFFKTEITLANGEIRKRPLIETNGETGEIVWDKGRDFATVRKVLSMPQVNIVKKTEVQTGGFSKESILPKRNSDKLIARKKDWDPKKYGGFDSPTVAYSVLVVAKVEKGKSKKLKSVKELLGITIMERSSFEKNPIDFLEAKGYKEVKKDLIIKLPKYSLFELENGRKRMLASAGELQKGNELALPSKYVNFLYLASHYEKLKGSPEDNEQKQLFVEQHKHYLDEIIEQISEFSKRVILADANLDKVLSAYNKHRDKPIREQAENIIHLFTLTNLGAPAAFKYFDTTIDRKRYTSTKEVLDATLIHQSITGLYETRIDLSQLGGDGGEAAAKGGSPAPGGIPWLMKKPLQLTTLVPLQEYEERLLKQTMLTGSYKEKLQSLFLKYDALWQHWENQVGHRRIKPHHIATGTVNPRPQKQYPINPKAKASIQTVINDLLKQGVLIQQNSIMNTPVYPVPKPDGKWRMVLDYREVNKTIPLIAAQNQHSAGILSSIFRGKYKTTLDLSNGFWAHSITPESYWLTAFTWLGQQYCWTRLPQGFLNSPALFNADVVDLLKEVPNVQVYVDDIYISHDDPREHLEQLEKVFSLLLNAGYVVSLKKSEIAQHEVEFLGFNITKEGRGLTETFKQKLLNITPPRDLKQLQSILGKLNFARNFIPNFSELVKPLYNIIATAPGKYITWTTDNSQQLQNIISMLNSAENLEERNPEVRLIMKVNTSPSAGYIRFYNEFAKRPIMYLNYVYTKAEVKFTNTEKLLTTIHKGLIKALDLGMGQEILVYSPIVSMTKIQKTPLPERKALPIRWITWMSYLEDPRIQFHYDKTLPELQQVPTVTDDIIAKIKHPSEFSMVFYTDGSAIKHPNVNKSHNAGMGIAQVQFKPEFTVINTWSIPLGDHTAQLAEVAAVEFACKKALKIDGPVLIVTDSFYVAESVNKELPYWQSNGFFNNKKKPLKHVSKWKSIADCIQLKPDIIIIHEKGHQPTASTFHTEGNNLADKLATQGSYVVNAGKRTADGSEFEKRTADGSEFESPKKKAKVE

SEQ ID NO: 573 - protein, 2085 aa, synthetic construct
MPAAKRVKLDGGDKKYSIGLDIGTNSVGWAVITDEYKVPSKKFKVLGNTDRHSIKKNLIGALLFDSGETAEATRLKRTARRRYTRRKNRICYLQEIFSNEMAKVDDSFFHRLEESFLVEEDKKHERHPIFGNIVDEVAYHEKYPTIYHLRKKLVDSTDKADLRLIYLALAHMIKFRGHFLIEGDLNPDNSDVDKLFIQLVQTYNQLFEENPINASGVDAKAILSARLSKSRRLENLIAQLPGEKKNGLFGNLIALSLGLTPNFKSNFDLAEDAKLQLSKDTYDDDLDNLLAQIGDQYADLFLAAKNLSDAILLSDILRVNTEITKAPLSASMIKRYDEHHQDLTLLKALVRQQLPEKYKEIFFDQSKNGYAGYIDGGASQEEFYKFIKPILEKMDGTEELLVKLNREDLLRKQRTFDNGSIPHQIHLGELHAILRRQEDFYPFLKDNREKIEKILTFRIPYYVGPLARGNSRFAWMTRKSEETITPWNFEEVVDKGASAQSFIERMTNFDKNLPNEKVLPKHSLLYEYFTVYNELTKVKYVTEGMRKPAFLSGEQKKAIVDLLFKTNRKVTVKQLKEDYFKKIECFDSVEISGVEDRFNASLGTYHDLLKIIKDKDFLDNEENEDILEDIVLTLTLFEDREMIEERLKTYAHLFDDKVMKQLKRRRYTGWGRLSRKLINGIRDKQSGKTILDFLKSDGFANRNFMQLIHDDSLTFKEDIQKAQVSGQGDSLHEHIANLAGSPAIKKGILQTVKVVDELVKVMGRHKPENIVIEMARENQTTQKGQKNSRERMKRIEEGIKELGSQILKEHPVENTQLQNEKLYLYYLQNGRDMYVDQELDINRLSDYDVDHIVPQSFLKDDSIDNKVLTRSDKARGKSDNVPSEEVVKKMKNYWRQLLNAKLITQRKFDNLTKAERGGLSELDKAGFIKRQLVETRQITKHVAQILDSRMNTKYDENDKLIREVKVITLKSKLVSDFRKDFQFYKVREINNYHHAHDAYLNAVVGTALIKKYPKLESEFVYGDYKVYDVRKMIAKSEQEIGKATAKYFFYSNIMNFFKTEITLANGEIRKRPLIETNGETGEIVWDKGRDFATVRKVLSMPQVNIVKKTEVQTGGFSKESILPKRNSDKLIARKKDWDPKKYGGFDSPTVAYSVLVVAKVEKGKSKKLKSVKELLGITIMERSSFEKNPIDFLEAKGYKEVKKDLIIKLPKYSLFELENGRKRMLASAGELQKGNELALPSKYVNFLYLASHYEKLKGSPEDNEQKQLFVEQHKHYLDEIIEQISEFSKRVILADANLDKVLSAYNKHRDKPIREQAENIIHLFTLTNLGAPAAFKYFDTTIDRKRYTSTKEVLDATLIHQSITGLYETRIDLSQLGGDGGGGSPAPGGGGGIPWLMKKPLQLTTLVPLQEYEERLLKQTMLTGSYKEKLQSLFLKYDALWQHWENQVGHRRIKPHHIATGTVNPRPQKQYPINPKAKASIQTVINDLLKQGVLIQQNSIMNTPVYPVPKPDGKWRMVLDYREVNKTIPLIAAQNQHSAGILSSIFRGKYKTTLDLSNGFWAHSITPESYWLTAFTWLGQQYCWTRLPQGFLNSPALFNADVVDLLKEVPNVQVYVDDIYISHDDPREHLEQLEKVFSLLLNAGYVVSLKKSEIAQHEVEFLGFNITKEGRGLTETFKQKLLNITPPRDLKQLQSILGKLNFARNFIPNFSELVKPLYNIIATAPGKYITWTTDNSQQLQNIISMLNSAENLEERNPEVRLIMKVNTSPSAGYIRFYNEFAKRPIMYLNYVYTKAEVKFTNTEKLLTTIHKGLIKALDLGMGQEILVYSPIVSMTKIQKTPLPERKALPIRWITWMSYLEDPRIQFHYDKTLPELQQVPTVTDDIIAKIKHPSEFSMVFYTDGSAIKHPNVNKSHNAGMGIAQVQFKPEFTVINTWSIPLGDHTAQLAEVAAVEFACKKALKIDGPVLIVTDSFYVAESVNKELPYWQSNGFFNNKKKPLKHVSKWKSIADCIQLKPDIIIIHEKGHQPTASTFHTEGNNLADKLATQGSYVVNAGKRTADGSEFEKRTADGSEFESPKKKAKVE

SEQ ID NO: 574 - protein, 2091 aa, synthetic construct
MPAAKRVKLDGGDKKYSIGLDIGTNSVGWAVITDEYKVPSKKFKVLGNTDRHSIKKNLIGALLFDSGETAEATRLKRTARRRYTRRKNRICYLQEIFSNEMAKVDDSFFHRLEESFLVEEDKKHERHPIFGNIVDEVAYHEKYPTIYHLRKKLVDSTDKADLRLIYLALAHMIKFRGHFLIEGDLNPDNSDVDKLFIQLVQTYNQLFEENPINASGVDAKAILSARLSKSRRLENLIAQLPGEKKNGLFGNLIALSLGLTPNFKSNFDLAEDAKLQLSKDTYDDDLDNLLAQIGDQYADLFLAAKNLSDAILLSDILRVNTEITKAPLSASMIKRYDEHHQDLTLLKALVRQQLPEKYKEIFFDQSKNGYAGYIDGGASQEEFYKFIKPILEKMDGTEELLVKLNREDLLRKQRTFDNGSIPHQIHLGELHAILRRQEDFYPFLKDNREKIEKILTFRIPYYVGPLARGNSRFAWMTRKSEETITPWNFEEVVDKGASAQSFIERMTNFDKNLPNEKVLPKHSLLYEYFTVYNELTKVKYVTEGMRKPAFLSGEQKKAIVDLLFKTNRKVTVKQLKEDYFKKIECFDSVEISGVEDRFNASLGTYHDLLKIIKDKDFLDNEENEDILEDIVLTLTLFEDREMIEERLKTYAHLFDDKVMKQLKRRRYTGWGRLSRKLINGIRDKQSGKTILDFLKSDGFANRNFMQLIHDDSLTFKEDIQKAQVSGQGDSLHEHIANLAGSPAIKKGILQTVKVVDELVKVMGRHKPENIVIEMARENQTTQKGQKNSRERMKRIEEGIKELGSQILKEHPVENTQLQNEKLYLYYLQNGRDMYVDQELDINRLSDYDVDHIVPQSFLKDDSIDNKVLTRSDKARGKSDNVPSEEVVKKMKNYWRQLLNAKLITQRKFDNLTKAERGGLSELDKAGFIKRQLVETRQITKHVAQILDSRMNTKYDENDKLIREVKVITLKSKLVSDFRKDFQFYKVREINNYHHAHDAYLNAVVGTALIKKYPKLESEFVYGDYKVYDVRKMIAKSEQEIGKATAKYFFYSNIMNFFKTEITLANGEIRKRPLIETNGETGEIVWDKGRDFATVRKVLSMPQVNIVKKTEVQTGGFSKESILPKRNSDKLIARKKDWDPKKYGGFDSPTVAYSVLVVAKVEKGKSKKLKSVKELLGITIMERSSFEKNPIDFLEAKGYKEVKKDLIIKLPKYSLFELENGRKRMLASAGELQKGNELALPSKYVNFLYLASHYEKLKGSPEDNEQKQLFVEQHKHYLDEIIEQISEFSKRVILADANLDKVLSAYNKHRDKPIREQAENIIHLFTLTNLGAPAAFKYFDTTIDRKRYTSTKEVLDATLIHQSITGLYETRIDLSQLGGDGGEAAAKGGGGSEAAAKGGIPWLMKKPLQLTTLVPLQEYEERLLKQTMLTGSYKEKLQSLFLKYDALWQHWENQVGHRRIKPHHIATGTVNPRPQKQYPINPKAKASIQTVINDLLKQGVLIQQNSIMNTPVYPVPKPDGKWRMVLDYREVNKTIPLIAAQNQHSAGILSSIFRGKYKTTLDLSNGFWAHSITPESYWLTAFTWLGQQYCWTRLPQGFLNSPALFNADVVDLLKEVPNVQVYVDDIYISHDDPREHLEQLEKVFSLLLNAGYVVSLKKSEIAQHEVEFLGFNITKEGRGLTETFKQKLLNITPPRDLKQLQSILGKLNFARNFIPNFSELVKPLYNIIATAPGKYITWTTDNSQQLQNIISMLNSAENLEERNPEVRLIMKVNTSPSAGYIRFYNEFAKRPIMYLNYVYTKAEVKFTNTEKLLTTIHKGLIKALDLGMGQEILVYSPIVSMTKIQKTPLPERKALPIRWITWMSYLEDPRIQFHYDKTLPELQQVPTVTDDIIAKIKHPSEFSMVFYTDGSAIKHPNVNKSHNAGMGIAQVQFKPEFTVINTWSIPLGDHTAQLAEVAAVEFACKKALKIDGPVLIVTDSFYVAESVNKELPYWQSNGFFNNKKKPLKHVSKWKSIADCIQLKPDIIIIHEKGHQPTASTFHTEGNNLADKLATQGSYVVNAGKRTADGSEFEKRTADGSEFESPKKKAKVE

SEQ ID NO: 575 - protein, 2082 aa, synthetic construct
MPAAKRVKLDGGDKKYSIGLDIGTNSVGWAVITDEYKVPSKKFKVLGNTDRHSIKKNLIGALLFDSGETAEATRLKRTARRRYTRRKNRICYLQEIFSNEMAKVDDSFFHRLEESFLVEEDKKHERHPIFGNIVDEVAYHEKYPTIYHLRKKLVDSTDKADLRLIYLALAHMIKFRGHFLIEGDLNPDNSDVDKLFIQLVQTYNQLFEENPINASGVDAKAILSARLSKSRRLENLIAQLPGEKKNGLFGNLIALSLGLTPNFKSNFDLAEDAKLQLSKDTYDDDLDNLLAQIGDQYADLFLAAKNLSDAILLSDILRVNTEITKAPLSASMIKRYDEHHQDLTLLKALVRQQLPEKYKEIFFDQSKNGYAGYIDGGASQEEFYKFIKPILEKMDGTEELLVKLNREDLLRKQRTFDNGSIPHQIHLGELHAILRRQEDFYPFLKDNREKIEKILTFRIPYYVGPLARGNSRFAWMTRKSEETITPWNFEEVVDKGASAQSFIERMTNFDKNLPNEKVLPKHSLLYEYFTVYNELTKVKYVTEGMRKPAFLSGEQKKAIVDLLFKTNRKVTVKQLKEDYFKKIECFDSVEISGVEDRFNASLGTYHDLLKIIKDKDFLDNEENEDILEDIVLTLTLFEDREMIEERLKTYAHLFDDKVMKQLKRRRYTGWGRLSRKLINGIRDKQSGKTILDFLKSDGFANRNFMQLIHDDSLTFKEDIQKAQVSGQGDSLHEHIANLAGSPAIKKGILQTVKVVDELVKVMGRHKPENIVIEMARENQTTQKGQKNSRERMKRIEEGIKELGSQILKEHPVENTQLQNEKLYLYYLQNGRDMYVDQELDINRLSDYDVDHIVPQSFLKDDSIDNKVLTRSDKARGKSDNVPSEEVVKKMKNYWRQLLNAKLITQRKFDNLTKAERGGLSELDKAGFIKRQLVETRQITKHVAQILDSRMNTKYDENDKLIREVKVITLKSKLVSDFRKDFQFYKVREINNYHHAHDAYLNAVVGTALIKKYPKLESEFVYGDYKVYDVRKMIAKSEQEIGKATAKYFFYSNIMNFFKTEITLANGEIRKRPLIETNGETGEIVWDKGRDFATVRKVLSMPQVNIVKKTEVQTGGFSKESILPKRNSDKLIARKKDWDPKKYGGFDSPTVAYSVLVVAKVEKGKSKKLKSVKELLGITIMERSSFEKNPIDFLEAKGYKEVKKDLIIKLPKYSLFELENGRKRMLASAGELQKGNELALPSKYVNFLYLASHYEKLKGSPEDNEQKQLFVEQHKHYLDEIIEQISEFSKRVILADANLDKVLSAYNKHRDKPIREQAENIIHLFTLTNLGAPAAFKYFDTTIDRKRYTSTKEVLDATLIHQSITGLYETRIDLSQLGGDGGGSSPAPGGIPWLMKKPLQLTTLVPLQEYEERLLKQTMLTGSYKEKLQSLFLKYDALWQHWENQVGHRRIKPHHIATGTVNPRPQKQYPINPKAKASIQTVINDLLKQGVLIQQNSIMNTPVYPVPKPDGKWRMVLDYREVNKTIPLIAAQNQHSAGILSSIFRGKYKTTLDLSNGFWAHSITPESYWLTAFTWLGQQYCWTRLPQGFLNSPALFNADVVDLLKEVPNVQVYVDDIYISHDDPREHLEQLEKVFSLLLNAGYVVSLKKSEIAQHEVEFLGFNITKEGRGLTETFKQKLLNITPPRDLKQLQSILGKLNFARNFIPNFSELVKPLYNIIATAPGKYITWTTDNSQQLQNIISMLNSAENLEERNPEVRLIMKVNTSPSAGYIRFYNEFAKRPIMYLNYVYTKAEVKFTNTEKLLTTIHKGLIKALDLGMGQEILVYSPIVSMTKIQKTPLPERKALPIRWITWMSYLEDPRIQFHYDKTLPELQQVPTVTDDIIAKIKHPSEFSMVFYTDGSAIKHPNVNKSHNAGMGIAQVQFKPEFTVINTWSIPLGDHTAQLAEVAAVEFACKKALKIDGPVLIVTDSFYVAESVNKELPYWQSNGFFNNKKKPLKHVSKWKSIADCIQLKPDIIIIHEKGHQPTASTFHTEGNNLADKLATQGSYVVNAGKRTADGSEFEKRTADGSEFESPKKKAKVE

SEQ ID NO: 576 - protein, 2087 aa, synthetic construct
MPAAKRVKLDGGDKKYSIGLDIGTNSVGWAVITDEYKVPSKKFKVLGNTDRHSIKKNLIGALLFDSGETAEATRLKRTARRRYTRRKNRICYLQEIFSNEMAKVDDSFFHRLEESFLVEEDKKHERHPIFGNIVDEVAYHEKYPTIYHLRKKLVDSTDKADLRLIYLALAHMIKFRGHFLIEGDLNPDNSDVDKLFIQLVQTYNQLFEENPINASGVDAKAILSARLSKSRRLENLIAQLPGEKKNGLFGNLIALSLGLTPNFKSNFDLAEDAKLQLSKDTYDDDLDNLLAQIGDQYADLFLAAKNLSDAILLSDILRVNTEITKAPLSASMIKRYDEHHQDLTLLKALVRQQLPEKYKEIFFDQSKNGYAGYIDGGASQEEFYKFIKPILEKMDGTEELLVKLNREDLLRKQRTFDNGSIPHQIHLGELHAILRRQEDFYPFLKDNREKIEKILTFRIPYYVGPLARGNSRFAWMTRKSEETITPWNFEEVVDKGASAQSFIERMTNFDKNLPNEKVLPKHSLLYEYFTVYNELTKVKYVTEGMRKPAFLSGEQKKAIVDLLFKTNRKVTVKQLKEDYFKKIECFDSVEISGVEDRFNASLGTYHDLLKIIKDKDFLDNEENEDILEDIVLTLTLFEDREMIEERLKTYAHLFDDKVMKQLKRRRYTGWGRLSRKLINGIRDKQSGKTILDFLKSDGFANRNFMQLIHDDSLTFKEDIQKAQVSGQGDSLHEHIANLAGSPAIKKGILQTVKVVDELVKVMGRHKPENIVIEMARENQTTQKGQKNSRERMKRIEEGIKELGSQILKEHPVENTQLQNEKLYLYYLQNGRDMYVDQELDINRLSDYDVDHIVPQSFLKDDSIDNKVLTRSDKARGKSDNVPSEEVVKKMKNYWRQLLNAKLITQRKFDNLTKAERGGLSELDKAGFIKRQLVETRQITKHVAQILDSRMNTKYDENDKLIREVKVITLKSKLVSDFRKDFQFYKVREINNYHHAHDAYLNAVVGTALIKKYPKLESEFVYGDYKVYDVRKMIAKSEQEIGKATAKYFFYSNIMNFFKTEITLANGEIRKRPLIETNGETGEIVWDKGRDFATVRKVLSMPQVNIVKKTEVQTGGFSKESILPKRNSDKLIARKKDWDPKKYGGFDSPTVAYSVLVVAKVEKGKSKKLKSVKELLGITIMERSSFEKNPIDFLEAKGYKEVKKDLIIKLPKYSLFELENGRKRMLASAGELQKGNELALPSKYVNFLYLASHYEKLKGSPEDNEQKQLFVEQHKHYLDEIIEQISEFSKRVILADANLDKVLSAYNKHRDKPIREQAENIIHLFTLTNLGAPAAFKYFDTTIDRKRYTSTKEVLDATLIHQSITGLYETRIDLSQLGGDGGPAPGGSEAAAKGGIPWLMKKPLQLTTLVPLQEYEERLLKQTMLTGSYKEKLQSLFLKYDALWQHWENQVGHRRIKPHHIATGTVNPRPQKQYPINPKAKASIQTVINDLLKQGVLIQQNSIMNTPVYPVPKPDGKWRMVLDYREVNKTIPLIAAQNQHSAGILSSIFRGKYKTTLDLSNGFWAHSITPESYWLTAFTWLGQQYCWTRLPQGFLNSPALFNADVVDLLKEVPNVQVYVDDIYISHDDPREHLEQLEKVFSLLLNAGYVVSLKKSEIAQHEVEFLGFNITKEGRGLTETFKQKLLNITPPRDLKQLQSILGKLNFARNFIPNFSELVKPLYNIIATAPGKYITWTTDNSQQLQNIISMLNSAENLEERNPEVRLIMKVNTSPSAGYIRFYNEFAKRPIMYLNYVYTKAEVKFTNTEKLLTTIHKGLIKALDLGMGQEILVYSPIVSMTKIQKTPLPERKALPIRWITWMSYLEDPRIQFHYDKTLPELQQVPTVTDDIIAKIKHPSEFSMVFYTDGSAIKHPNVNKSHNAGMGIAQVQFKPEFTVINTWSIPLGDHTAQLAEVAAVEFACKKALKIDGPVLIVTDSFYVAESVNKELPYWQSNGFFNNKKKPLKHVSKWKSIADCIQLKPDIIIIHEKGHQPTASTFHTEGNNLADKLATQGSYVVNAGKRTADGSEFEKRTADGSEFESPKKKAKVE

SEQ ID NO: 577 - protein, 2087 aa, synthetic construct
MPAAKRVKLDGGDKKYSIGLDIGTNSVGWAVITDEYKVPSKKFKVLGNTDRHSIKKNLIGALLFDSGETAEATRLKRTARRRYTRRKNRICYLQEIFSNEMAKVDDSFFHRLEESFLVEEDKKHERHPIFGNIVDEVAYHEKYPTIYHLRKKLVDSTDKADLRLIYLALAHMIKFRGHFLIEGDLNPDNSDVDKLFIQLVQTYNQLFEENPINASGVDAKAILSARLSKSRRLENLIAQLPGEKKNGLFGNLIALSLGLTPNFKSNFDLAEDAKLQLSKDTYDDDLDNLLAQIGDQYADLFLAAKNLSDAILLSDILRVNTEITKAPLSASMIKRYDEHHQDLTLLKALVRQQLPEKYKEIFFDQSKNGYAGYIDGGASQEEFYKFIKPILEKMDGTEELLVKLNREDLLRKQRTFDNGSIPHQIHLGELHAILRRQEDFYPFLKDNREKIEKILTFRIPYYVGPLARGNSRFAWMTRKSEETITPWNFEEVVDKGASAQSFIERMTNFDKNLPNEKVLPKHSLLYEYFTVYNELTKVKYVTEGMRKPAFLSGEQKKAIVDLLFKTNRKVTVKQLKEDYFKKIECFDSVEISGVEDRFNASLGTYHDLLKIIKDKDFLDNEENEDILEDIVLTLTLFEDREMIEERLKTYAHLFDDKVMKQLKRRRYTGWGRLSRKLINGIRDKQSGKTILDFLKSDGFANRNFMQLIHDDSLTFKEDIQKAQVSGQGDSLHEHIANLAGSPAIKKGILQTVKVVDELVKVMGRHKPENIVIEMARENQTTQKGQKNSRERMKRIEEGIKELGSQILKEHPVENTQLQNEKLYLYYLQNGRDMYVDQELDINRLSDYDVDHIVPQSFLKDDSIDNKVLTRSDKARGKSDNVPSEEVVKKMKNYWRQLLNAKLITQRKFDNLTKAERGGLSELDKAGFIKRQLVETRQITKHVAQILDSRMNTKYDENDKLIREVKVITLKSKLVSDFRKDFQFYKVREINNYHHAHDAYLNAVVGTALIKKYPKLESEFVYGDYKVYDVRKMIAKSEQEIGKATAKYFFYSNIMNFFKTEITLANGEIRKRPLIETNGETGEIVWDKGRDFATVRKVLSMPQVNIVKKTEVQTGGFSKESILPKRNSDKLIARKKDWDPKKYGGFDSPTVAYSVLVVAKVEKGKSKKLKSVKELLGITIMERSSFEKNPIDFLEAKGYKEVKKDLIIKLPKYSLFELENGRKRMLASAGELQKGNELALPSKYVNFLYLASHYEKLKGSPEDNEQKQLFVEQHKHYLDEIIEQISEFSKRVILADANLDKVLSAYNKHRDKPIREQAENIIHLFTLTNLGAPAAFKYFDTTIDRKRYTSTKEVLDATLIHQSITGLYETRIDLSQLGGDGGGGGEAAAKGGSGGIPWLMKKPLQLTTLVPLQEYEERLLKQTMLTGSYKEKLQSLFLKYDALWQHWENQVGHRRIKPHHIATGTVNPRPQKQYPINPKAKASIQTVINDLLKQGVLIQQNSIMNTPVYPVPKPDGKWRMVLDYREVNKTIPLIAAQNQHSAGILSSIFRGKYKTTLDLSNGFWAHSITPESYWLTAFTWLGQQYCWTRLPQGFLNSPALFNADVVDLLKEVPNVQVYVDDIYISHDDPREHLEQLEKVFSLLLNAGYVVSLKKSEIAQHEVEFLGFNITKEGRGLTETFKQKLLNITPPRDLKQLQSILGKLNFARNFIPNFSELVKPLYNIIATAPGKYITWTTDNSQQLQNIISMLNSAENLEERNPEVRLIMKVNTSPSAGYIRFYNEFAKRPIMYLNYVYTKAEVKFTNTEKLLTTIHKGLIKALDLGMGQEILVYSPIVSMTKIQKTPLPERKALPIRWITWMSYLEDPRIQFHYDKTLPELQQVPTVTDDIIAKIKHPSEFSMVFYTDGSAIKHPNVNKSHNAGMGIAQVQFKPEFTVINTWSIPLGDHTAQLAEVAAVEFACKKALKIDGPVLIVTDSFYVAESVNKELPYWQSNGFFNNKKKPLKHVSKWKSIADCIQLKPDIIIIHEKGHQPTASTFHTEGNNLADKLATQGSYVVNAGKRTADGSEFEKRTADGSEFESPKKKAKVE

SEQ ID NO: 578 - protein, 2084 aa, synthetic construct
MPAAKRVKLDGGDKKYSIGLDIGTNSVGWAVITDEYKVPSKKFKVLGNTDRHSIKKNLIGALLFDSGETAEATRLKRTARRRYTRRKNRICYLQEIFSNEMAKVDDSFFHRLEESFLVEEDKKHERHPIFGNIVDEVAYHEKYPTIYHLRKKLVDSTDKADLRLIYLALAHMIKFRGHFLIEGDLNPDNSDVDKLFIQLVQTYNQLFEENPINASGVDAKAILSARLSKSRRLENLIAQLPGEKKNGLFGNLIALSLGLTPNFKSNFDLAEDAKLQLSKDTYDDDLDNLLAQIGDQYADLFLAAKNLSDAILLSDILRVNTEITKAPLSASMIKRYDEHHQDLTLLKALVRQQLPEKYKEIFFDQSKNGYAGYIDGGASQEEFYKFIKPILEKMDGTEELLVKLNREDLLRKQRTFDNGSIPHQIHLGELHAILRRQEDFYPFLKDNREKIEKILTFRIPYYVGPLARGNSRFAWMTRKSEETITPWNFEEVVDKGASAQSFIERMTNFDKNLPNEKVLPKHSLLYEYFTVYNELTKVKYVTEGMRKPAFLSGEQKKAIVDLLFKTNRKVTVKQLKEDYFKKIECFDSVEISGVEDRFNASLGTYHDLLKIIKDKDFLDNEENEDILEDIVLTLTLFEDREMIEERLKTYAHLFDDKVMKQLKRRRYTGWGRLSRKLINGIRDKQSGKTILDFLKSDGFANRNFMQLIHDDSLTFKEDIQKAQVSGQGDSLHEHIANLAGSPAIKKGILQTVKVVDELVKVMGRHKPENIVIEMARENQTTQKGQKNSRERMKRIEEGIKELGSQILKEHPVENTQLQNEKLYLYYLQNGRDMYVDQELDINRLSDYDVDHIVPQSFLKDDSIDNKVLTRSDKARGKSDNVPSEEVVKKMKNYWRQLLNAKLITQRKFDNLTKAERGGLSELDKAGFIKRQLVETRQITKHVAQILDSRMNTKYDENDKLIREVKVITLKSKLVSDFRKDFQFYKVREINNYHHAHDAYLNAVVGTALIKKYPKLESEFVYGDYKVYDVRKMIAKSEQEIGKATAKYFFYSNIMNFFKTEITLANGEIRKRPLIETNGETGEIVWDKGRDFATVRKVLSMPQVNIVKKTEVQTGGFSKESILPKRNSDKLIARKKDWDPKKYGGFDSPTVAYSVLVVAKVEKGKSKKLKSVKELLGITIMERSSFEKNPIDFLEAKGYKEVKKDLIIKLPKYSLFELENGRKRMLASAGELQKGNELALPSKYVNFLYLASHYEKLKGSPEDNEQKQLFVEQHKHYLDEIIEQISEFSKRVILADANLDKVLSAYNKHRDKPIREQAENIIHLFTLTNLGAPAAFKYFDTTIDRKRYTSTKEVLDATLIHQSITGLYETRIDLSQLGGDGGGGGGGGGGGGIPWLMKKPLQLTTLVPLQEYEERLLKQTMLTGSYKEKLQSLFLKYDALWQHWENQVGHRRIKPHHIATGTVNPRPQKQYPINPKAKASIQTVINDLLKQGVLIQQNSIMNTPVYPVPKPDGKWRMVLDYREVNKTIPLIAAQNQHSAGILSSIFRGKYKTTLDLSNGFWAHSITPESYWLTAFTWLGQQYCWTRLPQGFLNSPALFNADVVDLLKEVPNVQVYVDDIYISHDDPREHLEQLEKVFSLLLNAGYVVSLKKSEIAQHEVEFLGFNITKEGRGLTETFKQKLLNITPPRDLKQLQSILGKLNFARNFIPNFSELVKPLYNIIATAPGKYITWTTDNSQQLQNIISMLNSAENLEERNPEVRLIMKVNTSPSAGYIRFYNEFAKRPIMYLNYVYTKAEVKFTNTEKLLTTIHKGLIKALDLGMGQEILVYSPIVSMTKIQKTPLPERKALPIRWITWMSYLEDPRIQFHYDKTLPELQQVPTVTDDIIAKIKHPSEFSMVFYTDGSAIKHPNVNKSHNAGMGIAQVQFKPEFTVINTWSIPLGDHTAQLAEVAAVEFACKKALKIDGPVLIVTDSFYVAESVNKELPYWQSNGFFNNKKKPLKHVSKWKSIADCIQLKPDIIIIHEKGHQPTASTFHTEGNNLADKLATQGSYVVNAGKRTADGSEFEKRTADGSEFESPKKKAKVE

SEQ ID NO: 579 - protein, 2087 aa, synthetic construct
MPAAKRVKLDGGDKKYSIGLDIGTNSVGWAVITDEYKVPSKKFKVLGNTDRHSIKKNLIGALLFDSGETAEATRLKRTARRRYTRRKNRICYLQEIFSNEMAKVDDSFFHRLEESFLVEEDKKHERHPIFGNIVDEVAYHEKYPTIYHLRKKLVDSTDKADLRLIYLALAHMIKFRGHFLIEGDLNPDNSDVDKLFIQLVQTYNQLFEENPINASGVDAKAILSARLSKSRRLENLIAQLPGEKKNGLFGNLIALSLGLTPNFKSNFDLAEDAKLQLSKDTYDDDLDNLLAQIGDQYADLFLAAKNLSDAILLSDILRVNTEITKAPLSASMIKRYDEHHQDLTLLKALVRQQLPEKYKEIFFDQSKNGYAGYIDGGASQEEFYKFIKPILEKMDGTEELLVKLNREDLLRKQRTFDNGSIPHQIHLGELHAILRRQEDFYPFLKDNREKIEKILTFRIPYYVGPLARGNSRFAWMTRKSEETITPWNFEEVVDKGASAQSFIERMTNFDKNLPNEKVLPKHSLLYEYFTVYNELTKVKYVTEGMRKPAFLSGEQKKAIVDLLFKTNRKVTVKQLKEDYFKKIECFDSVEISGVEDRFNASLGTYHDLLKIIKDKDFLDNEENEDILEDIVLTLTLFEDREMIEERLKTYAHLFDDKVMKQLKRRRYTGWGRLSRKLINGIRDKQSGKTILDFLKSDGFANRNFMQLIHDDSLTFKEDIQKAQVSGQGDSLHEHIANLAGSPAIKKGILQTVKVVDELVKVMGRHKPENIVIEMARENQTTQKGQKNSRERMKRIEEGIKELGSQILKEHPVENTQLQNEKLYLYYLQNGRDMYVDQELDINRLSDYDVDHIVPQSFLKDDSIDNKVLTRSDKARGKSDNVPSEEVVKKMKNYWRQLLNAKLITQRKFDNLTKAERGGLSELDKAGFIKRQLVETRQITKHVAQILDSRMNTKYDENDKLIREVKVITLKSKLVSDFRKDFQFYKVREINNYHHAHDAYLNAVVGTALIKKYPKLESEFVYGDYKVYDVRKMIAKSEQEIGKATAKYFFYSNIMNFFKTEITLANGEIRKRPLIETNGETGEIVWDKGRDFATVRKVLSMPQVNIVKKTEVQTGGFSKESILPKRNSDKLIARKKDWDPKKYGGFDSPTVAYSVLVVAKVEKGKSKKLKSVKELLGITIMERSSFEKNPIDFLEAKGYKEVKKDLIIKLPKYSLFELENGRKRMLASAGELQKGNELALPSKYVNFLYLASHYEKLKGSPEDNEQKQLFVEQHKHYLDEIIEQISEFSKRVILADANLDKVLSAYNKHRDKPIREQAENIIHLFTLTNLGAPAAFKYFDTTIDRKRYTSTKEVLDATLIHQSITGLYETRIDLSQLGGDGGPAPGSSEAAAKGGIPWLMKKPLQLTTLVPLQEYEERLLKQTMLTGSYKEKLQSLFLKYDALWQHWENQVGHRRIKPHHIATGTVNPRPQKQYPINPKAKASIQTVINDLLKQGVLIQQNSIMNTPVYPVPKPDGKWRMVLDYREVNKTIPLIAAQNQHSAGILSSIFRGKYKTTLDLSNGFWAHSITPESYWLTAFTWLGQQYCWTRLPQGFLNSPALFNADVVDLLKEVPNVQVYVDDIYISHDDPREHLEQLEKVFSLLLNAGYVVSLKKSEIAQHEVEFLGFNITKEGRGLTETFKQKLLNITPPRDLKQLQSILGKLNFARNFIPNFSELVKPLYNIIATAPGKYITWTTDNSQQLQNIISMLNSAENLEERNPEVRLIMKVNTSPSAGYIRFYNEFAKRPIMYLNYVYTKAEVKFTNTEKLLTTIHKGLIKALDLGMGQEILVYSPIVSMTKIQKTPLPERKALPIRWITWMSYLEDPRIQFHYDKTLPELQQVPTVTDDIIAKIKHPSEFSMVFYTDGSAIKHPNVNKSHNAGMGIAQVQFKPEFTVINTWSIPLGDHTAQLAEVAAVEFACKKALKIDGPVLIVTDSFYVAESVNKELPYWQSNGFFNNKKKPLKHVSKWKSIADCIQLKPDIIIIHEKGHQPTASTFHTEGNNLADKLATQGSYVVNAGKRTADGSEFEKRTADGSEFESPKKKAKVE

SEQ ID NO: 580 - protein, 2087 aa, synthetic construct
MPAAKRVKLDGGDKKYSIGLDIGTNSVGWAVITDEYKVPSKKFKVLGNTDRHSIKKNLIGALLFDSGETAEATRLKRTARRRYTRRKNRICYLQEIFSNEMAKVDDSFFHRLEESFLVEEDKKHERHPIFGNIVDEVAYHEKYPTIYHLRKKLVDSTDKADLRLIYLALAHMIKFRGHFLIEGDLNPDNSDVDKLFIQLVQTYNQLFEENPINASGVDAKAILSARLSKSRRLENLIAQLPGEKKNGLFGNLIALSLGLTPNFKSNFDLAEDAKLQLSKDTYDDDLDNLLAQIGDQYADLFLAAKNLSDAILLSDILRVNTEITKAPLSASMIKRYDEHHQDLTLLKALVRQQLPEKYKEIFFDQSKNGYAGYIDGGASQEEFYKFIKPILEKMDGTEELLVKLNREDLLRKQRTFDNGSIPHQIHLGELHAILRRQEDFYPFLKDNREKIEKILTFRIPYYVGPLARGNSRFAWMTRKSEETITPWNFEEVVDKGASAQSFIERMTNFDKNLPNEKVLPKHSLLYEYFTVYNELTKVKYVTEGMRKPAFLSGEQKKAIVDLLFKTNRKVTVKQLKEDYFKKIECFDSVEISGVEDRFNASLGTYHDLLKIIKDKDFLDNEENEDILEDIVLTLTLFEDREMIEERLKTYAHLFDDKVMKQLKRRRYTGWGRLSRKLINGIRDKQSGKTILDFLKSDGFANRNFMQLIHDDSLTFKEDIQKAQVSGQGDSLHEHIANLAGSPAIKKGILQTVKVVDELVKVMGRHKPENIVIEMARENQTTQKGQKNSRERMKRIEEGIKELGSQILKEHPVENTQLQNEKLYLYYLQNGRDMYVDQELDINRLSDYDVDHIVPQSFLKDDSIDNKVLTRSDKARGKSDNVPSEEVVKKMKNYWRQLLNAKLITQRKFDNLTKAERGGLSELDKAGFIKRQLVETRQITKHVAQILDSRMNTKYDENDKLIREVKVITLKSKLVSDFRKDFQFYKVREINNYHHAHDAYLNAVVGTALIKKYPKLESEFVYGDYKVYDVRKMIAKSEQEIGKATAKYFFYSNIMNFFKTEITLANGEIRKRPLIETNGETGEIVWDKGRDFATVRKVLSMPQVNIVKKTEVQTGGFSKESILPKRNSDKLIARKKDWDPKKYGGFDSPTVAYSVLVVAKVEKGKSKKLKSVKELLGITIMERSSFEKNPIDFLEAKGYKEVKKDLIIKLPKYSLFELENGRKRMLASAGELQKGNELALPSKYVNFLYLASHYEKLKGSPEDNEQKQLFVEQHKHYLDEIIEQISEFSKRVILADANLDKVLSAYNKHRDKPIREQAENIIHLFTLTNLGAPAAFKYFDTTIDRKRYTSTKEVLDATLIHQSITGLYETRIDLSQLGGDGGGGSEAAAKPAPGGIPWLMKKPLQLTTLVPLQEYEERLLKQTMLTGSYKEKLQSLFLKYDALWQHWENQVGHRRIKPHHIATGTVNPRPQKQYPINPKAKASIQTVINDLLKQGVLIQQNSIMNTPVYPVPKPDGKWRMVLDYREVNKTIPLIAAQNQHSAGILSSIFRGKYKTTLDLSNGFWAHSITPESYWLTAFTWLGQQYCWTRLPQGFLNSPALFNADVVDLLKEVPNVQVYVDDIYISHDDPREHLEQLEKVFSLLLNAGYVVSLKKSEIAQHEVEFLGFNITKEGRGLTETFKQKLLNITPPRDLKQLQSILGKLNFARNFIPNFSELVKPLYNIIATAPGKYITWTTDNSQQLQNIISMLNSAENLEERNPEVRLIMKVNTSPSAGYIRFYNEFAKRPIMYLNYVYTKAEVKFTNTEKLLTTIHKGLIKALDLGMGQEILVYSPIVSMTKIQKTPLPERKALPIRWITWMSYLEDPRIQFHYDKTLPELQQVPTVTDDIIAKIKHPSEFSMVFYTDGSAIKHPNVNKSHNAGMGIAQVQFKPEFTVINTWSIPLGDHTAQLAEVAAVEFACKKALKIDGPVLIVTDSFYVAESVNKELPYWQSNGFFNNKKKPLKHVSKWKSIADCIQLKPDIIIIHEKGHQPTASTFHTEGNNLADKLATQGSYVVNAGKRTADGSEFEKRTADGSEFESPKKKAKVE

SEQ ID NO: 581 - protein, 2085 aa, synthetic construct
MPAAKRVKLDGGDKKYSIGLDIGTNSVGWAVITDEYKVPSKKFKVLGNTDRHSIKKNLIGALLFDSGETAEATRLKRTARRRYTRRKNRICYLQEIFSNEMAKVDDSFFHRLEESFLVEEDKKHERHPIFGNIVDEVAYHEKYPTIYHLRKKLVDSTDKADLRLIYLALAHMIKFRGHFLIEGDLNPDNSDVDKLFIQLVQTYNQLFEENPINASGVDAKAILSARLSKSRRLENLIAQLPGEKKNGLFGNLIALSLGLTPNFKSNFDLAEDAKLQLSKDTYDDDLDNLLAQIGDQYADLFLAAKNLSDAILLSDILRVNTEITKAPLSASMIKRYDEHHQDLTLLKALVRQQLPEKYKEIFFDQSKNGYAGYIDGGASQEEFYKFIKPILEKMDGTEELLVKLNREDLLRKQRTFDNGSIPHQIHLGELHAILRRQEDFYPFLKDNREKIEKILTFRIPYYVGPLARGNSRFAWMTRKSEETITPWNFEEVVDKGASAQSFIERMTNFDKNLPNEKVLPKHSLLYEYFTVYNELTKVKYVTEGMRKPAFLSGEQKKAIVDLLFKTNRKVTVKQLKEDYFKKIECFDSVEISGVEDRFNASLGTYHDLLKIIKDKDFLDNEENEDILEDIVLTLTLFEDREMIEERLKTYAHLFDDKVMKQLKRRRYTGWGRLSRKLINGIRDKQSGKTILDFLKSDGFANRNFMQLIHDDSLTFKEDIQKAQVSGQGDSLHEHIANLAGSPAIKKGILQTVKVVDELVKVMGRHKPENIVIEMARENQTTQKGQKNSRERMKRIEEGIKELGSQILKEHPVENTQLQNEKLYLYYLQNGRDMYVDQELDINRLSDYDVDHIVPQSFLKDDSIDNKVLTRSDKARGKSDNVPSEEVVKKMKNYWRQLLNAKLITQRKFDNLTKAERGGLSELDKAGFIKRQLVETRQITKHVAQILDSRMNTKYDENDKLIREVKVITLKSKLVSDFRKDFQFYKVREINNYHHAHDAYLNAVVGTALIKKYPKLESEFVYGDYKVYDVRKMIAKSEQEIGKATAKYFFYSNIMNFFKTEITLANGEIRKRPLIETNGETGEIVWDKGRDFATVRKVLSMPQVNIVKKTEVQTGGFSKESILPKRNSDKLIARKKDWDPKKYGGFDSPTVAYSVLVVAKVEKGKSKKLKSVKELLGITIMERSSFEKNPIDFLEAKGYKEVKKDLIIKLPKYSLFELENGRKRMLASAGELQKGNELALPSKYVNFLYLASHYEKLKGSPEDNEQKQLFVEQHKHYLDEIIEQISEFSKRVILADANLDKVLSAYNKHRDKPIREQAENIIHLFTLTNLGAPAAFKYFDTTIDRKRYTSTKEVLDATLIHQSITGLYETRIDLSQLGGDGGPAPGSSGGGGGIPWLMKKPLQLTTLVPLQEYEERLLKQTMLTGSYKEKLQSLFLKYDALWQHWENQVGHRRIKPHHIATGTVNPRPQKQYPINPKAKASIQTVINDLLKQGVLIQQNSIMNTPVYPVPKPDGKWRMVLDYREVNKTIPLIAAQNQHSAGILSSIFRGKYKTTLDLSNGFWAHSITPESYWLTAFTWLGQQYCWTRLPQGFLNSPALFNADVVDLLKEVPNVQVYVDDIYISHDDPREHLEQLEKVFSLLLNAGYVVSLKKSEIAQHEVEFLGFNITKEGRGLTETFKQKLLNITPPRDLKQLQSILGKLNFARNFIPNFSELVKPLYNIIATAPGKYITWTTDNSQQLQNIISMLNSAENLEERNPEVRLIMKVNTSPSAGYIRFYNEFAKRPIMYLNYVYTKAEVKFTNTEKLLTTIHKGLIKALDLGMGQEILVYSPIVSMTKIQKTPLPERKALPIRWITWMSYLEDPRIQFHYDKTLPELQQVPTVTDDIIAKIKHPSEFSMVFYTDGSAIKHPNVNKSHNAGMGIAQVQFKPEFTVINTWSIPLGDHTAQLAEVAAVEFACKKALKIDGPVLIVTDSFYVAESVNKELPYWQSNGFFNNKKKPLKHVSKWKSIADCIQLKPDIIIIHEKGHQPTASTFHTEGNNLADKLATQGSYVVNAGKRTADGSEFEKRTADGSEFESPKKKAKVE

SEQ ID NO: 582 - protein, 2087 aa, synthetic construct
MPAAKRVKLDGGDKKYSIGLDIGTNSVGWAVITDEYKVPSKKFKVLGNTDRHSIKKNLIGALLFDSGETAEATRLKRTARRRYTRRKNRICYLQEIFSNEMAKVDDSFFHRLEESFLVEEDKKHERHPIFGNIVDEVAYHEKYPTIYHLRKKLVDSTDKADLRLIYLALAHMIKFRGHFLIEGDLNPDNSDVDKLFIQLVQTYNQLFEENPINASGVDAKAILSARLSKSRRLENLIAQLPGEKKNGLFGNLIALSLGLTPNFKSNFDLAEDAKLQLSKDTYDDDLDNLLAQIGDQYADLFLAAKNLSDAILLSDILRVNTEITKAPLSASMIKRYDEHHQDLTLLKALVRQQLPEKYKEIFFDQSKNGYAGYIDGGASQEEFYKFIKPILEKMDGTEELLVKLNREDLLRKQRTFDNGSIPHQIHLGELHAILRRQEDFYPFLKDNREKIEKILTFRIPYYVGPLARGNSRFAWMTRKSEETITPWNFEEVVDKGASAQSFIERMTNFDKNLPNEKVLPKHSLLYEYFTVYNELTKVKYVTEGMRKPAFLSGEQKKAIVDLLFKTNRKVTVKQLKEDYFKKIECFDSVEISGVEDRFNASLGTYHDLLKIIKDKDFLDNEENEDILEDIVLTLTLFEDREMIEERLKTYAHLFDDKVMKQLKRRRYTGWGRLSRKLINGIRDKQSGKTILDFLKSDGFANRNFMQLIHDDSLTFKEDIQKAQVSGQGDSLHEHIANLAGSPAIKKGILQTVKVVDELVKVMGRHKPENIVIEMARENQTTQKGQKNSRERMKRIEEGIKELGSQILKEHPVENTQLQNEKLYLYYLQNGRDMYVDQELDINRLSDYDVDHIVPQSFLKDDSIDNKVLTRSDKARGKSDNVPSEEVVKKMKNYWRQLLNAKLITQRKFDNLTKAERGGLSELDKAGFIKRQLVETRQITKHVAQILDSRMNTKYDENDKLIREVKVITLKSKLVSDFRKDFQFYKVREINNYHHAHDAYLNAVVGTALIKKYPKLESEFVYGDYKVYDVRKMIAKSEQEIGKATAKYFFYSNIMNFFKTEITLANGEIRKRPLIETNGETGEIVWDKGRDFATVRKVLSMPQVNIVKKTEVQTGGFSKESILPKRNSDKLIARKKDWDPKKYGGFDSPTVAYSVLVVAKVEKGKSKKLKSVKELLGITIMERSSFEKNPIDFLEAKGYKEVKKDLIIKLPKYSLFELENGRKRMLASAGELQKGNELALPSKYVNFLYLASHYEKLKGSPEDNEQKQLFVEQHKHYLDEIIEQISEFSKRVILADANLDKVLSAYNKHRDKPIREQAENIIHLFTLTNLGAPAAFKYFDTTIDRKRYTSTKEVLDATLIHQSITGLYETRIDLSQLGGDGGGGGGSSEAAAKGGIPWLMKKPLQLTTLVPLQEYEERLLKQTMLTGSYKEKLQSLFLKYDALWQHWENQVGHRRIKPHHIATGTVNPRPQKQYPINPKAKASIQTVINDLLKQGVLIQQNSIMNTPVYPVPKPDGKWRMVLDYREVNKTIPLIAAQNQHSAGILSSIFRGKYKTTLDLSNGFWAHSITPESYWLTAFTWLGQQYCWTRLPQGFLNSPALFNADVVDLLKEVPNVQVYVDDIYISHDDPREHLEQLEKVFSLLLNAGYVVSLKKSEIAQHEVEFLGFNITKEGRGLTETFKQKLLNITPPRDLKQLQSILGKLNFARNFIPNFSELVKPLYNIIATAPGKYITWTTDNSQQLQNIISMLNSAENLEERNPEVRLIMKVNTSPSAGYIRFYNEFAKRPIMYLNYVYTKAEVKFTNTEKLLTTIHKGLIKALDLGMGQEILVYSPIVSMTKIQKTPLPERKALPIRWITWMSYLEDPRIQFHYDKTLPELQQVPTVTDDIIAKIKHPSEFSMVFYTDGSAIKHPNVNKSHNAGMGIAQVQFKPEFTVINTWSIPLGDHTAQLAEVAAVEFACKKALKIDGPVLIVTDSFYVAESVNKELPYWQSNGFFNNKKKPLKHVSKWKSIADCIQLKPDIIIIHEKGHQPTASTFHTEGNNLADKLATQGSYVVNAGKRTADGSEFEKRTADGSEFESPKKKAKVE

SEQ ID NO: 583 - protein, 2087 aa, synthetic construct
MPAAKRVKLDGGDKKYSIGLDIGTNSVGWAVITDEYKVPSKKFKVLGNTDRHSIKKNLIGALLFDSGETAEATRLKRTARRRYTRRKNRICYLQEIFSNEMAKVDDSFFHRLEESFLVEEDKKHERHPIFGNIVDEVAYHEKYPTIYHLRKKLVDSTDKADLRLIYLALAHMIKFRGHFLIEGDLNPDNSDVDKLFIQLVQTYNQLFEENPINASGVDAKAILSARLSKSRRLENLIAQLPGEKKNGLFGNLIALSLGLTPNFKSNFDLAEDAKLQLSKDTYDDDLDNLLAQIGDQYADLFLAAKNLSDAILLSDILRVNTEITKAPLSASMIKRYDEHHQDLTLLKALVRQQLPEKYKEIFFDQSKNGYAGYIDGGASQEEFYKFIKPILEKMDGTEELLVKLNREDLLRKQRTFDNGSIPHQIHLGELHAILRRQEDFYPFLKDNREKIEKILTFRIPYYVGPLARGNSRFAWMTRKSEETITPWNFEEVVDKGASAQSFIERMTNFDKNLPNEKVLPKHSLLYEYFTVYNELTKVKYVTEGMRKPAFLSGEQKKAIVDLLFKTNRKVTVKQLKEDYFKKIECFDSVEISGVEDRFNASLGTYHDLLKIIKDKDFLDNEENEDILEDIVLTLTLFEDREMIEERLKTYAHLFDDKVMKQLKRRRYTGWGRLSRKLINGIRDKQSGKTILDFLKSDGFANRNFMQLIHDDSLTFKEDIQKAQVSGQGDSLHEHIANLAGSPAIKKGILQTVKVVDELVKVMGRHKPENIVIEMARENQTTQKGQKNSRERMKRIEEGIKELGSQILKEHPVENTQLQNEKLYLYYLQNGRDMYVDQELDINRLSDYDVDHIVPQSFLKDDSIDNKVLTRSDKARGKSDNVPSEEVVKKMKNYWRQLLNAKLITQRKFDNLTKAERGGLSELDKAGFIKRQLVETRQITKHVAQILDSRMNTKYDENDKLIREVKVITLKSKLVSDFRKDFQFYKVREINNYHHAHDAYLNAVVGTALIKKYPKLESEFVYGDYKVYDVRKMIAKSEQEIGKATAKYFFYSNIMNFFKTEITLANGEIRKRPLIETNGETGEIVWDKGRDFATVRKVLSMPQVNIVKKTEVQTGGFSKESILPKRNSDKLIARKKDWDPKKYGGFDSPTVAYSVLVVAKVEKGKSKKLKSVKELLGITIMERSSFEKNPIDFLEAKGYKEVKKDLIIKLPKYSLFELENGRKRMLASAGELQKGNELALPSKYVNFLYLASHYEKLKGSPEDNEQKQLFVEQHKHYLDEIIEQISEFSKRVILADANLDKVLSAYNKHRDKPIREQAENIIHLFTLTNLGAPAAFKYFDTTIDRKRYTSTKEVLDATLIHQSITGLYETRIDLSQLGGDGGGGSGGGEAAAKGGIPWLMKKPLQLTTLVPLQEYEERLLKQTMLTGSYKEKLQSLFLKYDALWQHWENQVGHRRIKPHHIATGTVNPRPQKQYPINPKAKASIQTVINDLLKQGVLIQQNSIMNTPVYPVPKPDGKWRMVLDYREVNKTIPLIAAQNQHSAGILSSIFRGKYKTTLDLSNGFWAHSITPESYWLTAFTWLGQQYCWTRLPQGFLNSPALFNADVVDLLKEVPNVQVYVDDIYISHDDPREHLEQLEKVFSLLLNAGYVVSLKKSEIAQHEVEFLGFNITKEGRGLTETFKQKLLNITPPRDLKQLQSILGKLNFARNFIPNFSELVKPLYNIIATAPGKYITWTTDNSQQLQNIISMLNSAENLEERNPEVRLIMKVNTSPSAGYIRFYNEFAKRPIMYLNYVYTKAEVKFTNTEKLLTTIHKGLIKALDLGMGQEILVYSPIVSMTKIQKTPLPERKALPIRWITWMSYLEDPRIQFHYDKTLPELQQVPTVTDDIIAKIKHPSEFSMVFYTDGSAIKHPNVNKSHNAGMGIAQVQFKPEFTVINTWSIPLGDHTAQLAEVAAVEFACKKALKIDGPVLIVTDSFYVAESVNKELPYWQSNGFFNNKKKPLKHVSKWKSIADCIQLKPDIIIIHEKGHQPTASTFHTEGNNLADKLATQGSYVVNAGKRTADGSEFEKRTADGSEFESPKKKAKVE

SEQ ID NO: 584 - protein, 2085 aa, synthetic construct
MPAAKRVKLDGGDKKYSIGLDIGTNSVGWAVITDEYKVPSKKFKVLGNTDRHSIKKNLIGALLFDSGETAEATRLKRTARRRYTRRKNRICYLQEIFSNEMAKVDDSFFHRLEESFLVEEDKKHERHPIFGNIVDEVAYHEKYPTIYHLRKKLVDSTDKADLRLIYLALAHMIKFRGHFLIEGDLNPDNSDVDKLFIQLVQTYNQLFEENPINASGVDAKAILSARLSKSRRLENLIAQLPGEKKNGLFGNLIALSLGLTPNFKSNFDLAEDAKLQLSKDTYDDDLDNLLAQIGDQYADLFLAAKNLSDAILLSDILRVNTEITKAPLSASMIKRYDEHHQDLTLLKALVRQQLPEKYKEIFFDQSKNGYAGYIDGGASQEEFYKFIKPILEKMDGTEELLVKLNREDLLRKQRTFDNGSIPHQIHLGELHAILRRQEDFYPFLKDNREKIEKILTFRIPYYVGPLARGNSRFAWMTRKSEETITPWNFEEVVDKGASAQSFIERMTNFDKNLPNEKVLPKHSLLYEYFTVYNELTKVKYVTEGMRKPAFLSGEQKKAIVDLLFKTNRKVTVKQLKEDYFKKIECFDSVEISGVEDRFNASLGTYHDLLKIIKDKDFLDNEENEDILEDIVLTLTLFEDREMIEERLKTYAHLFDDKVMKQLKRRRYTGWGRLSRKLINGIRDKQSGKTILDFLKSDGFANRNFMQLIHDDSLTFKEDIQKAQVSGQGDSLHEHIANLAGSPAIKKGILQTVKVVDELVKVMGRHKPENIVIEMARENQTTQKGQKNSRERMKRIEEGIKELGSQILKEHPVENTQLQNEKLYLYYLQNGRDMYVDQELDINRLSDYDVDHIVPQSFLKDDSIDNKVLTRSDKARGKSDNVPSEEVVKKMKNYWRQLLNAKLITQRKFDNLTKAERGGLSELDKAGFIKRQLVETRQITKHVAQILDSRMNTKYDENDKLIREVKVITLKSKLVSDFRKDFQFYKVREINNYHHAHDAYLNAVVGTALIKKYPKLESEFVYGDYKVYDVRKMIAKSEQEIGKATAKYFFYSNIMNFFKTEITLANGEIRKRPLIETNGETGEIVWDKGRDFATVRKVLSMPQVNIVKKTEVQTGGFSKESILPKRNSDKLIARKKDWDPKKYGGFDSPTVAYSVLVVAKVEKGKSKKLKSVKELLGITIMERSSFEKNPIDFLEAKGYKEVKKDLIIKLPKYSLFELENGRKRMLASAGELQKGNELALPSKYVNFLYLASHYEKLKGSPEDNEQKQLFVEQHKHYLDEIIEQISEFSKRVILADANLDKVLSAYNKHRDKPIREQAENIIHLFTLTNLGAPAAFKYFDTTIDRKRYTSTKEVLDATLIHQSITGLYETRIDLSQLGGDGGGSSGGSPAPGGIPWLMKKPLQLTTLVPLQEYEERLLKQTMLTGSYKEKLQSLFLKYDALWQHWENQVGHRRIKPHHIATGTVNPRPQKQYPINPKAKASIQTVINDLLKQGVLIQQNSIMNTPVYPVPKPDGKWRMVLDYREVNKTIPLIAAQNQHSAGILSSIFRGKYKTTLDLSNGFWAHSITPESYWLTAFTWLGQQYCWTRLPQGFLNSPALFNADVVDLLKEVPNVQVYVDDIYISHDDPREHLEQLEKVFSLLLNAGYVVSLKKSEIAQHEVEFLGFNITKEGRGLTETFKQKLLNITPPRDLKQLQSILGKLNFARNFIPNFSELVKPLYNIIATAPGKYITWTTDNSQQLQNIISMLNSAENLEERNPEVRLIMKVNTSPSAGYIRFYNEFAKRPIMYLNYVYTKAEVKFTNTEKLLTTIHKGLIKALDLGMGQEILVYSPIVSMTKIQKTPLPERKALPIRWITWMSYLEDPRIQFHYDKTLPELQQVPTVTDDIIAKIKHPSEFSMVFYTDGSAIKHPNVNKSHNAGMGIAQVQFKPEFTVINTWSIPLGDHTAQLAEVAAVEFACKKALKIDGPVLIVTDSFYVAESVNKELPYWQSNGFFNNKKKPLKHVSKWKSIADCIQLKPDIIIIHEKGHQPTASTFHTEGNNLADKLATQGSYVVNAGKRTADGSEFEKRTADGSEFESPKKKAKVE

SEQ ID NO: 585 - protein, 2109 aa, synthetic construct
MPAAKRVKLDGGDKKYSIGLDIGTNSVGWAVITDEYKVPSKKFKVLGNTDRHSIKKNLIGALLFDSGETAEATRLKRTARRRYTRRKNRICYLQEIFSNEMAKVDDSFFHRLEESFLVEEDKKHERHPIFGNIVDEVAYHEKYPTIYHLRKKLVDSTDKADLRLIYLALAHMIKFRGHFLIEGDLNPDNSDVDKLFIQLVQTYNQLFEENPINASGVDAKAILSARLSKSRRLENLIAQLPGEKKNGLFGNLIALSLGLTPNFKSNFDLAEDAKLQLSKDTYDDDLDNLLAQIGDQYADLFLAAKNLSDAILLSDILRVNTEITKAPLSASMIKRYDEHHQDLTLLKALVRQQLPEKYKEIFFDQSKNGYAGYIDGGASQEEFYKFIKPILEKMDGTEELLVKLNREDLLRKQRTFDNGSIPHQIHLGELHAILRRQEDFYPFLKDNREKIEKILTFRIPYYVGPLARGNSRFAWMTRKSEETITPWNFEEVVDKGASAQSFIERMTNFDKNLPNEKVLPKHSLLYEYFTVYNELTKVKYVTEGMRKPAFLSGEQKKAIVDLLFKTNRKVTVKQLKEDYFKKIECFDSVEISGVEDRFNASLGTYHDLLKIIKDKDFLDNEENEDILEDIVLTLTLFEDREMIEERLKTYAHLFDDKVMKQLKRRRYTGWGRLSRKLINGIRDKQSGKTILDFLKSDGFANRNFMQLIHDDSLTFKEDIQKAQVSGQGDSLHEHIANLAGSPAIKKGILQTVKVVDELVKVMGRHKPENIVIEMARENQTTQKGQKNSRERMKRIEEGIKELGSQILKEHPVENTQLQNEKLYLYYLQNGRDMYVDQELDINRLSDYDVDHIVPQSFLKDDSIDNKVLTRSDKARGKSDNVPSEEVVKKMKNYWRQLLNAKLITQRKFDNLTKAERGGLSELDKAGFIKRQLVETRQITKHVAQILDSRMNTKYDENDKLIREVKVITLKSKLVSDFRKDFQFYKVREINNYHHAHDAYLNAVVGTALIKKYPKLESEFVYGDYKVYDVRKMIAKSEQEIGKATAKYFFYSNIMNFFKTEITLANGEIRKRPLIETNGETGEIVWDKGRDFATVRKVLSMPQVNIVKKTEVQTGGFSKESILPKRNSDKLIARKKDWDPKKYGGFDSPTVAYSVLVVAKVEKGKSKKLKSVKELLGITIMERSSFEKNPIDFLEAKGYKEVKKDLIIKLPKYSLFELENGRKRMLASAGELQKGNELALPSKYVNFLYLASHYEKLKGSPEDNEQKQLFVEQHKHYLDEIIEQISEFSKRVILADANLDKVLSAYNKHRDKPIREQAENIIHLFTLTNLGAPAAFKYFDTTIDRKRYTSTKEVLDATLIHQSITGLYETRIDLSQLGGDGGSGGSSGGSSGSETPGTSESATPESSGGSSGGSSGGIPWLMKKPLQLTTLVPLQEYEERLLKQTMLTGSYKEKLQSLFLKYDALWQHWENQVGHRRIKPHHIATGTVNPRPQKQYPINPKAKASIQTVINDLLKQGVLIQQNSIMNTPVYPVPKPDGKWRMVLDYREVNKTIPLIAAQNQHSAGILSSIFRGKYKTTLDLSNGFWAHSITPESYWLTAFTWLGQQYCWTRLPQGFLNSPALFNADVVDLLKEVPNVQVYVDDIYISHDDPREHLEQLEKVFSLLLNAGYVVSLKKSEIAQHEVEFLGFNITKEGRGLTETFKQKLLNITPPRDLKQLQSILGKLNFARNFIPNFSELVKPLYNIIATAPGKYITWTTDNSQQLQNIISMLNSAENLEERNPEVRLIMKVNTSPSAGYIRFYNEFAKRPIMYLNYVYTKAEVKFTNTEKLLTTIHKGLIKALDLGMGQEILVYSPIVSMTKIQKTPLPERKALPIRWITWMSYLEDPRIQFHYDKTLPELQQVPTVTDDIIAKIKHPSEFSMVFYTDGSAIKHPNVNKSHNAGMGIAQVQFKPEFTVINTWSIPLGDHTAQLAEVAAVEFACKKALKIDGPVLIVTDSFYVAESVNKELPYWQSNGFFNNKKKPLKHVSKWKSIADCIQLKPDIIIIHEKGHQPTASTFHTEGNNLADKLATQGSYVVNAGKRTADGSEFEKRTADGSEFESPKKKAKVE

SEQ ID NO: 586 - protein, 2088 aa, synthetic construct
MPAAKRVKLDGGDKKYSIGLDIGTNSVGWAVITDEYKVPSKKFKVLGNTDRHSIKKNLIGALLFDSGETAEATRLKRTARRRYTRRKNRICYLQEIFSNEMAKVDDSFFHRLEESFLVEEDKKHERHPIFGNIVDEVAYHEKYPTIYHLRKKLVDSTDKADLRLIYLALAHMIKFRGHFLIEGDLNPDNSDVDKLFIQLVQTYNQLFEENPINASGVDAKAILSARLSKSRRLENLIAQLPGEKKNGLFGNLIALSLGLTPNFKSNFDLAEDAKLQLSKDTYDDDLDNLLAQIGDQYADLFLAAKNLSDAILLSDILRVNTEITKAPLSASMIKRYDEHHQDLTLLKALVRQQLPEKYKEIFFDQSKNGYAGYIDGGASQEEFYKFIKPILEKMDGTEELLVKLNREDLLRKQRTFDNGSIPHQIHLGELHAILRRQEDFYPFLKDNREKIEKILTFRIPYYVGPLARGNSRFAWMTRKSEETITPWNFEEVVDKGASAQSFIERMTNFDKNLPNEKVLPKHSLLYEYFTVYNELTKVKYVTEGMRKPAFLSGEQKKAIVDLLFKTNRKVTVKQLKEDYFKKIECFDSVEISGVEDRFNASLGTYHDLLKIIKDKDFLDNEENEDILEDIVLTLTLFEDREMIEERLKTYAHLFDDKVMKQLKRRRYTGWGRLSRKLINGIRDKQSGKTILDFLKSDGFANRNFMQLIHDDSLTFKEDIQKAQVSGQGDSLHEHIANLAGSPAIKKGILQTVKVVDELVKVMGRHKPENIVIEMARENQTTQKGQKNSRERMKRIEEGIKELGSQILKEHPVENTQLQNEKLYLYYLQNGRDMYVDQELDINRLSDYDVDHIVPQSFLKDDSIDNKVLTRSDKARGKSDNVPSEEVVKKMKNYWRQLLNAKLITQRKFDNLTKAERGGLSELDKAGFIKRQLVETRQITKHVAQILDSRMNTKYDENDKLIREVKVITLKSKLVSDFRKDFQFYKVREINNYHHAHDAYLNAVVGTALIKKYPKLESEFVYGDYKVYDVRKMIAKSEQEIGKATAKYFFYSNIMNFFKTEITLANGEIRKRPLIETNGETGEIVWDKGRDFATVRKVLSMPQVNIVKKTEVQTGGFSKESILPKRNSDKLIARKKDWDPKKYGGFDSPTVAYSVLVVAKVEKGKSKKLKSVKELLGITIMERSSFEKNPIDFLEAKGYKEVKKDLIIKLPKYSLFELENGRKRMLASAGELQKGNELALPSKYVNFLYLASHYEKLKGSPEDNEQKQLFVEQHKHYLDEIIEQISEFSKRVILADANLDKVLSAYNKHRDKPIREQAENIIHLFTLTNLGAPAAFKYFDTTIDRKRYTSTKEVLDATLIHQSITGLYETRIDLSQLGGDGGGSSGSSGSSGSSGGIPWLMKKPLQLTTLVPLQEYEERLLKQTMLTGSYKEKLQSLFLKYDALWQHWENQVGHRRIKPHHIATGTVNPRPQKQYPINPKAKASIQTVINDLLKQGVLIQQNSIMNTPVYPVPKPDGKWRMVLDYREVNKTIPLIAAQNQHSAGILSSIFRGKYKTTLDLSNGFWAHSITPESYWLTAFTWLGQQYCWTRLPQGFLNSPALFNADVVDLLKEVPNVQVYVDDIYISHDDPREHLEQLEKVFSLLLNAGYVVSLKKSEIAQHEVEFLGFNITKEGRGLTETFKQKLLNITPPRDLKQLQSILGKLNFARNFIPNFSELVKPLYNIIATAPGKYITWTTDNSQQLQNIISMLNSAENLEERNPEVRLIMKVNTSPSAGYIRFYNEFAKRPIMYLNYVYTKAEVKFTNTEKLLTTIHKGLIKALDLGMGQEILVYSPIVSMTKIQKTPLPERKALPIRWITWMSYLEDPRIQFHYDKTLPELQQVPTVTDDIIAKIKHPSEFSMVFYTDGSAIKHPNVNKSHNAGMGIAQVQFKPEFTVINTWSIPLGDHTAQLAEVAAVEFACKKALKIDGPVLIVTDSFYVAESVNKELPYWQSNGFFNNKKKPLKHVSKWKSIADCIQLKPDIIIIHEKGHQPTASTFHTEGNNLADKLATQGSYVVNAGKRTADGSEFEKRTADGSEFESPKKKAKVE

SEQ ID NO: 587 - protein, 2085 aa, synthetic construct
MPAAKRVKLDGGDKKYSIGLDIGTNSVGWAVITDEYKVPSKKFKVLGNTDRHSIKKNLIGALLFDSGETAEATRLKRTARRRYTRRKNRICYLQEIFSNEMAKVDDSFFHRLEESFLVEEDKKHERHPIFGNIVDEVAYHEKYPTIYHLRKKLVDSTDKADLRLIYLALAHMIKFRGHFLIEGDLNPDNSDVDKLFIQLVQTYNQLFEENPINASGVDAKAILSARLSKSRRLENLIAQLPGEKKNGLFGNLIALSLGLTPNFKSNFDLAEDAKLQLSKDTYDDDLDNLLAQIGDQYADLFLAAKNLSDAILLSDILRVNTEITKAPLSASMIKRYDEHHQDLTLLKALVRQQLPEKYKEIFFDQSKNGYAGYIDGGASQEEFYKFIKPILEKMDGTEELLVKLNREDLLRKQRTFDNGSIPHQIHLGELHAILRRQEDFYPFLKDNREKIEKILTFRIPYYVGPLARGNSRFAWMTRKSEETITPWNFEEVVDKGASAQSFIERMTNFDKNLPNEKVLPKHSLLYEYFTVYNELTKVKYVTEGMRKPAFLSGEQKKAIVDLLFKTNRKVTVKQLKEDYFKKIECFDSVEISGVEDRFNASLGTYHDLLKIIKDKDFLDNEENEDILEDIVLTLTLFEDREMIEERLKTYAHLFDDKVMKQLKRRRYTGWGRLSRKLINGIRDKQSGKTILDFLKSDGFANRNFMQLIHDDSLTFKEDIQKAQVSGQGDSLHEHIANLAGSPAIKKGILQTVKVVDELVKVMGRHKPENIVIEMARENQTTQKGQKNSRERMKRIEEGIKELGSQILKEHPVENTQLQNEKLYLYYLQNGRDMYVDQELDINRLSDYDVDHIVPQSFLKDDSIDNKVLTRSDKARGKSDNVPSEEVVKKMKNYWRQLLNAKLITQRKFDNLTKAERGGLSELDKAGFIKRQLVETRQITKHVAQILDSRMNTKYDENDKLIREVKVITLKSKLVSDFRKDFQFYKVREINNYHHAHDAYLNAVVGTALIKKYPKLESEFVYGDYKVYDVRKMIAKSEQEIGKATAKYFFYSNIMNFFKTEITLANGEIRKRPLIETNGETGEIVWDKGRDFATVRKVLSMPQVNIVKKTEVQTGGFSKESILPKRNSDKLIARKKDWDPKKYGGFDSPTVAYSVLVVAKVEKGKSKKLKSVKELLGITIMERSSFEKNPIDFLEAKGYKEVKKDLIIKLPKYSLFELENGRKRMLASAGELQKGNELALPSKYVNFLYLASHYEKLKGSPEDNEQKQLFVEQHKHYLDEIIEQISEFSKRVILADANLDKVLSAYNKHRDKPIREQAENIIHLFTLTNLGAPAAFKYFDTTIDRKRYTSTKEVLDATLIHQSITGLYETRIDLSQLGGDGGGSSGGSGGGGGIPWLMKKPLQLTTLVPLQEYEERLLKQTMLTGSYKEKLQSLFLKYDALWQHWENQVGHRRIKPHHIATGTVNPRPQKQYPINPKAKASIQTVINDLLKQGVLIQQNSIMNTPVYPVPKPDGKWRMVLDYREVNKTIPLIAAQNQHSAGILSSIFRGKYKTTLDLSNGFWAHSITPESYWLTAFTWLGQQYCWTRLPQGFLNSPALFNADVVDLLKEVPNVQVYVDDIYISHDDPREHLEQLEKVFSLLLNAGYVVSLKKSEIAQHEVEFLGFNITKEGRGLTETFKQKLLNITPPRDLKQLQSILGKLNFARNFIPNFSELVKPLYNIIATAPGKYITWTTDNSQQLQNIISMLNSAENLEERNPEVRLIMKVNTSPSAGYIRFYNEFAKRPIMYLNYVYTKAEVKFTNTEKLLTTIHKGLIKALDLGMGQEILVYSPIVSMTKIQKTPLPERKALPIRWITWMSYLEDPRIQFHYDKTLPELQQVPTVTDDIIAKIKHPSEFSMVFYTDGSAIKHPNVNKSHNAGMGIAQVQFKPEFTVINTWSIPLGDHTAQLAEVAAVEFACKKALKIDGPVLIVTDSFYVAESVNKELPYWQSNGFFNNKKKPLKHVSKWKSIADCIQLKPDIIIIHEKGHQPTASTFHTEGNNLADKLATQGSYVVNAGKRTADGSEFEKRTADGSEFESPKKKAKVE

SEQ ID NO: 588 - protein, 2084 aa, synthetic construct
MPAAKRVKLDGGDKKYSIGLDIGTNSVGWAVITDEYKVPSKKFKVLGNTDRHSIKKNLIGALLFDSGETAEATRLKRTARRRYTRRKNRICYLQEIFSNEMAKVDDSFFHRLEESFLVEEDKKHERHPIFGNIVDEVAYHEKYPTIYHLRKKLVDSTDKADLRLIYLALAHMIKFRGHFLIEGDLNPDNSDVDKLFIQLVQTYNQLFEENPINASGVDAKAILSARLSKSRRLENLIAQLPGEKKNGLFGNLIALSLGLTPNFKSNFDLAEDAKLQLSKDTYDDDLDNLLAQIGDQYADLFLAAKNLSDAILLSDILRVNTEITKAPLSASMIKRYDEHHQDLTLLKALVRQQLPEKYKEIFFDQSKNGYAGYIDGGASQEEFYKFIKPILEKMDGTEELLVKLNREDLLRKQRTFDNGSIPHQIHLGELHAILRRQEDFYPFLKDNREKIEKILTFRIPYYVGPLARGNSRFAWMTRKSEETITPWNFEEVVDKGASAQSFIERMTNFDKNLPNEKVLPKHSLLYEYFTVYNELTKVKYVTEGMRKPAFLSGEQKKAIVDLLFKTNRKVTVKQLKEDYFKKIECFDSVEISGVEDRFNASLGTYHDLLKIIKDKDFLDNEENEDILEDIVLTLTLFEDREMIEERLKTYAHLFDDKVMKQLKRRRYTGWGRLSRKLINGIRDKQSGKTILDFLKSDGFANRNFMQLIHDDSLTFKEDIQKAQVSGQGDSLHEHIANLAGSPAIKKGILQTVKVVDELVKVMGRHKPENIVIEMARENQTTQKGQKNSRERMKRIEEGIKELGSQILKEHPVENTQLQNEKLYLYYLQNGRDMYVDQELDINRLSDYDVDHIVPQSFLKDDSIDNKVLTRSDKARGKSDNVPSEEVVKKMKNYWRQLLNAKLITQRKFDNLTKAERGGLSELDKAGFIKRQLVETRQITKHVAQILDSRMNTKYDENDKLIREVKVITLKSKLVSDFRKDFQFYKVREINNYHHAHDAYLNAVVGTALIKKYPKLESEFVYGDYKVYDVRKMIAKSEQEIGKATAKYFFYSNIMNFFKTEITLANGEIRKRPLIETNGETGEIVWDKGRDFATVRKVLSMPQVNIVKKTEVQTGGFSKESILPKRNSDKLIARKKDWDPKKYGGFDSPTVAYSVLVVAKVEKGKSKKLKSVKELLGITIMERSSFEKNPIDFLEAKGYKEVKKDLIIKLPKYSLFELENGRKRMLASAGELQKGNELALPSKYVNFLYLASHYEKLKGSPEDNEQKQLFVEQHKHYLDEIIEQISEFSKRVILADANLDKVLSAYNKHRDKPIREQAENIIHLFTLTNLGAPAAFKYFDTTIDRKRYTSTKEVLDATLIHQSITGLYETRIDLSQLGGDGGGGGEAAAKGGIPWLMKKPLQLTTLVPLQEYEERLLKQTMLTGSYKEKLQSLFLKYDALWQHWENQVGHRRIKPHHIATGTVNPRPQKQYPINPKAKASIQTVINDLLKQGVLIQQNSIMNTPVYPVPKPDGKWRMVLDYREVNKTIPLIAAQNQHSAGILSSIFRGKYKTTLDLSNGFWAHSITPESYWLTAFTWLGQQYCWTRLPQGFLNSPALFNADVVDLLKEVPNVQVYVDDIYISHDDPREHLEQLEKVFSLLLNAGYVVSLKKSEIAQHEVEFLGFNITKEGRGLTETFKQKLLNITPPRDLKQLQSILGKLNFARNFIPNFSELVKPLYNIIATAPGKYITWTTDNSQQLQNIISMLNSAENLEERNPEVRLIMKVNTSPSAGYIRFYNEFAKRPIMYLNYVYTKAEVKFTNTEKLLTTIHKGLIKALDLGMGQEILVYSPIVSMTKIQKTPLPERKALPIRWITWMSYLEDPRIQFHYDKTLPELQQVPTVTDDIIAKIKHPSEFSMVFYTDGSAIKHPNVNKSHNAGMGIAQVQFKPEFTVINTWSIPLGDHTAQLAEVAAVEFACKKALKIDGPVLIVTDSFYVAESVNKELPYWQSNGFFNNKKKPLKHVSKWKSIADCIQLKPDIIIIHEKGHQPTASTFHTEGNNLADKLATQGSYVVNAGKRTADGSEFEKRTADGSEFESPKKKAKVE

SEQ ID NO: 589 - protein, 2085 aa, synthetic construct
MPAAKRVKLDGGDKKYSIGLDIGTNSVGWAVITDEYKVPSKKFKVLGNTDRHSIKKNLIGALLFDSGETAEATRLKRTARRRYTRRKNRICYLQEIFSNEMAKVDDSFFHRLEESFLVEEDKKHERHPIFGNIVDEVAYHEKYPTIYHLRKKLVDSTDKADLRLIYLALAHMIKFRGHFLIEGDLNPDNSDVDKLFIQLVQTYNQLFEENPINASGVDAKAILSARLSKSRRLENLIAQLPGEKKNGLFGNLIALSLGLTPNFKSNFDLAEDAKLQLSKDTYDDDLDNLLAQIGDQYADLFLAAKNLSDAILLSDILRVNTEITKAPLSASMIKRYDEHHQDLTLLKALVRQQLPEKYKEIFFDQSKNGYAGYIDGGASQEEFYKFIKPILEKMDGTEELLVKLNREDLLRKQRTFDNGSIPHQIHLGELHAILRRQEDFYPFLKDNREKIEKILTFRIPYYVGPLARGNSRFAWMTRKSEETITPWNFEEVVDKGASAQSFIERMTNFDKNLPNEKVLPKHSLLYEYFTVYNELTKVKYVTEGMRKPAFLSGEQKKAIVDLLFKTNRKVTVKQLKEDYFKKIECFDSVEISGVEDRFNASLGTYHDLLKIIKDKDFLDNEENEDILEDIVLTLTLFEDREMIEERLKTYAHLFDDKVMKQLKRRRYTGWGRLSRKLINGIRDKQSGKTILDFLKSDGFANRNFMQLIHDDSLTFKEDIQKAQVSGQGDSLHEHIANLAGSPAIKKGILQTVKVVDELVKVMGRHKPENIVIEMARENQTTQKGQKNSRERMKRIEEGIKELGSQILKEHPVENTQLQNEKLYLYYLQNGRDMYVDQELDINRLSDYDVDHIVPQSFLKDDSIDNKVLTRSDKARGKSDNVPSEEVVKKMKNYWRQLLNAKLITQRKFDNLTKAERGGLSELDKAGFIKRQLVETRQITKHVAQILDSRMNTKYDENDKLIREVKVITLKSKLVSDFRKDFQFYKVREINNYHHAHDAYLNAVVGTALIKKYPKLESEFVYGDYKVYDVRKMIAKSEQEIGKATAKYFFYSNIMNFFKTEITLANGEIRKRPLIETNGETGEIVWDKGRDFATVRKVLSMPQVNIVKKTEVQTGGFSKESILPKRNSDKLIARKKDWDPKKYGGFDSPTVAYSVLVVAKVEKGKSKKLKSVKELLGITIMERSSFEKNPIDFLEAKGYKEVKKDLIIKLPKYSLFELENGRKRMLASAGELQKGNELALPSKYVNFLYLASHYEKLKGSPEDNEQKQLFVEQHKHYLDEIIEQISEFSKRVILADANLDKVLSAYNKHRDKPIREQAENIIHLFTLTNLGAPAAFKYFDTTIDRKRYTSTKEVLDATLIHQSITGLYETRIDLSQLGGDGGGGSGSSPAPGGIPWLMKKPLQLTTLVPLQEYEERLLKQTMLTGSYKEKLQSLFLKYDALWQHWENQVGHRRIKPHHIATGTVNPRPQKQYPINPKAKASIQTVINDLLKQGVLIQQNSIMNTPVYPVPKPDGKWRMVLDYREVNKTIPLIAAQNQHSAGILSSIFRGKYKTTLDLSNGFWAHSITPESYWLTAFTWLGQQYCWTRLPQGFLNSPALFNADVVDLLKEVPNVQVYVDDIYISHDDPREHLEQLEKVFSLLLNAGYVVSLKKSEIAQHEVEFLGFNITKEGRGLTETFKQKLLNITPPRDLKQLQSILGKLNFARNFIPNFSELVKPLYNIIATAPGKYITWTTDNSQQLQNIISMLNSAENLEERNPEVRLIMKVNTSPSAGYIRFYNEFAKRPIMYLNYVYTKAEVKFTNTEKLLTTIHKGLIKALDLGMGQEILVYSPIVSMTKIQKTPLPERKALPIRWITWMSYLEDPRIQFHYDKTLPELQQVPTVTDDIIAKIKHPSEFSMVFYTDGSAIKHPNVNKSHNAGMGIAQVQFKPEFTVINTWSIPLGDHTAQLAEVAAVEFACKKALKIDGPVLIVTDSFYVAESVNKELPYWQSNGFFNNKKKPLKHVSKWKSIADCIQLKPDIIIIHEKGHQPTASTFHTEGNNLADKLATQGSYVVNAGKRTADGSEFEKRTADGSEFESPKKKAKVE

SEQ ID NO: 590 - protein, 2195 aa, synthetic construct
MPAAKRVKLDGGDKKYSIGLDIGTNSVGWAVITDEYKVPSKKFKVLGNTDRHSIKKNLIGALLFDSGETAEATRLKRTARRRYTRRKNRICYLQEIFSNEMAKVDDSFFHRLEESFLVEEDKKHERHPIFGNIVDEVAYHEKYPTIYHLRKKLVDSTDKADLRLIYLALAHMIKFRGHFLIEGDLNPDNSDVDKLFIQLVQTYNQLFEENPINASGVDAKAILSARLSKSRRLENLIAQLPGEKKNGLFGNLIALSLGLTPNFKSNFDLAEDAKLQLSKDTYDDDLDNLLAQIGDQYADLFLAAKNLSDAILLSDILRVNTEITKAPLSASMIKRYDEHHQDLTLLKALVRQQLPEKYKEIFFDQSKNGYAGYIDGGASQEEFYKFIKPILEKMDGTEELLVKLNREDLLRKQRTFDNGSIPHQIHLGELHAILRRQEDFYPFLKDNREKIEKILTFRIPYYVGPLARGNSRFAWMTRKSEETITPWNFEEVVDKGASAQSFIERMTNFDKNLPNEKVLPKHSLLYEYFTVYNELTKVKYVTEGMRKPAFLSGEQKKAIVDLLFKTNRKVTVKQLKEDYFKKIECFDSVEISGVEDRFNASLGTYHDLLKIIKDKDFLDNEENEDILEDIVLTLTLFEDREMIEERLKTYAHLFDDKVMKQLKRRRYTGWGRLSRKLINGIRDKQSGKTILDFLKSDGFANRNFMQLIHDDSLTFKEDIQKAQVSGQGDSLHEHIANLAGSPAIKKGILQTVKVVDELVKVMGRHKPENIVIEMARENQTTQKGQKNSRERMKRIEEGIKELGSQILKEHPVENTQLQNEKLYLYYLQNGRDMYVDQELDINRLSDYDVDHIVPQSFLKDDSIDNKVLTRSDKARGKSDNVPSEEVVKKMKNYWRQLLNAKLITQRKFDNLTKAERGGLSELDKAGFIKRQLVETRQITKHVAQILDSRMNTKYDENDKLIREVKVITLKSKLVSDFRKDFQFYKVREINNYHHAHDAYLNAVVGTALIKKYPKLESEFVYGDYKVYDVRKMIAKSEQEIGKATAKYFFYSNIMNFFKTEITLANGEIRKRPLIETNGETGEIVWDKGRDFATVRKVLSMPQVNIVKKTEVQTGGFSKESILPKRNSDKLIARKKDWDPKKYGGFDSPTVAYSVLVVAKVEKGKSKKLKSVKELLGITIMERSSFEKNPIDFLEAKGYKEVKKDLIIKLPKYSLFELENGRKRMLASAGELQKGNELALPSKYVNFLYLASHYEKLKGSPEDNEQKQLFVEQHKHYLDEIIEQISEFSKRVILADANLDKVLSAYNKHRDKPIREQAENIIHLFTLTNLGAPAAFKYFDTTIDRKRYTSTKEVLDATLIHQSITGLYETRIDLSQLGGDGGEAAAKEAAAKEAAAKEAAAKEAAAKEAAAKGGMDPLQLLQPLEAEIKGTKLKAHWNSGATITCVPQAFLEEEVPIKNIWIKTIHGEKEQPVYYLTFKIQGRKVEAEVISSPYDYILVSPSDIPWLMKKPLQLTTLVPLQEYEERLLKQTMLTGSYKEKLQSLFLKYDALWQHWENQVGHRRIKPHHIATGTVNPRPQKQYPINPKAKASIQTVINDLLKQGVLIQQNSIMNTPVYPVPKPDGKWRMVLDYREVNKTIPLIAAQNQHSAGILSSIFRGKYKTTLDLSNGFWAHSITPESYWLTAFTWLGQQYCWTRLPQGFLNSPALFNADVVDLLKEVPNVQVYVDDIYISHDDPREHLEQLEKVFSLLLNAGYVVSLKKSEIAQHEVEFLGFNITKEGRGLTETFKQKLLNITPPRDLKQLQSILGLLNFARNFIPNFSELVKPLYNIIATAPGKYITWTTDNSQQLQNIISMLNSAENLEERNPEVRLIMKVNTSPSAGYIRFYNEFAKRPIMYLNYVYTKAEVKFTNTEKLLTTIHKGLIKALDLGMGQEILVYSPIVSMTKIQKTPLPERKALPIRWITWMSYLEDPRIQFHYDKTLPELQQVPTVTDDIIAKIKHPSEFSMVFYTDGSAIKHPNVNKSHNAGMGIAQVQFKPEFTVINTWSIPLGDHTAQLAEVAAVEFACKKALKIDGPVLIVTDSFYVAESVNKELPYWQSNGFFNNKKKPLKHVSKWKSIADCIQLKPDIIIIHEKGHQPTASTFHTEGNNLADKLATQGSYVVNAGKRTADGSEFEKRTADGSEFESPKKKAKVE

SEQ ID NO: 591 - protein, 2211 aa, synthetic construct
MPAAKRVKLDGGDKKYSIGLDIGTNSVGWAVITDEYKVPSKKFKVLGNTDRHSIKKNLIGALLFDSGETAEATRLKRTARRRYTRRKNRICYLQEIFSNEMAKVDDSFFHRLEESFLVEEDKKHERHPIFGNIVDEVAYHEKYPTIYHLRKKLVDSTDKADLRLIYLALAHMIKFRGHFLIEGDLNPDNSDVDKLFIQLVQTYNQLFEENPINASGVDAKAILSARLSKSRRLENLIAQLPGEKKNGLFGNLIALSLGLTPNFKSNFDLAEDAKLQLSKDTYDDDLDNLLAQIGDQYADLFLAAKNLSDAILLSDILRVNTEITKAPLSASMIKRYDEHHQDLTLLKALVRQQLPEKYKEIFFDQSKNGYAGYIDGGASQEEFYKFIKPILEKMDGTEELLVKLNREDLLRKQRTFDNGSIPHQIHLGELHAILRRQEDFYPFLKDNREKIEKILTFRIPYYVGPLARGNSRFAWMTRKSEETITPWNFEEVVDKGASAQSFIERMTNFDKNLPNEKVLPKHSLLYEYFTVYNELTKVKYVTEGMRKPAFLSGEQKKAIVDLLFKTNRKVTVKQLKEDYFKKIECFDSVEISGVEDRFNASLGTYHDLLKIIKDKDFLDNEENEDILEDIVLTLTLFEDREMIEERLKTYAHLFDDKVMKQLKRRRYTGWGRLSRKLINGIRDKQSGKTILDFLKSDGFANRNFMQLIHDDSLTFKEDIQKAQVSGQGDSLHEHIANLAGSPAIKKGILQTVKVVDELVKVMGRHKPENIVIEMARENQTTQKGQKNSRERMKRIEEGIKELGSQILKEHPVENTQLQNEKLYLYYLQNGRDMYVDQELDINRLSDYDVDHIVPQSFLKDDSIDNKVLTRSDKARGKSDNVPSEEVVKKMKNYWRQLLNAKLITQRKFDNLTKAERGGLSELDKAGFIKRQLVETRQITKHVAQILDSRMNTKYDENDKLIREVKVITLKSKLVSDFRKDFQFYKVREINNYHHAHDAYLNAVVGTALIKKYPKLESEFVYGDYKVYDVRKMIAKSEQEIGKATAKYFFYSNIMNFFKTEITLANGEIRKRPLIETNGETGEIVWDKGRDFATVRKVLSMPQVNIVKKTEVQTGGFSKESILPKRNSDKLIARKKDWDPKKYGGFDSPTVAYSVLVVAKVEKGKSKKLKSVKELLGITIMERSSFEKNPIDFLEAKGYKEVKKDLIIKLPKYSLFELENGRKRMLASAGELQKGNELALPSKYVNFLYLASHYEKLKGSPEDNEQKQLFVEQHKHYLDEIIEQISEFSKRVILADANLDKVLSAYNKHRDKPIREQAENIIHLFTLTNLGAPAAFKYFDTTIDRKRYTSTKEVLDATLIHQSITGLYETRIDLSQLGGDGGAEAAAKEAAAKEAAAKEAAAKALEAEAAAKEAAAKEAAAKEAAAKAGGMDPLQLLQPLEAEIKGTKLKAHWNSGATITCVPQAFLEEEVPIKNIWIKTIHGEKEQPVYYLTFKIQGRKVEAEVISSPYDYILVSPSDIPWLMKKPLQLTTLVPLQEYEERLLKQTMLTGSYKEKLQSLFLKYDALWQHWENQVGHRRIKPHHIATGTVNPRPQKQYPINPKAKASIQTVINDLLKQGVLIQQNSIMNTPVYPVPKPDGKWRMVLDYREVNKTIPLIAAQNQHSAGILSSIFRGKYKTTLDLSNGFWAHSITPESYWLTAFTWLGQQYCWTRLPQGFLNSPALFNADVVDLLKEVPNVQVYVDDIYISHDDPREHLEQLEKVFSLLLNAGYVVSLKKSEIAQHEVEFLGFNITKEGRGLTETFKQKLLNITPPRDLKQLQSILGLLNFARNFIPNFSELVKPLYNIIATAPGKYITWTTDNSQQLQNIISMLNSAENLEERNPEVRLIMKVNTSPSAGYIRFYNEFAKRPIMYLNYVYTKAEVKFTNTEKLLTTIHKGLIKALDLGMGQEILVYSPIVSMTKIQKTPLPERKALPIRWITWMSYLEDPRIQFHYDKTLPELQQVPTVTDDIIAKIKHPSEFSMVFYTDGSAIKHPNVNKSHNAGMGIAQVQFKPEFTVINTWSIPLGDHTAQLAEVAAVEFACKKALKIDGPVLIVTDSFYVAESVNKELPYWQSNGFFNNKKKPLKHVSKWKSIADCIQLKPDIIIIHEKGHQPTASTFHTEGNNLADKLATQGSYVVNAGKRTADGSEFEKRTADGSEFESPKKKAKVE

SEQ ID NO: 592 - protein, 2195 aa, synthetic construct
MPAAKRVKLDGGDKKYSIGLDIGTNSVGWAVITDEYKVPSKKFKVLGNTDRHSIKKNLIGALLFDSGETAEATRLKRTARRRYTRRKNRICYLQEIFSNEMAKVDDSFFHRLEESFLVEEDKKHERHPIFGNIVDEVAYHEKYPTIYHLRKKLVDSTDKADLRLIYLALAHMIKFRGHFLIEGDLNPDNSDVDKLFIQLVQTYNQLFEENPINASGVDAKAILSARLSKSRRLENLIAQLPGEKKNGLFGNLIALSLGLTPNFKSNFDLAEDAKLQLSKDTYDDDLDNLLAQIGDQYADLFLAAKNLSDAILLSDILRVNTEITKAPLSASMIKRYDEHHQDLTLLKALVRQQLPEKYKEIFFDQSKNGYAGYIDGGASQEEFYKFIKPILEKMDGTEELLVKLNREDLLRKQRTFDNGSIPHQIHLGELHAILRRQEDFYPFLKDNREKIEKILTFRIPYYVGPLARGNSRFAWMTRKSEETITPWNFEEVVDKGASAQSFIERMTNFDKNLPNEKVLPKHSLLYEYFTVYNELTKVKYVTEGMRKPAFLSGEQKKAIVDLLFKTNRKVTVKQLKEDYFKKIECFDSVEISGVEDRFNASLGTYHDLLKIIKDKDFLDNEENEDILEDIVLTLTLFEDREMIEERLKTYAHLFDDKVMKQLKRRRYTGWGRLSRKLINGIRDKQSGKTILDFLKSDGFANRNFMQLIHDDSLTFKEDIQKAQVSGQGDSLHEHIANLAGSPAIKKGILQTVKVVDELVKVMGRHKPENIVIEMARENQTTQKGQKNSRERMKRIEEGIKELGSQILKEHPVENTQLQNEKLYLYYLQNGRDMYVDQELDINRLSDYDVDHIVPQSFLKDDSIDNKVLTRSDKARGKSDNVPSEEVVKKMKNYWRQLLNAKLITQRKFDNLTKAERGGLSELDKAGFIKRQLVETRQITKHVAQILDSRMNTKYDENDKLIREVKVITLKSKLVSDFRKDFQFYKVREINNYHHAHDAYLNAVVGTALIKKYPKLESEFVYGDYKVYDVRKMIAKSEQEIGKATAKYFFYSNIMNFFKTEITLANGEIRKRPLIETNGETGEIVWDKGRDFATVRKVLSMPQVNIVKKTEVQTGGFSKESILPKRNSDKLIARKKDWDPKKYGGFDSPTVAYSVLVVAKVEKGKSKKLKSVKELLGITIMERSSFEKNPIDFLEAKGYKEVKKDLIIKLPKYSLFELENGRKRMLASAGELQKGNELALPSKYVNFLYLASHYEKLKGSPEDNEQKQLFVEQHKHYLDEIIEQISEFSKRVILADANLDKVLSAYNKHRDKPIREQAENIIHLFTLTNLGAPAAFKYFDTTIDRKRYTSTKEVLDATLIHQSITGLYETRIDLSQLGGDGGGGGGSGGGGSGGGGSGGGGSGGGGSGGGGSGGMDPLQLLQPLEAEIKGTKLKAHWNSGATITCVPQAFLEEEVPIKNIWIKTIHGEKEQPVYYLTFKIQGRKVEAEVISSPYDYILVSPSDIPWLMKKPLQLTTLVPLQEYEERLLKQTMLTGSYKEKLQSLFLKYDALWQHWENQVGHRRIKPHHIATGTVNPRPQKQYPINPKAKASIQTVINDLLKQGVLIQQNSIMNTPVYPVPKPDGKWRMVLDYREVNKTIPLIAAQNQHSAGILSSIFRGKYKTTLDLSNGFWAHSITPESYWLTAFTWLGQQYCWTRLPQGFLNSPALFNADVVDLLKEVPNVQVYVDDIYISHDDPREHLEQLEKVFSLLLNAGYVVSLKKSEIAQHEVEFLGFNITKEGRGLTETFKQKLLNITPPRDLKQLQSILGLLNFARNFIPNFSELVKPLYNIIATAPGKYITWTTDNSQQLQNIISMLNSAENLEERNPEVRLIMKVNTSPSAGYIRFYNEFAKRPIMYLNYVYTKAEVKFTNTEKLLTTIHKGLIKALDLGMGQEILVYSPIVSMTKIQKTPLPERKALPIRWITWMSYLEDPRIQFHYDKTLPELQQVPTVTDDIIAKIKHPSEFSMVFYTDGSAIKHPNVNKSHNAGMGIAQVQFKPEFTVINTWSIPLGDHTAQLAEVAAVEFACKKALKIDGPVLIVTDSFYVAESVNKELPYWQSNGFFNNKKKPLKHVSKWKSIADCIQLKPDIIIIHEKGHQPTASTFHTEGNNLADKLATQGSYVVNAGKRTADGSEFEKRTADGSEFESPKKKAKVE

SEQ ID NO: 593 - protein, 2190 aa, synthetic construct
MPAAKRVKLDGGDKKYSIGLDIGTNSVGWAVITDEYKVPSKKFKVLGNTDRHSIKKNLIGALLFDSGETAEATRLKRTARRRYTRRKNRICYLQEIFSNEMAKVDDSFFHRLEESFLVEEDKKHERHPIFGNIVDEVAYHEKYPTIYHLRKKLVDSTDKADLRLIYLALAHMIKFRGHFLIEGDLNPDNSDVDKLFIQLVQTYNQLFEENPINASGVDAKAILSARLSKSRRLENLIAQLPGEKKNGLFGNLIALSLGLTPNFKSNFDLAEDAKLQLSKDTYDDDLDNLLAQIGDQYADLFLAAKNLSDAILLSDILRVNTEITKAPLSASMIKRYDEHHQDLTLLKALVRQQLPEKYKEIFFDQSKNGYAGYIDGGASQEEFYKFIKPILEKMDGTEELLVKLNREDLLRKQRTFDNGSIPHQIHLGELHAILRRQEDFYPFLKDNREKIEKILTFRIPYYVGPLARGNSRFAWMTRKSEETITPWNFEEVVDKGASAQSFIERMTNFDKNLPNEKVLPKHSLLYEYFTVYNELTKVKYVTEGMRKPAFLSGEQKKAIVDLLFKTNRKVTVKQLKEDYFKKIECFDSVEISGVEDRFNASLGTYHDLLKIIKDKDFLDNEENEDILEDIVLTLTLFEDREMIEERLKTYAHLFDDKVMKQLKRRRYTGWGRLSRKLINGIRDKQSGKTILDFLKSDGFANRNFMQLIHDDSLTFKEDIQKAQVSGQGDSLHEHIANLAGSPAIKKGILQTVKVVDELVKVMGRHKPENIVIEMARENQTTQKGQKNSRERMKRIEEGIKELGSQILKEHPVENTQLQNEKLYLYYLQNGRDMYVDQELDINRLSDYDVDHIVPQSFLKDDSIDNKVLTRSDKARGKSDNVPSEEVVKKMKNYWRQLLNAKLITQRKFDNLTKAERGGLSELDKAGFIKRQLVETRQITKHVAQILDSRMNTKYDENDKLIREVKVITLKSKLVSDFRKDFQFYKVREINNYHHAHDAYLNAVVGTALIKKYPKLESEFVYGDYKVYDVRKMIAKSEQEIGKATAKYFFYSNIMNFFKTEITLANGEIRKRPLIETNGETGEIVWDKGRDFATVRKVLSMPQVNIVKKTEVQTGGFSKESILPKRNSDKLIARKKDWDPKKYGGFDSPTVAYSVLVVAKVEKGKSKKLKSVKELLGITIMERSSFEKNPIDFLEAKGYKEVKKDLIIKLPKYSLFELENGRKRMLASAGELQKGNELALPSKYVNFLYLASHYEKLKGSPEDNEQKQLFVEQHKHYLDEIIEQISEFSKRVILADANLDKVLSAYNKHRDKPIREQAENIIHLFTLTNLGAPAAFKYFDTTIDRKRYTSTKEVLDATLIHQSITGLYETRIDLSQLGGDGGEAAAKEAAAKEAAAKEAAAKEAAAKGGMDPLQLLQPLEAEIKGTKLKAHWNSGATITCVPQAFLEEEVPIKNIWIKTIHGEKEQPVYYLTFKIQGRKVEAEVISSPYDYILVSPSDIPWLMKKPLQLTTLVPLQEYEERLLKQTMLTGSYKEKLQSLFLKYDALWQHWENQVGHRRIKPHHIATGTVNPRPQKQYPINPKAKASIQTVINDLLKQGVLIQQNSIMNTPVYPVPKPDGKWRMVLDYREVNKTIPLIAAQNQHSAGILSSIFRGKYKTTLDLSNGFWAHSITPESYWLTAFTWLGQQYCWTRLPQGFLNSPALFNADVVDLLKEVPNVQVYVDDIYISHDDPREHLEQLEKVFSLLLNAGYVVSLKKSEIAQHEVEFLGFNITKEGRGLTETFKQKLLNITPPRDLKQLQSILGLLNFARNFIPNFSELVKPLYNIIATAPGKYITWTTDNSQQLQNIISMLNSAENLEERNPEVRLIMKVNTSPSAGYIRFYNEFAKRPIMYLNYVYTKAEVKFTNTEKLLTTIHKGLIKALDLGMGQEILVYSPIVSMTKIQKTPLPERKALPIRWITWMSYLEDPRIQFHYDKTLPELQQVPTVTDDIIAKIKHPSEFSMVFYTDGSAIKHPNVNKSHNAGMGIAQVQFKPEFTVINTWSIPLGDHTAQLAEVAAVEFACKKALKIDGPVLIVTDSFYVAESVNKELPYWQSNGFFNNKKKPLKHVSKWKSIADCIQLKPDIIIIHEKGHQPTASTFHTEGNNLADKLATQGSYVVNAGKRTADGSEFEKRTADGSEFESPKKKAKVE

SEQ ID NO: 594 - protein, 2174 aa, synthetic construct
MPAAKRVKLDGGDKKYSIGLDIGTNSVGWAVITDEYKVPSKKFKVLGNTDRHSIKKNLIGALLFDSGETAEATRLKRTARRRYTRRKNRICYLQEIFSNEMAKVDDSFFHRLEESFLVEEDKKHERHPIFGNIVDEVAYHEKYPTIYHLRKKLVDSTDKADLRLIYLALAHMIKFRGHFLIEGDLNPDNSDVDKLFIQLVQTYNQLFEENPINASGVDAKAILSARLSKSRRLENLIAQLPGEKKNGLFGNLIALSLGLTPNFKSNFDLAEDAKLQLSKDTYDDDLDNLLAQIGDQYADLFLAAKNLSDAILLSDILRVNTEITKAPLSASMIKRYDEHHQDLTLLKALVRQQLPEKYKEIFFDQSKNGYAGYIDGGASQEEFYKFIKPILEKMDGTEELLVKLNREDLLRKQRTFDNGSIPHQIHLGELHAILRRQEDFYPFLKDNREKIEKILTFRIPYYVGPLARGNSRFAWMTRKSEETITPWNFEEVVDKGASAQSFIERMTNFDKNLPNEKVLPKHSLLYEYFTVYNELTKVKYVTEGMRKPAFLSGEQKKAIVDLLFKTNRKVTVKQLKEDYFKKIECFDSVEISGVEDRFNASLGTYHDLLKIIKDKDFLDNEENEDILEDIVLTLTLFEDREMIEERLKTYAHLFDDKVMKQLKRRRYTGWGRLSRKLINGIRDKQSGKTILDFLKSDGFANRNFMQLIHDDSLTFKEDIQKAQVSGQGDSLHEHIANLAGSPAIKKGILQTVKVVDELVKVMGRHKPENIVIEMARENQTTQKGQKNSRERMKRIEEGIKELGSQILKEHPVENTQLQNEKLYLYYLQNGRDMYVDQELDINRLSDYDVDHIVPQSFLKDDSIDNKVLTRSDKARGKSDNVPSEEVVKKMKNYWRQLLNAKLITQRKFDNLTKAERGGLSELDKAGFIKRQLVETRQITKHVAQILDSRMNTKYDENDKLIREVKVITLKSKLVSDFRKDFQFYKVREINNYHHAHDAYLNAVVGTALIKKYPKLESEFVYGDYKVYDVRKMIAKSEQEIGKATAKYFFYSNIMNFFKTEITLANGEIRKRPLIETNGETGEIVWDKGRDFATVRKVLSMPQVNIVKKTEVQTGGFSKESILPKRNSDKLIARKKDWDPKKYGGFDSPTVAYSVLVVAKVEKGKSKKLKSVKELLGITIMERSSFEKNPIDFLEAKGYKEVKKDLIIKLPKYSLFELENGRKRMLASAGELQKGNELALPSKYVNFLYLASHYEKLKGSPEDNEQKQLFVEQHKHYLDEIIEQISEFSKRVILADANLDKVLSAYNKHRDKPIREQAENIIHLFTLTNLGAPAAFKYFDTTIDRKRYTSTKEVLDATLIHQSITGLYETRIDLSQLGGDGGGGGPAPGGSGGMDPLQLLQPLEAEIKGTKLKAHWNSGATITCVPQAFLEEEVPIKNIWIKTIHGEKEQPVYYLTFKIQGRKVEAEVISSPYDYILVSPSDIPWLMKKPLQLTTLVPLQEYEERLLKQTMLTGSYKEKLQSLFLKYDALWQHWENQVGHRRIKPHHIATGTVNPRPQKQYPINPKAKASIQTVINDLLKQGVLIQQNSIMNTPVYPVPKPDGKWRMVLDYREVNKTIPLIAAQNQHSAGILSSIFRGKYKTTLDLSNGFWAHSITPESYWLTAFTWLGQQYCWTRLPQGFLNSPALFNADVVDLLKEVPNVQVYVDDIYISHDDPREHLEQLEKVFSLLLNAGYVVSLKKSEIAQHEVEFLGFNITKEGRGLTETFKQKLLNITPPRDLKQLQSILGLLNFARNFIPNFSELVKPLYNIIATAPGKYITWTTDNSQQLQNIISMLNSAENLEERNPEVRLIMKVNTSPSAGYIRFYNEFAKRPIMYLNYVYTKAEVKFTNTEKLLTTIHKGLIKALDLGMGQEILVYSPIVSMTKIQKTPLPERKALPIRWITWMSYLEDPRIQFHYDKTLPELQQVPTVTDDIIAKIKHPSEFSMVFYTDGSAIKHPNVNKSHNAGMGIAQVQFKPEFTVINTWSIPLGDHTAQLAEVAAVEFACKKALKIDGPVLIVTDSFYVAESVNKELPYWQSNGFFNNKKKPLKHVSKWKSIADCIQLKPDIIIIHEKGHQPTASTFHTEGNNLADKLATQGSYVVNAGKRTADGSEFEKRTADGSEFESPKKKAKVE

SEQ ID NO: 595 - protein, 2176 aa, synthetic construct
MPAAKRVKLDGGDKKYSIGLDIGTNSVGWAVITDEYKVPSKKFKVLGNTDRHSIKKNLIGALLFDSGETAEATRLKRTARRRYTRRKNRICYLQEIFSNEMAKVDDSFFHRLEESFLVEEDKKHERHPIFGNIVDEVAYHEKYPTIYHLRKKLVDSTDKADLRLIYLALAHMIKFRGHFLIEGDLNPDNSDVDKLFIQLVQTYNQLFEENPINASGVDAKAILSARLSKSRRLENLIAQLPGEKKNGLFGNLIALSLGLTPNFKSNFDLAEDAKLQLSKDTYDDDLDNLLAQIGDQYADLFLAAKNLSDAILLSDILRVNTEITKAPLSASMIKRYDEHHQDLTLLKALVRQQLPEKYKEIFFDQSKNGYAGYIDGGASQEEFYKFIKPILEKMDGTEELLVKLNREDLLRKQRTFDNGSIPHQIHLGELHAILRRQEDFYPFLKDNREKIEKILTFRIPYYVGPLARGNSRFAWMTRKSEETITPWNFEEVVDKGASAQSFIERMTNFDKNLPNEKVLPKHSLLYEYFTVYNELTKVKYVTEGMRKPAFLSGEQKKAIVDLLFKTNRKVTVKQLKEDYFKKIECFDSVEISGVEDRFNASLGTYHDLLKIIKDKDFLDNEENEDILEDIVLTLTLFEDREMIEERLKTYAHLFDDKVMKQLKRRRYTGWGRLSRKLINGIRDKQSGKTILDFLKSDGFANRNFMQLIHDDSLTFKEDIQKAQVSGQGDSLHEHIANLAGSPAIKKGILQTVKVVDELVKVMGRHKPENIVIEMARENQTTQKGQKNSRERMKRIEEGIKELGSQILKEHPVENTQLQNEKLYLYYLQNGRDMYVDQELDINRLSDYDVDHIVPQSFLKDDSIDNKVLTRSDKARGKSDNVPSEEVVKKMKNYWRQLLNAKLITQRKFDNLTKAERGGLSELDKAGFIKRQLVETRQITKHVAQILDSRMNTKYDENDKLIREVKVITLKSKLVSDFRKDFQFYKVREINNYHHAHDAYLNAVVGTALIKKYPKLESEFVYGDYKVYDVRKMIAKSEQEIGKATAKYFFYSNIMNFFKTEITLANGEIRKRPLIETNGETGEIVWDKGRDFATVRKVLSMPQVNIVKKTEVQTGGFSKESILPKRNSDKLIARKKDWDPKKYGGFDSPTVAYSVLVVAKVEKGKSKKLKSVKELLGITIMERSSFEKNPIDFLEAKGYKEVKKDLIIKLPKYSLFELENGRKRMLASAGELQKGNELALPSKYVNFLYLASHYEKLKGSPEDNEQKQLFVEQHKHYLDEIIEQISEFSKRVILADANLDKVLSAYNKHRDKPIREQAENIIHLFTLTNLGAPAAFKYFDTTIDRKRYTSTKEVLDATLIHQSITGLYETRIDLSQLGGDGGGGSEAAAKPAPGGMDPLQLLQPLEAEIKGTKLKAHWNSGATITCVPQAFLEEEVPIKNIWIKTIHGEKEQPVYYLTFKIQGRKVEAEVISSPYDYILVSPSDIPWLMKKPLQLTTLVPLQEYEERLLKQTMLTGSYKEKLQSLFLKYDALWQHWENQVGHRRIKPHHIATGTVNPRPQKQYPINPKAKASIQTVINDLLKQGVLIQQNSIMNTPVYPVPKPDGKWRMVLDYREVNKTIPLIAAQNQHSAGILSSIFRGKYKTTLDLSNGFWAHSITPESYWLTAFTWLGQQYCWTRLPQGFLNSPALFNADVVDLLKEVPNVQVYVDDIYISHDDPREHLEQLEKVFSLLLNAGYVVSLKKSEIAQHEVEFLGFNITKEGRGLTETFKQKLLNITPPRDLKQLQSILGLLNFARNFIPNFSELVKPLYNIIATAPGKYITWTTDNSQQLQNIISMLNSAENLEERNPEVRLIMKVNTSPSAGYIRFYNEFAKRPIMYLNYVYTKAEVKFTNTEKLLTTIHKGLIKALDLGMGQEILVYSPIVSMTKIQKTPLPERKALPIRWITWMSYLEDPRIQFHYDKTLPELQQVPTVTDDIIAKIKHPSEFSMVFYTDGSAIKHPNVNKSHNAGMGIAQVQFKPEFTVINTWSIPLGDHTAQLAEVAAVEFACKKALKIDGPVLIVTDSFYVAESVNKELPYWQSNGFFNNKKKPLKHVSKWKSIADCIQLKPDIIIIHEKGHQPTASTFHTEGNNLADKLATQGSYVVNAGKRTADGSEFEKRTADGSEFESPKKKAKVE

SEQ ID NO: 596 - protein, 2180 aa, synthetic construct
MPAAKRVKLDGGDKKYSIGLDIGTNSVGWAVITDEYKVPSKKFKVLGNTDRHSIKKNLIGALLFDSGETAEATRLKRTARRRYTRRKNRICYLQEIFSNEMAKVDDSFFHRLEESFLVEEDKKHERHPIFGNIVDEVAYHEKYPTIYHLRKKLVDSTDKADLRLIYLALAHMIKFRGHFLIEGDLNPDNSDVDKLFIQLVQTYNQLFEENPINASGVDAKAILSARLSKSRRLENLIAQLPGEKKNGLFGNLIALSLGLTPNFKSNFDLAEDAKLQLSKDTYDDDLDNLLAQIGDQYADLFLAAKNLSDAILLSDILRVNTEITKAPLSASMIKRYDEHHQDLTLLKALVRQQLPEKYKEIFFDQSKNGYAGYIDGGASQEEFYKFIKPILEKMDGTEELLVKLNREDLLRKQRTFDNGSIPHQIHLGELHAILRRQEDFYPFLKDNREKIEKILTFRIPYYVGPLARGNSRFAWMTRKSEETITPWNFEEVVDKGASAQSFIERMTNFDKNLPNEKVLPKHSLLYEYFTVYNELTKVKYVTEGMRKPAFLSGEQKKAIVDLLFKTNRKVTVKQLKEDYFKKIECFDSVEISGVEDRFNASLGTYHDLLKIIKDKDFLDNEENEDILEDIVLTLTLFEDREMIEERLKTYAHLFDDKVMKQLKRRRYTGWGRLSRKLINGIRDKQSGKTILDFLKSDGFANRNFMQLIHDDSLTFKEDIQKAQVSGQGDSLHEHIANLAGSPAIKKGILQTVKVVDELVKVMGRHKPENIVIEMARENQTTQKGQKNSRERMKRIEEGIKELGSQILKEHPVENTQLQNEKLYLYYLQNGRDMYVDQELDINRLSDYDVDHIVPQSFLKDDSIDNKVLTRSDKARGKSDNVPSEEVVKKMKNYWRQLLNAKLITQRKFDNLTKAERGGLSELDKAGFIKRQLVETRQITKHVAQILDSRMNTKYDENDKLIREVKVITLKSKLVSDFRKDFQFYKVREINNYHHAHDAYLNAVVGTALIKKYPKLESEFVYGDYKVYDVRKMIAKSEQEIGKATAKYFFYSNIMNFFKTEITLANGEIRKRPLIETNGETGEIVWDKGRDFATVRKVLSMPQVNIVKKTEVQTGGFSKESILPKRNSDKLIARKKDWDPKKYGGFDSPTVAYSVLVVAKVEKGKSKKLKSVKELLGITIMERSSFEKNPIDFLEAKGYKEVKKDLIIKLPKYSLFELENGRKRMLASAGELQKGNELALPSKYVNFLYLASHYEKLKGSPEDNEQKQLFVEQHKHYLDEIIEQISEFSKRVILADANLDKVLSAYNKHRDKPIREQAENIIHLFTLTNLGAPAAFKYFDTTIDRKRYTSTKEVLDATLIHQSITGLYETRIDLSQLGGDGGEAAAKGGGGSEAAAKGGMDPLQLLQPLEAEIKGTKLKAHWNSGATITCVPQAFLEEEVPIKNIWIKTIHGEKEQPVYYLTFKIQGRKVEAEVISSPYDYILVSPSDIPWLMKKPLQLTTLVPLQEYEERLLKQTMLTGSYKEKLQSLFLKYDALWQHWENQVGHRRIKPHHIATGTVNPRPQKQYPINPKAKASIQTVINDLLKQGVLIQQNSIMNTPVYPVPKPDGKWRMVLDYREVNKTIPLIAAQNQHSAGILSSIFRGKYKTTLDLSNGFWAHSITPESYWLTAFTWLGQQYCWTRLPQGFLNSPALFNADVVDLLKEVPNVQVYVDDIYISHDDPREHLEQLEKVFSLLLNAGYVVSLKKSEIAQHEVEFLGFNITKEGRGLTETFKQKLLNITPPRDLKQLQSILGLLNFARNFIPNFSELVKPLYNIIATAPGKYITWTTDNSQQLQNIISMLNSAENLEERNPEVRLIMKVNTSPSAGYIRFYNEFAKRPIMYLNYVYTKAEVKFTNTEKLLTTIHKGLIKALDLGMGQEILVYSPIVSMTKIQKTPLPERKALPIRWITWMSYLEDPRIQFHYDKTLPELQQVPTVTDDIIAKIKHPSEFSMVFYTDGSAIKHPNVNKSHNAGMGIAQVQFKPEFTVINTWSIPLGDHTAQLAEVAAVEFACKKALKIDGPVLIVTDSFYVAESVNKELPYWQSNGFFNNKKKPLKHVSKWKSIADCIQLKPDIIIIHEKGHQPTASTFHTEGNNLADKLATQGSYVVNAGKRTADGSEFEKRTADGSEFESPKKKAKVE

SEQ ID NO: 597 - protein, 2175 aa, synthetic construct
MPAAKRVKLDGGDKKYSIGLDIGTNSVGWAVITDEYKVPSKKFKVLGNTDRHSIKKNLIGALLFDSGETAEATRLKRTARRRYTRRKNRICYLQEIFSNEMAKVDDSFFHRLEESFLVEEDKKHERHPIFGNIVDEVAYHEKYPTIYHLRKKLVDSTDKADLRLIYLALAHMIKFRGHFLIEGDLNPDNSDVDKLFIQLVQTYNQLFEENPINASGVDAKAILSARLSKSRRLENLIAQLPGEKKNGLFGNLIALSLGLTPNFKSNFDLAEDAKLQLSKDTYDDDLDNLLAQIGDQYADLFLAAKNLSDAILLSDILRVNTEITKAPLSASMIKRYDEHHQDLTLLKALVRQQLPEKYKEIFFDQSKNGYAGYIDGGASQEEFYKFIKPILEKMDGTEELLVKLNREDLLRKQRTFDNGSIPHQIHLGELHAILRRQEDFYPFLKDNREKIEKILTFRIPYYVGPLARGNSRFAWMTRKSEETITPWNFEEVVDKGASAQSFIERMTNFDKNLPNEKVLPKHSLLYEYFTVYNELTKVKYVTEGMRKPAFLSGEQKKAIVDLLFKTNRKVTVKQLKEDYFKKIECFDSVEISGVEDRFNASLGTYHDLLKIIKDKDFLDNEENEDILEDIVLTLTLFEDREMIEERLKTYAHLFDDKVMKQLKRRRYTGWGRLSRKLINGIRDKQSGKTILDFLKSDGFANRNFMQLIHDDSLTFKEDIQKAQVSGQGDSLHEHIANLAGSPAIKKGILQTVKVVDELVKVMGRHKPENIVIEMARENQTTQKGQKNSRERMKRIEEGIKELGSQILKEHPVENTQLQNEKLYLYYLQNGRDMYVDQELDINRLSDYDVDHIVPQSFLKDDSIDNKVLTRSDKARGKSDNVPSEEVVKKMKNYWRQLLNAKLITQRKFDNLTKAERGGLSELDKAGFIKRQLVETRQITKHVAQILDSRMNTKYDENDKLIREVKVITLKSKLVSDFRKDFQFYKVREINNYHHAHDAYLNAVVGTALIKKYPKLESEFVYGDYKVYDVRKMIAKSEQEIGKATAKYFFYSNIMNFFKTEITLANGEIRKRPLIETNGETGEIVWDKGRDFATVRKVLSMPQVNIVKKTEVQTGGFSKESILPKRNSDKLIARKKDWDPKKYGGFDSPTVAYSVLVVAKVEKGKSKKLKSVKELLGITIMERSSFEKNPIDFLEAKGYKEVKKDLIIKLPKYSLFELENGRKRMLASAGELQKGNELALPSKYVNFLYLASHYEKLKGSPEDNEQKQLFVEQHKHYLDEIIEQISEFSKRVILADANLDKVLSAYNKHRDKPIREQAENIIHLFTLTNLGAPAAFKYFDTTIDRKRYTSTKEVLDATLIHQSITGLYETRIDLSQLGGDGGGGGGSGGGGSGGMDPLQLLQPLEAEIKGTKLKAHWNSGATITCVPQAFLEEEVPIKNIWIKTIHGEKEQPVYYLTFKIQGRKVEAEVISSPYDYILVSPSDIPWLMKKPLQLTTLVPLQEYEERLLKQTMLTGSYKEKLQSLFLKYDALWQHWENQVGHRRIKPHHIATGTVNPRPQKQYPINPKAKASIQTVINDLLKQGVLIQQNSIMNTPVYPVPKPDGKWRMVLDYREVNKTIPLIAAQNQHSAGILSSIFRGKYKTTLDLSNGFWAHSITPESYWLTAFTWLGQQYCWTRLPQGFLNSPALFNADVVDLLKEVPNVQVYVDDIYISHDDPREHLEQLEKVFSLLLNAGYVVSLKKSEIAQHEVEFLGFNITKEGRGLTETFKQKLLNITPPRDLKQLQSILGLLNFARNFIPNFSELVKPLYNIIATAPGKYITWTTDNSQQLQNIISMLNSAENLEERNPEVRLIMKVNTSPSAGYIRFYNEFAKRPIMYLNYVYTKAEVKFTNTEKLLTTIHKGLIKALDLGMGQEILVYSPIVSMTKIQKTPLPERKALPIRWITWMSYLEDPRIQFHYDKTLPELQQVPTVTDDIIAKIKHPSEFSMVFYTDGSAIKHPNVNKSHNAGMGIAQVQFKPEFTVINTWSIPLGDHTAQLAEVAAVEFACKKALKIDGPVLIVTDSFYVAESVNKELPYWQSNGFFNNKKKPLKHVSKWKSIADCIQLKPDIIIIHEKGHQPTASTFHTEGNNLADKLATQGSYVVNAGKRTADGSEFEKRTADGSEFESPKKKAKVE

SEQ ID NO: 598 - protein, 2175 aa, synthetic construct
MPAAKRVKLDGGDKKYSIGLDIGTNSVGWAVITDEYKVPSKKFKVLGNTDRHSIKKNLIGALLFDSGETAEATRLKRTARRRYTRRKNRICYLQEIFSNEMAKVDDSFFHRLEESFLVEEDKKHERHPIFGNIVDEVAYHEKYPTIYHLRKKLVDSTDKADLRLIYLALAHMIKFRGHFLIEGDLNPDNSDVDKLFIQLVQTYNQLFEENPINASGVDAKAILSARLSKSRRLENLIAQLPGEKKNGLFGNLIALSLGLTPNFKSNFDLAEDAKLQLSKDTYDDDLDNLLAQIGDQYADLFLAAKNLSDAILLSDILRVNTEITKAPLSASMIKRYDEHHQDLTLLKALVRQQLPEKYKEIFFDQSKNGYAGYIDGGASQEEFYKFIKPILEKMDGTEELLVKLNREDLLRKQRTFDNGSIPHQIHLGELHAILRRQEDFYPFLKDNREKIEKILTFRIPYYVGPLARGNSRFAWMTRKSEETITPWNFEEVVDKGASAQSFIERMTNFDKNLPNEKVLPKHSLLYEYFTVYNELTKVKYVTEGMRKPAFLSGEQKKAIVDLLFKTNRKVTVKQLKEDYFKKIECFDSVEISGVEDRFNASLGTYHDLLKIIKDKDFLDNEENEDILEDIVLTLTLFEDREMIEERLKTYAHLFDDKVMKQLKRRRYTGWGRLSRKLINGIRDKQSGKTILDFLKSDGFANRNFMQLIHDDSLTFKEDIQKAQVSGQGDSLHEHIANLAGSPAIKKGILQTVKVVDELVKVMGRHKPENIVIEMARENQTTQKGQKNSRERMKRIEEGIKELGSQILKEHPVENTQLQNEKLYLYYLQNGRDMYVDQELDINRLSDYDVDHIVPQSFLKDDSIDNKVLTRSDKARGKSDNVPSEEVVKKMKNYWRQLLNAKLITQRKFDNLTKAERGGLSELDKAGFIKRQLVETRQITKHVAQILDSRMNTKYDENDKLIREVKVITLKSKLVSDFRKDFQFYKVREINNYHHAHDAYLNAVVGTALIKKYPKLESEFVYGDYKVYDVRKMIAKSEQEIGKATAKYFFYSNIMNFFKTEITLANGEIRKRPLIETNGETGEIVWDKGRDFATVRKVLSMPQVNIVKKTEVQTGGFSKESILPKRNSDKLIARKKDWDPKKYGGFDSPTVAYSVLVVAKVEKGKSKKLKSVKELLGITIMERSSFEKNPIDFLEAKGYKEVKKDLIIKLPKYSLFELENGRKRMLASAGELQKGNELALPSKYVNFLYLASHYEKLKGSPEDNEQKQLFVEQHKHYLDEIIEQISEFSKRVILADANLDKVLSAYNKHRDKPIREQAENIIHLFTLTNLGAPAAFKYFDTTIDRKRYTSTKEVLDATLIHQSITGLYETRIDLSQLGGDGGEAAAKEAAAKGGMDPLQLLQPLEAEIKGTKLKAHWNSGATITCVPQAFLEEEVPIKNIWIKTIHGEKEQPVYYLTFKIQGRKVEAEVISSPYDYILVSPSDIPWLMKKPLQLTTLVPLQEYEERLLKQTMLTGSYKEKLQSLFLKYDALWQHWENQVGHRRIKPHHIATGTVNPRPQKQYPINPKAKASIQTVINDLLKQGVLIQQNSIMNTPVYPVPKPDGKWRMVLDYREVNKTIPLIAAQNQHSAGILSSIFRGKYKTTLDLSNGFWAHSITPESYWLTAFTWLGQQYCWTRLPQGFLNSPALFNADVVDLLKEVPNVQVYVDDIYISHDDPREHLEQLEKVFSLLLNAGYVVSLKKSEIAQHEVEFLGFNITKEGRGLTETFKQKLLNITPPRDLKQLQSILGLLNFARNFIPNFSELVKPLYNIIATAPGKYITWTTDNSQQLQNIISMLNSAENLEERNPEVRLIMKVNTSPSAGYIRFYNEFAKRPIMYLNYVYTKAEVKFTNTEKLLTTIHKGLIKALDLGMGQEILVYSPIVSMTKIQKTPLPERKALPIRWITWMSYLEDPRIQFHYDKTLPELQQVPTVTDDIIAKIKHPSEFSMVFYTDGSAIKHPNVNKSHNAGMGIAQVQFKPEFTVINTWSIPLGDHTAQLAEVAAVEFACKKALKIDGPVLIVTDSFYVAESVNKELPYWQSNGFFNNKKKPLKHVSKWKSIADCIQLKPDIIIIHEKGHQPTASTFHTEGNNLADKLATQGSYVVNAGKRTADGSEFEKRTADGSEFESPKKKAKVE

SEQ ID NO: 599 - protein, 2176 aa, synthetic construct
MPAAKRVKLDGGDKKYSIGLDIGTNSVGWAVITDEYKVPSKKFKVLGNTDRHSIKKNLIGALLFDSGETAEATRLKRTARRRYTRRKNRICYLQEIFSNEMAKVDDSFFHRLEESFLVEEDKKHERHPIFGNIVDEVAYHEKYPTIYHLRKKLVDSTDKADLRLIYLALAHMIKFRGHFLIEGDLNPDNSDVDKLFIQLVQTYNQLFEENPINASGVDAKAILSARLSKSRRLENLIAQLPGEKKNGLFGNLIALSLGLTPNFKSNFDLAEDAKLQLSKDTYDDDLDNLLAQIGDQYADLFLAAKNLSDAILLSDILRVNTEITKAPLSASMIKRYDEHHQDLTLLKALVRQQLPEKYKEIFFDQSKNGYAGYIDGGASQEEFYKFIKPILEKMDGTEELLVKLNREDLLRKQRTFDNGSIPHQIHLGELHAILRRQEDFYPFLKDNREKIEKILTFRIPYYVGPLARGNSRFAWMTRKSEETITPWNFEEVVDKGASAQSFIERMTNFDKNLPNEKVLPKHSLLYEYFTVYNELTKVKYVTEGMRKPAFLSGEQKKAIVDLLFKTNRKVTVKQLKEDYFKKIECFDSVEISGVEDRFNASLGTYHDLLKIIKDKDFLDNEENEDILEDIVLTLTLFEDREMIEERLKTYAHLFDDKVMKQLKRRRYTGWGRLSRKLINGIRDKQSGKTILDFLKSDGFANRNFMQLIHDDSLTFKEDIQKAQVSGQGDSLHEHIANLAGSPAIKKGILQTVKVVDELVKVMGRHKPENIVIEMARENQTTQKGQKNSRERMKRIEEGIKELGSQILKEHPVENTQLQNEKLYLYYLQNGRDMYVDQELDINRLSDYDVDHIVPQSFLKDDSIDNKVLTRSDKARGKSDNVPSEEVVKKMKNYWRQLLNAKLITQRKFDNLTKAERGGLSELDKAGFIKRQLVETRQITKHVAQILDSRMNTKYDENDKLIREVKVITLKSKLVSDFRKDFQFYKVREINNYHHAHDAYLNAVVGTALIKKYPKLESEFVYGDYKVYDVRKMIAKSEQEIGKATAKYFFYSNIMNFFKTEITLANGEIRKRPLIETNGETGEIVWDKGRDFATVRKVLSMPQVNIVKKTEVQTGGFSKESILPKRNSDKLIARKKDWDPKKYGGFDSPTVAYSVLVVAKVEKGKSKKLKSVKELLGITIMERSSFEKNPIDFLEAKGYKEVKKDLIIKLPKYSLFELENGRKRMLASAGELQKGNELALPSKYVNFLYLASHYEKLKGSPEDNEQKQLFVEQHKHYLDEIIEQISEFSKRVILADANLDKVLSAYNKHRDKPIREQAENIIHLFTLTNLGAPAAFKYFDTTIDRKRYTSTKEVLDATLIHQSITGLYETRIDLSQLGGDGGGSSEAAAKGGGGGMDPLQLLQPLEAEIKGTKLKAHWNSGATITCVPQAFLEEEVPIKNIWIKTIHGEKEQPVYYLTFKIQGRKVEAEVISSPYDYILVSPSDIPWLMKKPLQLTTLVPLQEYEERLLKQTMLTGSYKEKLQSLFLKYDALWQHWENQVGHRRIKPHHIATGTVNPRPQKQYPINPKAKASIQTVINDLLKQGVLIQQNSIMNTPVYPVPKPDGKWRMVLDYREVNKTIPLIAAQNQHSAGILSSIFRGKYKTTLDLSNGFWAHSITPESYWLTAFTWLGQQYCWTRLPQGFLNSPALFNADVVDLLKEVPNVQVYVDDIYISHDDPREHLEQLEKVFSLLLNAGYVVSLKKSEIAQHEVEFLGFNITKEGRGLTETFKQKLLNITPPRDLKQLQSILGLLNFARNFIPNFSELVKPLYNIIATAPGKYITWTTDNSQQLQNIISMLNSAENLEERNPEVRLIMKVNTSPSAGYIRFYNEFAKRPIMYLNYVYTKAEVKFTNTEKLLTTIHKGLIKALDLGMGQEILVYSPIVSMTKIQKTPLPERKALPIRWITWMSYLEDPRIQFHYDKTLPELQQVPTVTDDIIAKIKHPSEFSMVFYTDGSAIKHPNVNKSHNAGMGIAQVQFKPEFTVINTWSIPLGDHTAQLAEVAAVEFACKKALKIDGPVLIVTDSFYVAESVNKELPYWQSNGFFNNKKKPLKHVSKWKSIADCIQLKPDIIIIHEKGHQPTASTFHTEGNNLADKLATQGSYVVNAGKRTADGSEFEKRTADGSEFESPKKKAKVE

SEQ ID NO: 600 - protein, 2174 aa, synthetic construct
MPAAKRVKLDGGDKKYSIGLDIGTNSVGWAVITDEYKVPSKKFKVLGNTDRHSIKKNLIGALLFDSGETAEATRLKRTARRRYTRRKNRICYLQEIFSNEMAKVDDSFFHRLEESFLVEEDKKHERHPIFGNIVDEVAYHEKYPTIYHLRKKLVDSTDKADLRLIYLALAHMIKFRGHFLIEGDLNPDNSDVDKLFIQLVQTYNQLFEENPINASGVDAKAILSARLSKSRRLENLIAQLPGEKKNGLFGNLIALSLGLTPNFKSNFDLAEDAKLQLSKDTYDDDLDNLLAQIGDQYADLFLAAKNLSDAILLSDILRVNTEITKAPLSASMIKRYDEHHQDLTLLKALVRQQLPEKYKEIFFDQSKNGYAGYIDGGASQEEFYKFIKPILEKMDGTEELLVKLNREDLLRKQRTFDNGSIPHQIHLGELHAILRRQEDFYPFLKDNREKIEKILTFRIPYYVGPLARGNSRFAWMTRKSEETITPWNFEEVVDKGASAQSFIERMTNFDKNLPNEKVLPKHSLLYEYFTVYNELTKVKYVTEGMRKPAFLSGEQKKAIVDLLFKTNRKVTVKQLKEDYFKKIECFDSVEISGVEDRFNASLGTYHDLLKIIKDKDFLDNEENEDILEDIVLTLTLFEDREMIEERLKTYAHLFDDKVMKQLKRRRYTGWGRLSRKLINGIRDKQSGKTILDFLKSDGFANRNFMQLIHDDSLTFKEDIQKAQVSGQGDSLHEHIANLAGSPAIKKGILQTVKVVDELVKVMGRHKPENIVIEMARENQTTQKGQKNSRERMKRIEEGIKELGSQILKEHPVENTQLQNEKLYLYYLQNGRDMYVDQELDINRLSDYDVDHIVPQSFLKDDSIDNKVLTRSDKARGKSDNVPSEEVVKKMKNYWRQLLNAKLITQRKFDNLTKAERGGLSELDKAGFIKRQLVETRQITKHVAQILDSRMNTKYDENDKLIREVKVITLKSKLVSDFRKDFQFYKVREINNYHHAHDAYLNAVVGTALIKKYPKLESEFVYGDYKVYDVRKMIAKSEQEIGKATAKYFFYSNIMNFFKTEITLANGEIRKRPLIETNGETGEIVWDKGRDFATVRKVLSMPQVNIVKKTEVQTGGFSKESILPKRNSDKLIARKKDWDPKKYGGFDSPTVAYSVLVVAKVEKGKSKKLKSVKELLGITIMERSSFEKNPIDFLEAKGYKEVKKDLIIKLPKYSLFELENGRKRMLASAGELQKGNELALPSKYVNFLYLASHYEKLKGSPEDNEQKQLFVEQHKHYLDEIIEQISEFSKRVILADANLDKVLSAYNKHRDKPIREQAENIIHLFTLTNLGAPAAFKYFDTTIDRKRYTSTKEVLDATLIHQSITGLYETRIDLSQLGGDGGPAPAPAPAPGGMDPLQLLQPLEAEIKGTKLKAHWNSGATITCVPQAFLEEEVPIKNIWIKTIHGEKEQPVYYLTFKIQGRKVEAEVISSPYDYILVSPSDIPWLMKKPLQLTTLVPLQEYEERLLKQTMLTGSYKEKLQSLFLKYDALWQHWENQVGHRRIKPHHIATGTVNPRPQKQYPINPKAKASIQTVINDLLKQGVLIQQNSIMNTPVYPVPKPDGKWRMVLDYREVNKTIPLIAAQNQHSAGILSSIFRGKYKTTLDLSNGFWAHSITPESYWLTAFTWLGQQYCWTRLPQGFLNSPALFNADVVDLLKEVPNVQVYVDDIYISHDDPREHLEQLEKVFSLLLNAGYVVSLKKSEIAQHEVEFLGFNITKEGRGLTETFKQKLLNITPPRDLKQLQSILGLLNFARNFIPNFSELVKPLYNIIATAPGKYITWTTDNSQQLQNIISMLNSAENLEERNPEVRLIMKVNTSPSAGYIRFYNEFAKRPIMYLNYVYTKAEVKFTNTEKLLTTIHKGLIKALDLGMGQEILVYSPIVSMTKIQKTPLPERKALPIRWITWMSYLEDPRIQFHYDKTLPELQQVPTVTDDIIAKIKHPSEFSMVFYTDGSAIKHPNVNKSHNAGMGIAQVQFKPEFTVINTWSIPLGDHTAQLAEVAAVEFACKKALKIDGPVLIVTDSFYVAESVNKELPYWQSNGFFNNKKKPLKHVSKWKSIADCIQLKPDIIIIHEKGHQPTASTFHTEGNNLADKLATQGSYVVNAGKRTADGSEFEKRTADGSEFESPKKKAKVE

SEQ ID NO: 601 - protein, 2180 aa, synthetic construct
MPAAKRVKLDGGDKKYSIGLDIGTNSVGWAVITDEYKVPSKKFKVLGNTDRHSIKKNLIGALLFDSGETAEATRLKRTARRRYTRRKNRICYLQEIFSNEMAKVDDSFFHRLEESFLVEEDKKHERHPIFGNIVDEVAYHEKYPTIYHLRKKLVDSTDKADLRLIYLALAHMIKFRGHFLIEGDLNPDNSDVDKLFIQLVQTYNQLFEENPINASGVDAKAILSARLSKSRRLENLIAQLPGEKKNGLFGNLIALSLGLTPNFKSNFDLAEDAKLQLSKDTYDDDLDNLLAQIGDQYADLFLAAKNLSDAILLSDILRVNTEITKAPLSASMIKRYDEHHQDLTLLKALVRQQLPEKYKEIFFDQSKNGYAGYIDGGASQEEFYKFIKPILEKMDGTEELLVKLNREDLLRKQRTFDNGSIPHQIHLGELHAILRRQEDFYPFLKDNREKIEKILTFRIPYYVGPLARGNSRFAWMTRKSEETITPWNFEEVVDKGASAQSFIERMTNFDKNLPNEKVLPKHSLLYEYFTVYNELTKVKYVTEGMRKPAFLSGEQKKAIVDLLFKTNRKVTVKQLKEDYFKKIECFDSVEISGVEDRFNASLGTYHDLLKIIKDKDFLDNEENEDILEDIVLTLTLFEDREMIEERLKTYAHLFDDKVMKQLKRRRYTGWGRLSRKLINGIRDKQSGKTILDFLKSDGFANRNFMQLIHDDSLTFKEDIQKAQVSGQGDSLHEHIANLAGSPAIKKGILQTVKVVDELVKVMGRHKPENIVIEMARENQTTQKGQKNSRERMKRIEEGIKELGSQILKEHPVENTQLQNEKLYLYYLQNGRDMYVDQELDINRLSDYDVDHIVPQSFLKDDSIDNKVLTRSDKARGKSDNVPSEEVVKKMKNYWRQLLNAKLITQRKFDNLTKAERGGLSELDKAGFIKRQLVETRQITKHVAQILDSRMNTKYDENDKLIREVKVITLKSKLVSDFRKDFQFYKVREINNYHHAHDAYLNAVVGTALIKKYPKLESEFVYGDYKVYDVRKMIAKSEQEIGKATAKYFFYSNIMNFFKTEITLANGEIRKRPLIETNGETGEIVWDKGRDFATVRKVLSMPQVNIVKKTEVQTGGFSKESILPKRNSDKLIARKKDWDPKKYGGFDSPTVAYSVLVVAKVEKGKSKKLKSVKELLGITIMERSSFEKNPIDFLEAKGYKEVKKDLIIKLPKYSLFELENGRKRMLASAGELQKGNELALPSKYVNFLYLASHYEKLKGSPEDNEQKQLFVEQHKHYLDEIIEQISEFSKRVILADANLDKVLSAYNKHRDKPIREQAENIIHLFTLTNLGAPAAFKYFDTTIDRKRYTSTKEVLDATLIHQSITGLYETRIDLSQLGGDGGGGGGSGGGGSGGGGSGGMDPLQLLQPLEAEIKGTKLKAHWNSGATITCVPQAFLEEEVPIKNIWIKTIHGEKEQPVYYLTFKIQGRKVEAEVISSPYDYILVSPSDIPWLMKKPLQLTTLVPLQEYEERLLKQTMLTGSYKEKLQSLFLKYDALWQHWENQVGHRRIKPHHIATGTVNPRPQKQYPINPKAKASIQTVINDLLKQGVLIQQNSIMNTPVYPVPKPDGKWRMVLDYREVNKTIPLIAAQNQHSAGILSSIFRGKYKTTLDLSNGFWAHSITPESYWLTAFTWLGQQYCWTRLPQGFLNSPALFNADVVDLLKEVPNVQVYVDDIYISHDDPREHLEQLEKVFSLLLNAGYVVSLKKSEIAQHEVEFLGFNITKEGRGLTETFKQKLLNITPPRDLKQLQSILGLLNFARNFIPNFSELVKPLYNIIATAPGKYITWTTDNSQQLQNIISMLNSAENLEERNPEVRLIMKVNTSPSAGYIRFYNEFAKRPIMYLNYVYTKAEVKFTNTEKLLTTIHKGLIKALDLGMGQEILVYSPIVSMTKIQKTPLPERKALPIRWITWMSYLEDPRIQFHYDKTLPELQQVPTVTDDIIAKIKHPSEFSMVFYTDGSAIKHPNVNKSHNAGMGIAQVQFKPEFTVINTWSIPLGDHTAQLAEVAAVEFACKKALKIDGPVLIVTDSFYVAESVNKELPYWQSNGFFNNKKKPLKHVSKWKSIADCIQLKPDIIIIHEKGHQPTASTFHTEGNNLADKLATQGSYVVNAGKRTADGSEFEKRTADGSEFESPKKKAKVE

SEQ ID NO: 602 - protein, 2176 aa, synthetic construct
MPAAKRVKLDGGDKKYSIGLDIGTNSVGWAVITDEYKVPSKKFKVLGNTDRHSIKKNLIGALLFDSGETAEATRLKRTARRRYTRRKNRICYLQEIFSNEMAKVDDSFFHRLEESFLVEEDKKHERHPIFGNIVDEVAYHEKYPTIYHLRKKLVDSTDKADLRLIYLALAHMIKFRGHFLIEGDLNPDNSDVDKLFIQLVQTYNQLFEENPINASGVDAKAILSARLSKSRRLENLIAQLPGEKKNGLFGNLIALSLGLTPNFKSNFDLAEDAKLQLSKDTYDDDLDNLLAQIGDQYADLFLAAKNLSDAILLSDILRVNTEITKAPLSASMIKRYDEHHQDLTLLKALVRQQLPEKYKEIFFDQSKNGYAGYIDGGASQEEFYKFIKPILEKMDGTEELLVKLNREDLLRKQRTFDNGSIPHQIHLGELHAILRRQEDFYPFLKDNREKIEKILTFRIPYYVGPLARGNSRFAWMTRKSEETITPWNFEEVVDKGASAQSFIERMTNFDKNLPNEKVLPKHSLLYEYFTVYNELTKVKYVTEGMRKPAFLSGEQKKAIVDLLFKTNRKVTVKQLKEDYFKKIECFDSVEISGVEDRFNASLGTYHDLLKIIKDKDFLDNEENEDILEDIVLTLTLFEDREMIEERLKTYAHLFDDKVMKQLKRRRYTGWGRLSRKLINGIRDKQSGKTILDFLKSDGFANRNFMQLIHDDSLTFKEDIQKAQVSGQGDSLHEHIANLAGSPAIKKGILQTVKVVDELVKVMGRHKPENIVIEMARENQTTQKGQKNSRERMKRIEEGIKELGSQILKEHPVENTQLQNEKLYLYYLQNGRDMYVDQELDINRLSDYDVDHIVPQSFLKDDSIDNKVLTRSDKARGKSDNVPSEEVVKKMKNYWRQLLNAKLITQRKFDNLTKAERGGLSELDKAGFIKRQLVETRQITKHVAQILDSRMNTKYDENDKLIREVKVITLKSKLVSDFRKDFQFYKVREINNYHHAHDAYLNAVVGTALIKKYPKLESEFVYGDYKVYDVRKMIAKSEQEIGKATAKYFFYSNIMNFFKTEITLANGEIRKRPLIETNGETGEIVWDKGRDFATVRKVLSMPQVNIVKKTEVQTGGFSKESILPKRNSDKLIARKKDWDPKKYGGFDSPTVAYSVLVVAKVEKGKSKKLKSVKELLGITIMERSSFEKNPIDFLEAKGYKEVKKDLIIKLPKYSLFELENGRKRMLASAGELQKGNELALPSKYVNFLYLASHYEKLKGSPEDNEQKQLFVEQHKHYLDEIIEQISEFSKRVILADANLDKVLSAYNKHRDKPIREQAENIIHLFTLTNLGAPAAFKYFDTTIDRKRYTSTKEVLDATLIHQSITGLYETRIDLSQLGGDGGPAPEAAAKGSSGGMDPLQLLQPLEAEIKGTKLKAHWNSGATITCVPQAFLEEEVPIKNIWIKTIHGEKEQPVYYLTFKIQGRKVEAEVISSPYDYILVSPSDIPWLMKKPLQLTTLVPLQEYEERLLKQTMLTGSYKEKLQSLFLKYDALWQHWENQVGHRRIKPHHIATGTVNPRPQKQYPINPKAKASIQTVINDLLKQGVLIQQNSIMNTPVYPVPKPDGKWRMVLDYREVNKTIPLIAAQNQHSAGILSSIFRGKYKTTLDLSNGFWAHSITPESYWLTAFTWLGQQYCWTRLPQGFLNSPALFNADVVDLLKEVPNVQVYVDDIYISHDDPREHLEQLEKVFSLLLNAGYVVSLKKSEIAQHEVEFLGFNITKEGRGLTETFKQKLLNITPPRDLKQLQSILGLLNFARNFIPNFSELVKPLYNIIATAPGKYITWTTDNSQQLQNIISMLNSAENLEERNPEVRLIMKVNTSPSAGYIRFYNEFAKRPIMYLNYVYTKAEVKFTNTEKLLTTIHKGLIKALDLGMGQEILVYSPIVSMTKIQKTPLPERKALPIRWITWMSYLEDPRIQFHYDKTLPELQQVPTVTDDIIAKIKHPSEFSMVFYTDGSAIKHPNVNKSHNAGMGIAQVQFKPEFTVINTWSIPLGDHTAQLAEVAAVEFACKKALKIDGPVLIVTDSFYVAESVNKELPYWQSNGFFNNKKKPLKHVSKWKSIADCIQLKPDIIIIHEKGHQPTASTFHTEGNNLADKLATQGSYVVNAGKRTADGSEFEKRTADGSEFESPKKKAKVE

SEQ ID NO: 603 - protein, 2173 aa, synthetic construct
MPAAKRVKLDGGDKKYSIGLDIGTNSVGWAVITDEYKVPSKKFKVLGNTDRHSIKKNLIGALLFDSGETAEATRLKRTARRRYTRRKNRICYLQEIFSNEMAKVDDSFFHRLEESFLVEEDKKHERHPIFGNIVDEVAYHEKYPTIYHLRKKLVDSTDKADLRLIYLALAHMIKFRGHFLIEGDLNPDNSDVDKLFIQLVQTYNQLFEENPINASGVDAKAILSARLSKSRRLENLIAQLPGEKKNGLFGNLIALSLGLTPNFKSNFDLAEDAKLQLSKDTYDDDLDNLLAQIGDQYADLFLAAKNLSDAILLSDILRVNTEITKAPLSASMIKRYDEHHQDLTLLKALVRQQLPEKYKEIFFDQSKNGYAGYIDGGASQEEFYKFIKPILEKMDGTEELLVKLNREDLLRKQRTFDNGSIPHQIHLGELHAILRRQEDFYPFLKDNREKIEKILTFRIPYYVGPLARGNSRFAWMTRKSEETITPWNFEEVVDKGASAQSFIERMTNFDKNLPNEKVLPKHSLLYEYFTVYNELTKVKYVTEGMRKPAFLSGEQKKAIVDLLFKTNRKVTVKQLKEDYFKKIECFDSVEISGVEDRFNASLGTYHDLLKIIKDKDFLDNEENEDILEDIVLTLTLFEDREMIEERLKTYAHLFDDKVMKQLKRRRYTGWGRLSRKLINGIRDKQSGKTILDFLKSDGFANRNFMQLIHDDSLTFKEDIQKAQVSGQGDSLHEHIANLAGSPAIKKGILQTVKVVDELVKVMGRHKPENIVIEMARENQTTQKGQKNSRERMKRIEEGIKELGSQILKEHPVENTQLQNEKLYLYYLQNGRDMYVDQELDINRLSDYDVDHIVPQSFLKDDSIDNKVLTRSDKARGKSDNVPSEEVVKKMKNYWRQLLNAKLITQRKFDNLTKAERGGLSELDKAGFIKRQLVETRQITKHVAQILDSRMNTKYDENDKLIREVKVITLKSKLVSDFRKDFQFYKVREINNYHHAHDAYLNAVVGTALIKKYPKLESEFVYGDYKVYDVRKMIAKSEQEIGKATAKYFFYSNIMNFFKTEITLANGEIRKRPLIETNGETGEIVWDKGRDFATVRKVLSMPQVNIVKKTEVQTGGFSKESILPKRNSDKLIARKKDWDPKKYGGFDSPTVAYSVLVVAKVEKGKSKKLKSVKELLGITIMERSSFEKNPIDFLEAKGYKEVKKDLIIKLPKYSLFELENGRKRMLASAGELQKGNELALPSKYVNFLYLASHYEKLKGSPEDNEQKQLFVEQHKHYLDEIIEQISEFSKRVILADANLDKVLSAYNKHRDKPIREQAENIIHLFTLTNLGAPAAFKYFDTTIDRKRYTSTKEVLDATLIHQSITGLYETRIDLSQLGGDGGGSSEAAAKGGMDPLQLLQPLEAEIKGTKLKAHWNSGATITCVPQAFLEEEVPIKNIWIKTIHGEKEQPVYYLTFKIQGRKVEAEVISSPYDYILVSPSDIPWLMKKPLQLTTLVPLQEYEERLLKQTMLTGSYKEKLQSLFLKYDALWQHWENQVGHRRIKPHHIATGTVNPRPQKQYPINPKAKASIQTVINDLLKQGVLIQQNSIMNTPVYPVPKPDGKWRMVLDYREVNKTIPLIAAQNQHSAGILSSIFRGKYKTTLDLSNGFWAHSITPESYWLTAFTWLGQQYCWTRLPQGFLNSPALFNADVVDLLKEVPNVQVYVDDIYISHDDPREHLEQLEKVFSLLLNAGYVVSLKKSEIAQHEVEFLGFNITKEGRGLTETFKQKLLNITPPRDLKQLQSILGLLNFARNFIPNFSELVKPLYNIIATAPGKYITWTTDNSQQLQNIISMLNSAENLEERNPEVRLIMKVNTSPSAGYIRFYNEFAKRPIMYLNYVYTKAEVKFTNTEKLLTTIHKGLIKALDLGMGQEILVYSPIVSMTKIQKTPLPERKALPIRWITWMSYLEDPRIQFHYDKTLPELQQVPTVTDDIIAKIKHPSEFSMVFYTDGSAIKHPNVNKSHNAGMGIAQVQFKPEFTVINTWSIPLGDHTAQLAEVAAVEFACKKALKIDGPVLIVTDSFYVAESVNKELPYWQSNGFFNNKKKPLKHVSKWKSIADCIQLKPDIIIIHEKGHQPTASTFHTEGNNLADKLATQGSYVVNAGKRTADGSEFEKRTADGSEFESPKKKAKVE

SEQ ID NO: 604 - protein, 2183 aa, synthetic construct
MPAAKRVKLDGGDKKYSIGLDIGTNSVGWAVITDEYKVPSKKFKVLGNTDRHSIKKNLIGALLFDSGETAEATRLKRTARRRYTRRKNRICYLQEIFSNEMAKVDDSFFHRLEESFLVEEDKKHERHPIFGNIVDEVAYHEKYPTIYHLRKKLVDSTDKADLRLIYLALAHMIKFRGHFLIEGDLNPDNSDVDKLFIQLVQTYNQLFEENPINASGVDAKAILSARLSKSRRLENLIAQLPGEKKNGLFGNLIALSLGLTPNFKSNFDLAEDAKLQLSKDTYDDDLDNLLAQIGDQYADLFLAAKNLSDAILLSDILRVNTEITKAPLSASMIKRYDEHHQDLTLLKALVRQQLPEKYKEIFFDQSKNGYAGYIDGGASQEEFYKFIKPILEKMDGTEELLVKLNREDLLRKQRTFDNGSIPHQIHLGELHAILRRQEDFYPFLKDNREKIEKILTFRIPYYVGPLARGNSRFAWMTRKSEETITPWNFEEVVDKGASAQSFIERMTNFDKNLPNEKVLPKHSLLYEYFTVYNELTKVKYVTEGMRKPAFLSGEQKKAIVDLLFKTNRKVTVKQLKEDYFKKIECFDSVEISGVEDRFNASLGTYHDLLKIIKDKDFLDNEENEDILEDIVLTLTLFEDREMIEERLKTYAHLFDDKVMKQLKRRRYTGWGRLSRKLINGIRDKQSGKTILDFLKSDGFANRNFMQLIHDDSLTFKEDIQKAQVSGQGDSLHEHIANLAGSPAIKKGILQTVKVVDELVKVMGRHKPENIVIEMARENQTTQKGQKNSRERMKRIEEGIKELGSQILKEHPVENTQLQNEKLYLYYLQNGRDMYVDQELDINRLSDYDVDHIVPQSFLKDDSIDNKVLTRSDKARGKSDNVPSEEVVKKMKNYWRQLLNAKLITQRKFDNLTKAERGGLSELDKAGFIKRQLVETRQITKHVAQILDSRMNTKYDENDKLIREVKVITLKSKLVSDFRKDFQFYKVREINNYHHAHDAYLNAVVGTALIKKYPKLESEFVYGDYKVYDVRKMIAKSEQEIGKATAKYFFYSNIMNFFKTEITLANGEIRKRPLIETNGETGEIVWDKGRDFATVRKVLSMPQVNIVKKTEVQTGGFSKESILPKRNSDKLIARKKDWDPKKYGGFDSPTVAYSVLVVAKVEKGKSKKLKSVKELLGITIMERSSFEKNPIDFLEAKGYKEVKKDLIIKLPKYSLFELENGRKRMLASAGELQKGNELALPSKYVNFLYLASHYEKLKGSPEDNEQKQLFVEQHKHYLDEIIEQISEFSKRVILADANLDKVLSAYNKHRDKPIREQAENIIHLFTLTNLGAPAAFKYFDTTIDRKRYTSTKEVLDATLIHQSITGLYETRIDLSQLGGDGGGGSGGSGGSGGSGGSGGSGGMDPLQLLQPLEAEIKGTKLKAHWNSGATITCVPQAFLEEEVPIKNIWIKTIHGEKEQPVYYLTFKIQGRKVEAEVISSPYDYILVSPSDIPWLMKKPLQLTTLVPLQEYEERLLKQTMLTGSYKEKLQSLFLKYDALWQHWENQVGHRRIKPHHIATGTVNPRPQKQYPINPKAKASIQTVINDLLKQGVLIQQNSIMNTPVYPVPKPDGKWRMVLDYREVNKTIPLIAAQNQHSAGILSSIFRGKYKTTLDLSNGFWAHSITPESYWLTAFTWLGQQYCWTRLPQGFLNSPALFNADVVDLLKEVPNVQVYVDDIYISHDDPREHLEQLEKVFSLLLNAGYVVSLKKSEIAQHEVEFLGFNITKEGRGLTETFKQKLLNITPPRDLKQLQSILGLLNFARNFIPNFSELVKPLYNIIATAPGKYITWTTDNSQQLQNIISMLNSAENLEERNPEVRLIMKVNTSPSAGYIRFYNEFAKRPIMYLNYVYTKAEVKFTNTEKLLTTIHKGLIKALDLGMGQEILVYSPIVSMTKIQKTPLPERKALPIRWITWMSYLEDPRIQFHYDKTLPELQQVPTVTDDIIAKIKHPSEFSMVFYTDGSAIKHPNVNKSHNAGMGIAQVQFKPEFTVINTWSIPLGDHTAQLAEVAAVEFACKKALKIDGPVLIVTDSFYVAESVNKELPYWQSNGFFNNKKKPLKHVSKWKSIADCIQLKPDIIIIHEKGHQPTASTFHTEGNNLADKLATQGSYVVNAGKRTADGSEFEKRTADGSEFESPKKKAKVE

SEQ ID NO: 605 - protein, 2171 aa, synthetic construct
MPAAKRVKLDGGDKKYSIGLDIGTNSVGWAVITDEYKVPSKKFKVLGNTDRHSIKKNLIGALLFDSGETAEATRLKRTARRRYTRRKNRICYLQEIFSNEMAKVDDSFFHRLEESFLVEEDKKHERHPIFGNIVDEVAYHEKYPTIYHLRKKLVDSTDKADLRLIYLALAHMIKFRGHFLIEGDLNPDNSDVDKLFIQLVQTYNQLFEENPINASGVDAKAILSARLSKSRRLENLIAQLPGEKKNGLFGNLIALSLGLTPNFKSNFDLAEDAKLQLSKDTYDDDLDNLLAQIGDQYADLFLAAKNLSDAILLSDILRVNTEITKAPLSASMIKRYDEHHQDLTLLKALVRQQLPEKYKEIFFDQSKNGYAGYIDGGASQEEFYKFIKPILEKMDGTEELLVKLNREDLLRKQRTFDNGSIPHQIHLGELHAILRRQEDFYPFLKDNREKIEKILTFRIPYYVGPLARGNSRFAWMTRKSEETITPWNFEEVVDKGASAQSFIERMTNFDKNLPNEKVLPKHSLLYEYFTVYNELTKVKYVTEGMRKPAFLSGEQKKAIVDLLFKTNRKVTVKQLKEDYFKKIECFDSVEISGVEDRFNASLGTYHDLLKIIKDKDFLDNEENEDILEDIVLTLTLFEDREMIEERLKTYAHLFDDKVMKQLKRRRYTGWGRLSRKLINGIRDKQSGKTILDFLKSDGFANRNFMQLIHDDSLTFKEDIQKAQVSGQGDSLHEHIANLAGSPAIKKGILQTVKVVDELVKVMGRHKPENIVIEMARENQTTQKGQKNSRERMKRIEEGIKELGSQILKEHPVENTQLQNEKLYLYYLQNGRDMYVDQELDINRLSDYDVDHIVPQSFLKDDSIDNKVLTRSDKARGKSDNVPSEEVVKKMKNYWRQLLNAKLITQRKFDNLTKAERGGLSELDKAGFIKRQLVETRQITKHVAQILDSRMNTKYDENDKLIREVKVITLKSKLVSDFRKDFQFYKVREINNYHHAHDAYLNAVVGTALIKKYPKLESEFVYGDYKVYDVRKMIAKSEQEIGKATAKYFFYSNIMNFFKTEITLANGEIRKRPLIETNGETGEIVWDKGRDFATVRKVLSMPQVNIVKKTEVQTGGFSKESILPKRNSDKLIARKKDWDPKKYGGFDSPTVAYSVLVVAKVEKGKSKKLKSVKELLGITIMERSSFEKNPIDFLEAKGYKEVKKDLIIKLPKYSLFELENGRKRMLASAGELQKGNELALPSKYVNFLYLASHYEKLKGSPEDNEQKQLFVEQHKHYLDEIIEQISEFSKRVILADANLDKVLSAYNKHRDKPIREQAENIIHLFTLTNLGAPAAFKYFDTTIDRKRYTSTKEVLDATLIHQSITGLYETRIDLSQLGGDGGGGGGSSGGMDPLQLLQPLEAEIKGTKLKAHWNSGATITCVPQAFLEEEVPIKNIWIKTIHGEKEQPVYYLTFKIQGRKVEAEVISSPYDYILVSPSDIPWLMKKPLQLTTLVPLQEYEERLLKQTMLTGSYKEKLQSLFLKYDALWQHWENQVGHRRIKPHHIATGTVNPRPQKQYPINPKAKASIQTVINDLLKQGVLIQQNSIMNTPVYPVPKPDGKWRMVLDYREVNKTIPLIAAQNQHSAGILSSIFRGKYKTTLDLSNGFWAHSITPESYWLTAFTWLGQQYCWTRLPQGFLNSPALFNADVVDLLKEVPNVQVYVDDIYISHDDPREHLEQLEKVFSLLLNAGYVVSLKKSEIAQHEVEFLGFNITKEGRGLTETFKQKLLNITPPRDLKQLQSILGLLNFARNFIPNFSELVKPLYNIIATAPGKYITWTTDNSQQLQNIISMLNSAENLEERNPEVRLIMKVNTSPSAGYIRFYNEFAKRPIMYLNYVYTKAEVKFTNTEKLLTTIHKGLIKALDLGMGQEILVYSPIVSMTKIQKTPLPERKALPIRWITWMSYLEDPRIQFHYDKTLPELQQVPTVTDDIIAKIKHPSEFSMVFYTDGSAIKHPNVNKSHNAGMGIAQVQFKPEFTVINTWSIPLGDHTAQLAEVAAVEFACKKALKIDGPVLIVTDSFYVAESVNKELPYWQSNGFFNNKKKPLKHVSKWKSIADCIQLKPDIIIIHEKGHQPTASTFHTEGNNLADKLATQGSYVVNAGKRTADGSEFEKRTADGSEFESPKKKAKVE

SEQ ID NO: 606 - protein, 2174 aa, synthetic construct
MPAAKRVKLDGGDKKYSIGLDIGTNSVGWAVITDEYKVPSKKFKVLGNTDRHSIKKNLIGALLFDSGETAEATRLKRTARRRYTRRKNRICYLQEIFSNEMAKVDDSFFHRLEESFLVEEDKKHERHPIFGNIVDEVAYHEKYPTIYHLRKKLVDSTDKADLRLIYLALAHMIKFRGHFLIEGDLNPDNSDVDKLFIQLVQTYNQLFEENPINASGVDAKAILSARLSKSRRLENLIAQLPGEKKNGLFGNLIALSLGLTPNFKSNFDLAEDAKLQLSKDTYDDDLDNLLAQIGDQYADLFLAAKNLSDAILLSDILRVNTEITKAPLSASMIKRYDEHHQDLTLLKALVRQQLPEKYKEIFFDQSKNGYAGYIDGGASQEEFYKFIKPILEKMDGTEELLVKLNREDLLRKQRTFDNGSIPHQIHLGELHAILRRQEDFYPFLKDNREKIEKILTFRIPYYVGPLARGNSRFAWMTRKSEETITPWNFEEVVDKGASAQSFIERMTNFDKNLPNEKVLPKHSLLYEYFTVYNELTKVKYVTEGMRKPAFLSGEQKKAIVDLLFKTNRKVTVKQLKEDYFKKIECFDSVEISGVEDRFNASLGTYHDLLKIIKDKDFLDNEENEDILEDIVLTLTLFEDREMIEERLKTYAHLFDDKVMKQLKRRRYTGWGRLSRKLINGIRDKQSGKTILDFLKSDGFANRNFMQLIHDDSLTFKEDIQKAQVSGQGDSLHEHIANLAGSPAIKKGILQTVKVVDELVKVMGRHKPENIVIEMARENQTTQKGQKNSRERMKRIEEGIKELGSQILKEHPVENTQLQNEKLYLYYLQNGRDMYVDQELDINRLSDYDVDHIVPQSFLKDDSIDNKVLTRSDKARGKSDNVPSEEVVKKMKNYWRQLLNAKLITQRKFDNLTKAERGGLSELDKAGFIKRQLVETRQITKHVAQILDSRMNTKYDENDKLIREVKVITLKSKLVSDFRKDFQFYKVREINNYHHAHDAYLNAVVGTALIKKYPKLESEFVYGDYKVYDVRKMIAKSEQEIGKATAKYFFYSNIMNFFKTEITLANGEIRKRPLIETNGETGEIVWDKGRDFATVRKVLSMPQVNIVKKTEVQTGGFSKESILPKRNSDKLIARKKDWDPKKYGGFDSPTVAYSVLVVAKVEKGKSKKLKSVKELLGITIMERSSFEKNPIDFLEAKGYKEVKKDLIIKLPKYSLFELENGRKRMLASAGELQKGNELALPSKYVNFLYLASHYEKLKGSPEDNEQKQLFVEQHKHYLDEIIEQISEFSKRVILADANLDKVLSAYNKHRDKPIREQAENIIHLFTLTNLGAPAAFKYFDTTIDRKRYTSTKEVLDATLIHQSITGLYETRIDLSQLGGDGGGGSGGSGGSGGMDPLQLLQPLEAEIKGTKLKAHWNSGATITCVPQAFLEEEVPIKNIWIKTIHGEKEQPVYYLTFKIQGRKVEAEVISSPYDYILVSPSDIPWLMKKPLQLTTLVPLQEYEERLLKQTMLTGSYKEKLQSLFLKYDALWQHWENQVGHRRIKPHHIATGTVNPRPQKQYPINPKAKASIQTVINDLLKQGVLIQQNSIMNTPVYPVPKPDGKWRMVLDYREVNKTIPLIAAQNQHSAGILSSIFRGKYKTTLDLSNGFWAHSITPESYWLTAFTWLGQQYCWTRLPQGFLNSPALFNADVVDLLKEVPNVQVYVDDIYISHDDPREHLEQLEKVFSLLLNAGYVVSLKKSEIAQHEVEFLGFNITKEGRGLTETFKQKLLNITPPRDLKQLQSILGLLNFARNFIPNFSELVKPLYNIIATAPGKYITWTTDNSQQLQNIISMLNSAENLEERNPEVRLIMKVNTSPSAGYIRFYNEFAKRPIMYLNYVYTKAEVKFTNTEKLLTTIHKGLIKALDLGMGQEILVYSPIVSMTKIQKTPLPERKALPIRWITWMSYLEDPRIQFHYDKTLPELQQVPTVTDDIIAKIKHPSEFSMVFYTDGSAIKHPNVNKSHNAGMGIAQVQFKPEFTVINTWSIPLGDHTAQLAEVAAVEFACKKALKIDGPVLIVTDSFYVAESVNKELPYWQSNGFFNNKKKPLKHVSKWKSIADCIQLKPDIIIIHEKGHQPTASTFHTEGNNLADKLATQGSYVVNAGKRTADGSEFEKRTADGSEFESPKKKAKVE

SEQ ID NO: 607 - protein, 2173 aa, synthetic construct
MPAAKRVKLDGGDKKYSIGLDIGTNSVGWAVITDEYKVPSKKFKVLGNTDRHSIKKNLIGALLFDSGETAEATRLKRTARRRYTRRKNRICYLQEIFSNEMAKVDDSFFHRLEESFLVEEDKKHERHPIFGNIVDEVAYHEKYPTIYHLRKKLVDSTDKADLRLIYLALAHMIKFRGHFLIEGDLNPDNSDVDKLFIQLVQTYNQLFEENPINASGVDAKAILSARLSKSRRLENLIAQLPGEKKNGLFGNLIALSLGLTPNFKSNFDLAEDAKLQLSKDTYDDDLDNLLAQIGDQYADLFLAAKNLSDAILLSDILRVNTEITKAPLSASMIKRYDEHHQDLTLLKALVRQQLPEKYKEIFFDQSKNGYAGYIDGGASQEEFYKFIKPILEKMDGTEELLVKLNREDLLRKQRTFDNGSIPHQIHLGELHAILRRQEDFYPFLKDNREKIEKILTFRIPYYVGPLARGNSRFAWMTRKSEETITPWNFEEVVDKGASAQSFIERMTNFDKNLPNEKVLPKHSLLYEYFTVYNELTKVKYVTEGMRKPAFLSGEQKKAIVDLLFKTNRKVTVKQLKEDYFKKIECFDSVEISGVEDRFNASLGTYHDLLKIIKDKDFLDNEENEDILEDIVLTLTLFEDREMIEERLKTYAHLFDDKVMKQLKRRRYTGWGRLSRKLINGIRDKQSGKTILDFLKSDGFANRNFMQLIHDDSLTFKEDIQKAQVSGQGDSLHEHIANLAGSPAIKKGILQTVKVVDELVKVMGRHKPENIVIEMARENQTTQKGQKNSRERMKRIEEGIKELGSQILKEHPVENTQLQNEKLYLYYLQNGRDMYVDQELDINRLSDYDVDHIVPQSFLKDDSIDNKVLTRSDKARGKSDNVPSEEVVKKMKNYWRQLLNAKLITQRKFDNLTKAERGGLSELDKAGFIKRQLVETRQITKHVAQILDSRMNTKYDENDKLIREVKVITLKSKLVSDFRKDFQFYKVREINNYHHAHDAYLNAVVGTALIKKYPKLESEFVYGDYKVYDVRKMIAKSEQEIGKATAKYFFYSNIMNFFKTEITLANGEIRKRPLIETNGETGEIVWDKGRDFATVRKVLSMPQVNIVKKTEVQTGGFSKESILPKRNSDKLIARKKDWDPKKYGGFDSPTVAYSVLVVAKVEKGKSKKLKSVKELLGITIMERSSFEKNPIDFLEAKGYKEVKKDLIIKLPKYSLFELENGRKRMLASAGELQKGNELALPSKYVNFLYLASHYEKLKGSPEDNEQKQLFVEQHKHYLDEIIEQISEFSKRVILADANLDKVLSAYNKHRDKPIREQAENIIHLFTLTNLGAPAAFKYFDTTIDRKRYTSTKEVLDATLIHQSITGLYETRIDLSQLGGDGGGGSEAAAKGGMDPLQLLQPLEAEIKGTKLKAHWNSGATITCVPQAFLEEEVPIKNIWIKTIHGEKEQPVYYLTFKIQGRKVEAEVISSPYDYILVSPSDIPWLMKKPLQLTTLVPLQEYEERLLKQTMLTGSYKEKLQSLFLKYDALWQHWENQVGHRRIKPHHIATGTVNPRPQKQYPINPKAKASIQTVINDLLKQGVLIQQNSIMNTPVYPVPKPDGKWRMVLDYREVNKTIPLIAAQNQHSAGILSSIFRGKYKTTLDLSNGFWAHSITPESYWLTAFTWLGQQYCWTRLPQGFLNSPALFNADVVDLLKEVPNVQVYVDDIYISHDDPREHLEQLEKVFSLLLNAGYVVSLKKSEIAQHEVEFLGFNITKEGRGLTETFKQKLLNITPPRDLKQLQSILGLLNFARNFIPNFSELVKPLYNIIATAPGKYITWTTDNSQQLQNIISMLNSAENLEERNPEVRLIMKVNTSPSAGYIRFYNEFAKRPIMYLNYVYTKAEVKFTNTEKLLTTIHKGLIKALDLGMGQEILVYSPIVSMTKIQKTPLPERKALPIRWITWMSYLEDPRIQFHYDKTLPELQQVPTVTDDIIAKIKHPSEFSMVFYTDGSAIKHPNVNKSHNAGMGIAQVQFKPEFTVINTWSIPLGDHTAQLAEVAAVEFACKKALKIDGPVLIVTDSFYVAESVNKELPYWQSNGFFNNKKKPLKHVSKWKSIADCIQLKPDIIIIHEKGHQPTASTFHTEGNNLADKLATQGSYVVNAGKRTADGSEFEKRTADGSEFESPKKKAKVE

SEQ ID NO: 608 - protein, 2170 aa, synthetic construct
MPAAKRVKLDGGDKKYSIGLDIGTNSVGWAVITDEYKVPSKKFKVLGNTDRHSIKKNLIGALLFDSGETAEATRLKRTARRRYTRRKNRICYLQEIFSNEMAKVDDSFFHRLEESFLVEEDKKHERHPIFGNIVDEVAYHEKYPTIYHLRKKLVDSTDKADLRLIYLALAHMIKFRGHFLIEGDLNPDNSDVDKLFIQLVQTYNQLFEENPINASGVDAKAILSARLSKSRRLENLIAQLPGEKKNGLFGNLIALSLGLTPNFKSNFDLAEDAKLQLSKDTYDDDLDNLLAQIGDQYADLFLAAKNLSDAILLSDILRVNTEITKAPLSASMIKRYDEHHQDLTLLKALVRQQLPEKYKEIFFDQSKNGYAGYIDGGASQEEFYKFIKPILEKMDGTEELLVKLNREDLLRKQRTFDNGSIPHQIHLGELHAILRRQEDFYPFLKDNREKIEKILTFRIPYYVGPLARGNSRFAWMTRKSEETITPWNFEEVVDKGASAQSFIERMTNFDKNLPNEKVLPKHSLLYEYFTVYNELTKVKYVTEGMRKPAFLSGEQKKAIVDLLFKTNRKVTVKQLKEDYFKKIECFDSVEISGVEDRFNASLGTYHDLLKIIKDKDFLDNEENEDILEDIVLTLTLFEDREMIEERLKTYAHLFDDKVMKQLKRRRYTGWGRLSRKLINGIRDKQSGKTILDFLKSDGFANRNFMQLIHDDSLTFKEDIQKAQVSGQGDSLHEHIANLAGSPAIKKGILQTVKVVDELVKVMGRHKPENIVIEMARENQTTQKGQKNSRERMKRIEEGIKELGSQILKEHPVENTQLQNEKLYLYYLQNGRDMYVDQELDINRLSDYDVDHIVPQSFLKDDSIDNKVLTRSDKARGKSDNVPSEEVVKKMKNYWRQLLNAKLITQRKFDNLTKAERGGLSELDKAGFIKRQLVETRQITKHVAQILDSRMNTKYDENDKLIREVKVITLKSKLVSDFRKDFQFYKVREINNYHHAHDAYLNAVVGTALIKKYPKLESEFVYGDYKVYDVRKMIAKSEQEIGKATAKYFFYSNIMNFFKTEITLANGEIRKRPLIETNGETGEIVWDKGRDFATVRKVLSMPQVNIVKKTEVQTGGFSKESILPKRNSDKLIARKKDWDPKKYGGFDSPTVAYSVLVVAKVEKGKSKKLKSVKELLGITIMERSSFEKNPIDFLEAKGYKEVKKDLIIKLPKYSLFELENGRKRMLASAGELQKGNELALPSKYVNFLYLASHYEKLKGSPEDNEQKQLFVEQHKHYLDEIIEQISEFSKRVILADANLDKVLSAYNKHRDKPIREQAENIIHLFTLTNLGAPAAFKYFDTTIDRKRYTSTKEVLDATLIHQSITGLYETRIDLSQLGGDGGEAAAKGGMDPLQLLQPLEAEIKGTKLKAHWNSGATITCVPQAFLEEEVPIKNIWIKTIHGEKEQPVYYLTFKIQGRKVEAEVISSPYDYILVSPSDIPWLMKKPLQLTTLVPLQEYEERLLKQTMLTGSYKEKLQSLFLKYDALWQHWENQVGHRRIKPHHIATGTVNPRPQKQYPINPKAKASIQTVINDLLKQGVLIQQNSIMNTPVYPVPKPDGKWRMVLDYREVNKTIPLIAAQNQHSAGILSSIFRGKYKTTLDLSNGFWAHSITPESYWLTAFTWLGQQYCWTRLPQGFLNSPALFNADVVDLLKEVPNVQVYVDDIYISHDDPREHLEQLEKVFSLLLNAGYVVSLKKSEIAQHEVEFLGFNITKEGRGLTETFKQKLLNITPPRDLKQLQSILGLLNFARNFIPNFSELVKPLYNIIATAPGKYITWTTDNSQQLQNIISMLNSAENLEERNPEVRLIMKVNTSPSAGYIRFYNEFAKRPIMYLNYVYTKAEVKFTNTEKLLTTIHKGLIKALDLGMGQEILVYSPIVSMTKIQKTPLPERKALPIRWITWMSYLEDPRIQFHYDKTLPELQQVPTVTDDIIAKIKHPSEFSMVFYTDGSAIKHPNVNKSHNAGMGIAQVQFKPEFTVINTWSIPLGDHTAQLAEVAAVEFACKKALKIDGPVLIVTDSFYVAESVNKELPYWQSNGFFNNKKKPLKHVSKWKSIADCIQLKPDIIIIHEKGHQPTASTFHTEGNNLADKLATQGSYVVNAGKRTADGSEFEKRTADGSEFESPKKKAKVE

SEQ ID NO: 609 - protein, 2174 aa, synthetic construct
MPAAKRVKLDGGDKKYSIGLDIGTNSVGWAVITDEYKVPSKKFKVLGNTDRHSIKKNLIGALLFDSGETAEATRLKRTARRRYTRRKNRICYLQEIFSNEMAKVDDSFFHRLEESFLVEEDKKHERHPIFGNIVDEVAYHEKYPTIYHLRKKLVDSTDKADLRLIYLALAHMIKFRGHFLIEGDLNPDNSDVDKLFIQLVQTYNQLFEENPINASGVDAKAILSARLSKSRRLENLIAQLPGEKKNGLFGNLIALSLGLTPNFKSNFDLAEDAKLQLSKDTYDDDLDNLLAQIGDQYADLFLAAKNLSDAILLSDILRVNTEITKAPLSASMIKRYDEHHQDLTLLKALVRQQLPEKYKEIFFDQSKNGYAGYIDGGASQEEFYKFIKPILEKMDGTEELLVKLNREDLLRKQRTFDNGSIPHQIHLGELHAILRRQEDFYPFLKDNREKIEKILTFRIPYYVGPLARGNSRFAWMTRKSEETITPWNFEEVVDKGASAQSFIERMTNFDKNLPNEKVLPKHSLLYEYFTVYNELTKVKYVTEGMRKPAFLSGEQKKAIVDLLFKTNRKVTVKQLKEDYFKKIECFDSVEISGVEDRFNASLGTYHDLLKIIKDKDFLDNEENEDILEDIVLTLTLFEDREMIEERLKTYAHLFDDKVMKQLKRRRYTGWGRLSRKLINGIRDKQSGKTILDFLKSDGFANRNFMQLIHDDSLTFKEDIQKAQVSGQGDSLHEHIANLAGSPAIKKGILQTVKVVDELVKVMGRHKPENIVIEMARENQTTQKGQKNSRERMKRIEEGIKELGSQILKEHPVENTQLQNEKLYLYYLQNGRDMYVDQELDINRLSDYDVDHIVPQSFLKDDSIDNKVLTRSDKARGKSDNVPSEEVVKKMKNYWRQLLNAKLITQRKFDNLTKAERGGLSELDKAGFIKRQLVETRQITKHVAQILDSRMNTKYDENDKLIREVKVITLKSKLVSDFRKDFQFYKVREINNYHHAHDAYLNAVVGTALIKKYPKLESEFVYGDYKVYDVRKMIAKSEQEIGKATAKYFFYSNIMNFFKTEITLANGEIRKRPLIETNGETGEIVWDKGRDFATVRKVLSMPQVNIVKKTEVQTGGFSKESILPKRNSDKLIARKKDWDPKKYGGFDSPTVAYSVLVVAKVEKGKSKKLKSVKELLGITIMERSSFEKNPIDFLEAKGYKEVKKDLIIKLPKYSLFELENGRKRMLASAGELQKGNELALPSKYVNFLYLASHYEKLKGSPEDNEQKQLFVEQHKHYLDEIIEQISEFSKRVILADANLDKVLSAYNKHRDKPIREQAENIIHLFTLTNLGAPAAFKYFDTTIDRKRYTSTKEVLDATLIHQSITGLYETRIDLSQLGGDGGGGSPAPGSSGGMDPLQLLQPLEAEIKGTKLKAHWNSGATITCVPQAFLEEEVPIKNIWIKTIHGEKEQPVYYLTFKIQGRKVEAEVISSPYDYILVSPSDIPWLMKKPLQLTTLVPLQEYEERLLKQTMLTGSYKEKLQSLFLKYDALWQHWENQVGHRRIKPHHIATGTVNPRPQKQYPINPKAKASIQTVINDLLKQGVLIQQNSIMNTPVYPVPKPDGKWRMVLDYREVNKTIPLIAAQNQHSAGILSSIFRGKYKTTLDLSNGFWAHSITPESYWLTAFTWLGQQYCWTRLPQGFLNSPALFNADVVDLLKEVPNVQVYVDDIYISHDDPREHLEQLEKVFSLLLNAGYVVSLKKSEIAQHEVEFLGFNITKEGRGLTETFKQKLLNITPPRDLKQLQSILGLLNFARNFIPNFSELVKPLYNIIATAPGKYITWTTDNSQQLQNIISMLNSAENLEERNPEVRLIMKVNTSPSAGYIRFYNEFAKRPIMYLNYVYTKAEVKFTNTEKLLTTIHKGLIKALDLGMGQEILVYSPIVSMTKIQKTPLPERKALPIRWITWMSYLEDPRIQFHYDKTLPELQQVPTVTDDIIAKIKHPSEFSMVFYTDGSAIKHPNVNKSHNAGMGIAQVQFKPEFTVINTWSIPLGDHTAQLAEVAAVEFACKKALKIDGPVLIVTDSFYVAESVNKELPYWQSNGFFNNKKKPLKHVSKWKSIADCIQLKPDIIIIHEKGHQPTASTFHTEGNNLADKLATQGSYVVNAGKRTADGSEFEKRTADGSEFESPKKKAKVE

SEQ ID NO: 610 - protein, 2174 aa, synthetic construct
MPAAKRVKLDGGDKKYSIGLDIGTNSVGWAVITDEYKVPSKKFKVLGNTDRHSIKKNLIGALLFDSGETAEATRLKRTARRRYTRRKNRICYLQEIFSNEMAKVDDSFFHRLEESFLVEEDKKHERHPIFGNIVDEVAYHEKYPTIYHLRKKLVDSTDKADLRLIYLALAHMIKFRGHFLIEGDLNPDNSDVDKLFIQLVQTYNQLFEENPINASGVDAKAILSARLSKSRRLENLIAQLPGEKKNGLFGNLIALSLGLTPNFKSNFDLAEDAKLQLSKDTYDDDLDNLLAQIGDQYADLFLAAKNLSDAILLSDILRVNTEITKAPLSASMIKRYDEHHQDLTLLKALVRQQLPEKYKEIFFDQSKNGYAGYIDGGASQEEFYKFIKPILEKMDGTEELLVKLNREDLLRKQRTFDNGSIPHQIHLGELHAILRRQEDFYPFLKDNREKIEKILTFRIPYYVGPLARGNSRFAWMTRKSEETITPWNFEEVVDKGASAQSFIERMTNFDKNLPNEKVLPKHSLLYEYFTVYNELTKVKYVTEGMRKPAFLSGEQKKAIVDLLFKTNRKVTVKQLKEDYFKKIECFDSVEISGVEDRFNASLGTYHDLLKIIKDKDFLDNEENEDILEDIVLTLTLFEDREMIEERLKTYAHLFDDKVMKQLKRRRYTGWGRLSRKLINGIRDKQSGKTILDFLKSDGFANRNFMQLIHDDSLTFKEDIQKAQVSGQGDSLHEHIANLAGSPAIKKGILQTVKVVDELVKVMGRHKPENIVIEMARENQTTQKGQKNSRERMKRIEEGIKELGSQILKEHPVENTQLQNEKLYLYYLQNGRDMYVDQELDINRLSDYDVDHIVPQSFLKDDSIDNKVLTRSDKARGKSDNVPSEEVVKKMKNYWRQLLNAKLITQRKFDNLTKAERGGLSELDKAGFIKRQLVETRQITKHVAQILDSRMNTKYDENDKLIREVKVITLKSKLVSDFRKDFQFYKVREINNYHHAHDAYLNAVVGTALIKKYPKLESEFVYGDYKVYDVRKMIAKSEQEIGKATAKYFFYSNIMNFFKTEITLANGEIRKRPLIETNGETGEIVWDKGRDFATVRKVLSMPQVNIVKKTEVQTGGFSKESILPKRNSDKLIARKKDWDPKKYGGFDSPTVAYSVLVVAKVEKGKSKKLKSVKELLGITIMERSSFEKNPIDFLEAKGYKEVKKDLIIKLPKYSLFELENGRKRMLASAGELQKGNELALPSKYVNFLYLASHYEKLKGSPEDNEQKQLFVEQHKHYLDEIIEQISEFSKRVILADANLDKVLSAYNKHRDKPIREQAENIIHLFTLTNLGAPAAFKYFDTTIDRKRYTSTKEVLDATLIHQSITGLYETRIDLSQLGGDGGGSSGGGGGSGGMDPLQLLQPLEAEIKGTKLKAHWNSGATITCVPQAFLEEEVPIKNIWIKTIHGEKEQPVYYLTFKIQGRKVEAEVISSPYDYILVSPSDIPWLMKKPLQLTTLVPLQEYEERLLKQTMLTGSYKEKLQSLFLKYDALWQHWENQVGHRRIKPHHIATGTVNPRPQKQYPINPKAKASIQTVINDLLKQGVLIQQNSIMNTPVYPVPKPDGKWRMVLDYREVNKTIPLIAAQNQHSAGILSSIFRGKYKTTLDLSNGFWAHSITPESYWLTAFTWLGQQYCWTRLPQGFLNSPALFNADVVDLLKEVPNVQVYVDDIYISHDDPREHLEQLEKVFSLLLNAGYVVSLKKSEIAQHEVEFLGFNITKEGRGLTETFKQKLLNITPPRDLKQLQSILGLLNFARNFIPNFSELVKPLYNIIATAPGKYITWTTDNSQQLQNIISMLNSAENLEERNPEVRLIMKVNTSPSAGYIRFYNEFAKRPIMYLNYVYTKAEVKFTNTEKLLTTIHKGLIKALDLGMGQEILVYSPIVSMTKIQKTPLPERKALPIRWITWMSYLEDPRIQFHYDKTLPELQQVPTVTDDIIAKIKHPSEFSMVFYTDGSAIKHPNVNKSHNAGMGIAQVQFKPEFTVINTWSIPLGDHTAQLAEVAAVEFACKKALKIDGPVLIVTDSFYVAESVNKELPYWQSNGFFNNKKKPLKHVSKWKSIADCIQLKPDIIIIHEKGHQPTASTFHTEGNNLADKLATQGSYVVNAGKRTADGSEFEKRTADGSEFESPKKKAKVE

SEQ ID NO: 611 - protein, 2180 aa, synthetic construct
MPAAKRVKLDGGDKKYSIGLDIGTNSVGWAVITDEYKVPSKKFKVLGNTDRHSIKKNLIGALLFDSGETAEATRLKRTARRRYTRRKNRICYLQEIFSNEMAKVDDSFFHRLEESFLVEEDKKHERHPIFGNIVDEVAYHEKYPTIYHLRKKLVDSTDKADLRLIYLALAHMIKFRGHFLIEGDLNPDNSDVDKLFIQLVQTYNQLFEENPINASGVDAKAILSARLSKSRRLENLIAQLPGEKKNGLFGNLIALSLGLTPNFKSNFDLAEDAKLQLSKDTYDDDLDNLLAQIGDQYADLFLAAKNLSDAILLSDILRVNTEITKAPLSASMIKRYDEHHQDLTLLKALVRQQLPEKYKEIFFDQSKNGYAGYIDGGASQEEFYKFIKPILEKMDGTEELLVKLNREDLLRKQRTFDNGSIPHQIHLGELHAILRRQEDFYPFLKDNREKIEKILTFRIPYYVGPLARGNSRFAWMTRKSEETITPWNFEEVVDKGASAQSFIERMTNFDKNLPNEKVLPKHSLLYEYFTVYNELTKVKYVTEGMRKPAFLSGEQKKAIVDLLFKTNRKVTVKQLKEDYFKKIECFDSVEISGVEDRFNASLGTYHDLLKIIKDKDFLDNEENEDILEDIVLTLTLFEDREMIEERLKTYAHLFDDKVMKQLKRRRYTGWGRLSRKLINGIRDKQSGKTILDFLKSDGFANRNFMQLIHDDSLTFKEDIQKAQVSGQGDSLHEHIANLAGSPAIKKGILQTVKVVDELVKVMGRHKPENIVIEMARENQTTQKGQKNSRERMKRIEEGIKELGSQILKEHPVENTQLQNEKLYLYYLQNGRDMYVDQELDINRLSDYDVDHIVPQSFLKDDSIDNKVLTRSDKARGKSDNVPSEEVVKKMKNYWRQLLNAKLITQRKFDNLTKAERGGLSELDKAGFIKRQLVETRQITKHVAQILDSRMNTKYDENDKLIREVKVITLKSKLVSDFRKDFQFYKVREINNYHHAHDAYLNAVVGTALIKKYPKLESEFVYGDYKVYDVRKMIAKSEQEIGKATAKYFFYSNIMNFFKTEITLANGEIRKRPLIETNGETGEIVWDKGRDFATVRKVLSMPQVNIVKKTEVQTGGFSKESILPKRNSDKLIARKKDWDPKKYGGFDSPTVAYSVLVVAKVEKGKSKKLKSVKELLGITIMERSSFEKNPIDFLEAKGYKEVKKDLIIKLPKYSLFELENGRKRMLASAGELQKGNELALPSKYVNFLYLASHYEKLKGSPEDNEQKQLFVEQHKHYLDEIIEQISEFSKRVILADANLDKVLSAYNKHRDKPIREQAENIIHLFTLTNLGAPAAFKYFDTTIDRKRYTSTKEVLDATLIHQSITGLYETRIDLSQLGGDGGGGGGSEAAAKGGGGSGGMDPLQLLQPLEAEIKGTKLKAHWNSGATITCVPQAFLEEEVPIKNIWIKTIHGEKEQPVYYLTFKIQGRKVEAEVISSPYDYILVSPSDIPWLMKKPLQLTTLVPLQEYEERLLKQTMLTGSYKEKLQSLFLKYDALWQHWENQVGHRRIKPHHIATGTVNPRPQKQYPINPKAKASIQTVINDLLKQGVLIQQNSIMNTPVYPVPKPDGKWRMVLDYREVNKTIPLIAAQNQHSAGILSSIFRGKYKTTLDLSNGFWAHSITPESYWLTAFTWLGQQYCWTRLPQGFLNSPALFNADVVDLLKEVPNVQVYVDDIYISHDDPREHLEQLEKVFSLLLNAGYVVSLKKSEIAQHEVEFLGFNITKEGRGLTETFKQKLLNITPPRDLKQLQSILGLLNFARNFIPNFSELVKPLYNIIATAPGKYITWTTDNSQQLQNIISMLNSAENLEERNPEVRLIMKVNTSPSAGYIRFYNEFAKRPIMYLNYVYTKAEVKFTNTEKLLTTIHKGLIKALDLGMGQEILVYSPIVSMTKIQKTPLPERKALPIRWITWMSYLEDPRIQFHYDKTLPELQQVPTVTDDIIAKIKHPSEFSMVFYTDGSAIKHPNVNKSHNAGMGIAQVQFKPEFTVINTWSIPLGDHTAQLAEVAAVEFACKKALKIDGPVLIVTDSFYVAESVNKELPYWQSNGFFNNKKKPLKHVSKWKSIADCIQLKPDIIIIHEKGHQPTASTFHTEGNNLADKLATQGSYVVNAGKRTADGSEFEKRTADGSEFESPKKKAKVE

SEQ ID NO: 612 - protein, 2174 aa, synthetic construct
MPAAKRVKLDGGDKKYSIGLDIGTNSVGWAVITDEYKVPSKKFKVLGNTDRHSIKKNLIGALLFDSGETAEATRLKRTARRRYTRRKNRICYLQEIFSNEMAKVDDSFFHRLEESFLVEEDKKHERHPIFGNIVDEVAYHEKYPTIYHLRKKLVDSTDKADLRLIYLALAHMIKFRGHFLIEGDLNPDNSDVDKLFIQLVQTYNQLFEENPINASGVDAKAILSARLSKSRRLENLIAQLPGEKKNGLFGNLIALSLGLTPNFKSNFDLAEDAKLQLSKDTYDDDLDNLLAQIGDQYADLFLAAKNLSDAILLSDILRVNTEITKAPLSASMIKRYDEHHQDLTLLKALVRQQLPEKYKEIFFDQSKNGYAGYIDGGASQEEFYKFIKPILEKMDGTEELLVKLNREDLLRKQRTFDNGSIPHQIHLGELHAILRRQEDFYPFLKDNREKIEKILTFRIPYYVGPLARGNSRFAWMTRKSEETITPWNFEEVVDKGASAQSFIERMTNFDKNLPNEKVLPKHSLLYEYFTVYNELTKVKYVTEGMRKPAFLSGEQKKAIVDLLFKTNRKVTVKQLKEDYFKKIECFDSVEISGVEDRFNASLGTYHDLLKIIKDKDFLDNEENEDILEDIVLTLTLFEDREMIEERLKTYAHLFDDKVMKQLKRRRYTGWGRLSRKLINGIRDKQSGKTILDFLKSDGFANRNFMQLIHDDSLTFKEDIQKAQVSGQGDSLHEHIANLAGSPAIKKGILQTVKVVDELVKVMGRHKPENIVIEMARENQTTQKGQKNSRERMKRIEEGIKELGSQILKEHPVENTQLQNEKLYLYYLQNGRDMYVDQELDINRLSDYDVDHIVPQSFLKDDSIDNKVLTRSDKARGKSDNVPSEEVVKKMKNYWRQLLNAKLITQRKFDNLTKAERGGLSELDKAGFIKRQLVETRQITKHVAQILDSRMNTKYDENDKLIREVKVITLKSKLVSDFRKDFQFYKVREINNYHHAHDAYLNAVVGTALIKKYPKLESEFVYGDYKVYDVRKMIAKSEQEIGKATAKYFFYSNIMNFFKTEITLANGEIRKRPLIETNGETGEIVWDKGRDFATVRKVLSMPQVNIVKKTEVQTGGFSKESILPKRNSDKLIARKKDWDPKKYGGFDSPTVAYSVLVVAKVEKGKSKKLKSVKELLGITIMERSSFEKNPIDFLEAKGYKEVKKDLIIKLPKYSLFELENGRKRMLASAGELQKGNELALPSKYVNFLYLASHYEKLKGSPEDNEQKQLFVEQHKHYLDEIIEQISEFSKRVILADANLDKVLSAYNKHRDKPIREQAENIIHLFTLTNLGAPAAFKYFDTTIDRKRYTSTKEVLDATLIHQSITGLYETRIDLSQLGGDGGGSSPAPGGGGGMDPLQLLQPLEAEIKGTKLKAHWNSGATITCVPQAFLEEEVPIKNIWIKTIHGEKEQPVYYLTFKIQGRKVEAEVISSPYDYILVSPSDIPWLMKKPLQLTTLVPLQEYEERLLKQTMLTGSYKEKLQSLFLKYDALWQHWENQVGHRRIKPHHIATGTVNPRPQKQYPINPKAKASIQTVINDLLKQGVLIQQNSIMNTPVYPVPKPDGKWRMVLDYREVNKTIPLIAAQNQHSAGILSSIFRGKYKTTLDLSNGFWAHSITPESYWLTAFTWLGQQYCWTRLPQGFLNSPALFNADVVDLLKEVPNVQVYVDDIYISHDDPREHLEQLEKVFSLLLNAGYVVSLKKSEIAQHEVEFLGFNITKEGRGLTETFKQKLLNITPPRDLKQLQSILGLLNFARNFIPNFSELVKPLYNIIATAPGKYITWTTDNSQQLQNIISMLNSAENLEERNPEVRLIMKVNTSPSAGYIRFYNEFAKRPIMYLNYVYTKAEVKFTNTEKLLTTIHKGLIKALDLGMGQEILVYSPIVSMTKIQKTPLPERKALPIRWITWMSYLEDPRIQFHYDKTLPELQQVPTVTDDIIAKIKHPSEFSMVFYTDGSAIKHPNVNKSHNAGMGIAQVQFKPEFTVINTWSIPLGDHTAQLAEVAAVEFACKKALKIDGPVLIVTDSFYVAESVNKELPYWQSNGFFNNKKKPLKHVSKWKSIADCIQLKPDIIIIHEKGHQPTASTFHTEGNNLADKLATQGSYVVNAGKRTADGSEFEKRTADGSEFESPKKKAKVE

SEQ ID NO: 613 - protein, 2176 aa, synthetic construct
MPAAKRVKLDGGDKKYSIGLDIGTNSVGWAVITDEYKVPSKKFKVLGNTDRHSIKKNLIGALLFDSGETAEATRLKRTARRRYTRRKNRICYLQEIFSNEMAKVDDSFFHRLEESFLVEEDKKHERHPIFGNIVDEVAYHEKYPTIYHLRKKLVDSTDKADLRLIYLALAHMIKFRGHFLIEGDLNPDNSDVDKLFIQLVQTYNQLFEENPINASGVDAKAILSARLSKSRRLENLIAQLPGEKKNGLFGNLIALSLGLTPNFKSNFDLAEDAKLQLSKDTYDDDLDNLLAQIGDQYADLFLAAKNLSDAILLSDILRVNTEITKAPLSASMIKRYDEHHQDLTLLKALVRQQLPEKYKEIFFDQSKNGYAGYIDGGASQEEFYKFIKPILEKMDGTEELLVKLNREDLLRKQRTFDNGSIPHQIHLGELHAILRRQEDFYPFLKDNREKIEKILTFRIPYYVGPLARGNSRFAWMTRKSEETITPWNFEEVVDKGASAQSFIERMTNFDKNLPNEKVLPKHSLLYEYFTVYNELTKVKYVTEGMRKPAFLSGEQKKAIVDLLFKTNRKVTVKQLKEDYFKKIECFDSVEISGVEDRFNASLGTYHDLLKIIKDKDFLDNEENEDILEDIVLTLTLFEDREMIEERLKTYAHLFDDKVMKQLKRRRYTGWGRLSRKLINGIRDKQSGKTILDFLKSDGFANRNFMQLIHDDSLTFKEDIQKAQVSGQGDSLHEHIANLAGSPAIKKGILQTVKVVDELVKVMGRHKPENIVIEMARENQTTQKGQKNSRERMKRIEEGIKELGSQILKEHPVENTQLQNEKLYLYYLQNGRDMYVDQELDINRLSDYDVDHIVPQSFLKDDSIDNKVLTRSDKARGKSDNVPSEEVVKKMKNYWRQLLNAKLITQRKFDNLTKAERGGLSELDKAGFIKRQLVETRQITKHVAQILDSRMNTKYDENDKLIREVKVITLKSKLVSDFRKDFQFYKVREINNYHHAHDAYLNAVVGTALIKKYPKLESEFVYGDYKVYDVRKMIAKSEQEIGKATAKYFFYSNIMNFFKTEITLANGEIRKRPLIETNGETGEIVWDKGRDFATVRKVLSMPQVNIVKKTEVQTGGFSKESILPKRNSDKLIARKKDWDPKKYGGFDSPTVAYSVLVVAKVEKGKSKKLKSVKELLGITIMERSSFEKNPIDFLEAKGYKEVKKDLIIKLPKYSLFELENGRKRMLASAGELQKGNELALPSKYVNFLYLASHYEKLKGSPEDNEQKQLFVEQHKHYLDEIIEQISEFSKRVILADANLDKVLSAYNKHRDKPIREQAENIIHLFTLTNLGAPAAFKYFDTTIDRKRYTSTKEVLDATLIHQSITGLYETRIDLSQLGGDGGGGGGSSEAAAKGGMDPLQLLQPLEAEIKGTKLKAHWNSGATITCVPQAFLEEEVPIKNIWIKTIHGEKEQPVYYLTFKIQGRKVEAEVISSPYDYILVSPSDIPWLMKKPLQLTTLVPLQEYEERLLKQTMLTGSYKEKLQSLFLKYDALWQHWENQVGHRRIKPHHIATGTVNPRPQKQYPINPKAKASIQTVINDLLKQGVLIQQNSIMNTPVYPVPKPDGKWRMVLDYREVNKTIPLIAAQNQHSAGILSSIFRGKYKTTLDLSNGFWAHSITPESYWLTAFTWLGQQYCWTRLPQGFLNSPALFNADVVDLLKEVPNVQVYVDDIYISHDDPREHLEQLEKVFSLLLNAGYVVSLKKSEIAQHEVEFLGFNITKEGRGLTETFKQKLLNITPPRDLKQLQSILGLLNFARNFIPNFSELVKPLYNIIATAPGKYITWTTDNSQQLQNIISMLNSAENLEERNPEVRLIMKVNTSPSAGYIRFYNEFAKRPIMYLNYVYTKAEVKFTNTEKLLTTIHKGLIKALDLGMGQEILVYSPIVSMTKIQKTPLPERKALPIRWITWMSYLEDPRIQFHYDKTLPELQQVPTVTDDIIAKIKHPSEFSMVFYTDGSAIKHPNVNKSHNAGMGIAQVQFKPEFTVINTWSIPLGDHTAQLAEVAAVEFACKKALKIDGPVLIVTDSFYVAESVNKELPYWQSNGFFNNKKKPLKHVSKWKSIADCIQLKPDIIIIHEKGHQPTASTFHTEGNNLADKLATQGSYVVNAGKRTADGSEFEKRTADGSEFESPKKKAKVE

SEQ ID NO: 614 - protein, 2176 aa, synthetic construct
MPAAKRVKLDGGDKKYSIGLDIGTNSVGWAVITDEYKVPSKKFKVLGNTDRHSIKKNLIGALLFDSGETAEATRLKRTARRRYTRRKNRICYLQEIFSNEMAKVDDSFFHRLEESFLVEEDKKHERHPIFGNIVDEVAYHEKYPTIYHLRKKLVDSTDKADLRLIYLALAHMIKFRGHFLIEGDLNPDNSDVDKLFIQLVQTYNQLFEENPINASGVDAKAILSARLSKSRRLENLIAQLPGEKKNGLFGNLIALSLGLTPNFKSNFDLAEDAKLQLSKDTYDDDLDNLLAQIGDQYADLFLAAKNLSDAILLSDILRVNTEITKAPLSASMIKRYDEHHQDLTLLKALVRQQLPEKYKEIFFDQSKNGYAGYIDGGASQEEFYKFIKPILEKMDGTEELLVKLNREDLLRKQRTFDNGSIPHQIHLGELHAILRRQEDFYPFLKDNREKIEKILTFRIPYYVGPLARGNSRFAWMTRKSEETITPWNFEEVVDKGASAQSFIERMTNFDKNLPNEKVLPKHSLLYEYFTVYNELTKVKYVTEGMRKPAFLSGEQKKAIVDLLFKTNRKVTVKQLKEDYFKKIECFDSVEISGVEDRFNASLGTYHDLLKIIKDKDFLDNEENEDILEDIVLTLTLFEDREMIEERLKTYAHLFDDKVMKQLKRRRYTGWGRLSRKLINGIRDKQSGKTILDFLKSDGFANRNFMQLIHDDSLTFKEDIQKAQVSGQGDSLHEHIANLAGSPAIKKGILQTVKVVDELVKVMGRHKPENIVIEMARENQTTQKGQKNSRERMKRIEEGIKELGSQILKEHPVENTQLQNEKLYLYYLQNGRDMYVDQELDINRLSDYDVDHIVPQSFLKDDSIDNKVLTRSDKARGKSDNVPSEEVVKKMKNYWRQLLNAKLITQRKFDNLTKAERGGLSELDKAGFIKRQLVETRQITKHVAQILDSRMNTKYDENDKLIREVKVITLKSKLVSDFRKDFQFYKVREINNYHHAHDAYLNAVVGTALIKKYPKLESEFVYGDYKVYDVRKMIAKSEQEIGKATAKYFFYSNIMNFFKTEITLANGEIRKRPLIETNGETGEIVWDKGRDFATVRKVLSMPQVNIVKKTEVQTGGFSKESILPKRNSDKLIARKKDWDPKKYGGFDSPTVAYSVLVVAKVEKGKSKKLKSVKELLGITIMERSSFEKNPIDFLEAKGYKEVKKDLIIKLPKYSLFELENGRKRMLASAGELQKGNELALPSKYVNFLYLASHYEKLKGSPEDNEQKQLFVEQHKHYLDEIIEQISEFSKRVILADANLDKVLSAYNKHRDKPIREQAENIIHLFTLTNLGAPAAFKYFDTTIDRKRYTSTKEVLDATLIHQSITGLYETRIDLSQLGGDGGGGSGSSEAAAKGGMDPLQLLQPLEAEIKGTKLKAHWNSGATITCVPQAFLEEEVPIKNIWIKTIHGEKEQPVYYLTFKIQGRKVEAEVISSPYDYILVSPSDIPWLMKKPLQLTTLVPLQEYEERLLKQTMLTGSYKEKLQSLFLKYDALWQHWENQVGHRRIKPHHIATGTVNPRPQKQYPINPKAKASIQTVINDLLKQGVLIQQNSIMNTPVYPVPKPDGKWRMVLDYREVNKTIPLIAAQNQHSAGILSSIFRGKYKTTLDLSNGFWAHSITPESYWLTAFTWLGQQYCWTRLPQGFLNSPALFNADVVDLLKEVPNVQVYVDDIYISHDDPREHLEQLEKVFSLLLNAGYVVSLKKSEIAQHEVEFLGFNITKEGRGLTETFKQKLLNITPPRDLKQLQSILGLLNFARNFIPNFSELVKPLYNIIATAPGKYITWTTDNSQQLQNIISMLNSAENLEERNPEVRLIMKVNTSPSAGYIRFYNEFAKRPIMYLNYVYTKAEVKFTNTEKLLTTIHKGLIKALDLGMGQEILVYSPIVSMTKIQKTPLPERKALPIRWITWMSYLEDPRIQFHYDKTLPELQQVPTVTDDIIAKIKHPSEFSMVFYTDGSAIKHPNVNKSHNAGMGIAQVQFKPEFTVINTWSIPLGDHTAQLAEVAAVEFACKKALKIDGPVLIVTDSFYVAESVNKELPYWQSNGFFNNKKKPLKHVSKWKSIADCIQLKPDIIIIHEKGHQPTASTFHTEGNNLADKLATQGSYVVNAGKRTADGSEFEKRTADGSEFESPKKKAKVE

SEQ ID NO: 615 - protein, 2185 aa, synthetic construct
MPAAKRVKLDGGDKKYSIGLDIGTNSVGWAVITDEYKVPSKKFKVLGNTDRHSIKKNLIGALLFDSGETAEATRLKRTARRRYTRRKNRICYLQEIFSNEMAKVDDSFFHRLEESFLVEEDKKHERHPIFGNIVDEVAYHEKYPTIYHLRKKLVDSTDKADLRLIYLALAHMIKFRGHFLIEGDLNPDNSDVDKLFIQLVQTYNQLFEENPINASGVDAKAILSARLSKSRRLENLIAQLPGEKKNGLFGNLIALSLGLTPNFKSNFDLAEDAKLQLSKDTYDDDLDNLLAQIGDQYADLFLAAKNLSDAILLSDILRVNTEITKAPLSASMIKRYDEHHQDLTLLKALVRQQLPEKYKEIFFDQSKNGYAGYIDGGASQEEFYKFIKPILEKMDGTEELLVKLNREDLLRKQRTFDNGSIPHQIHLGELHAILRRQEDFYPFLKDNREKIEKILTFRIPYYVGPLARGNSRFAWMTRKSEETITPWNFEEVVDKGASAQSFIERMTNFDKNLPNEKVLPKHSLLYEYFTVYNELTKVKYVTEGMRKPAFLSGEQKKAIVDLLFKTNRKVTVKQLKEDYFKKIECFDSVEISGVEDRFNASLGTYHDLLKIIKDKDFLDNEENEDILEDIVLTLTLFEDREMIEERLKTYAHLFDDKVMKQLKRRRYTGWGRLSRKLINGIRDKQSGKTILDFLKSDGFANRNFMQLIHDDSLTFKEDIQKAQVSGQGDSLHEHIANLAGSPAIKKGILQTVKVVDELVKVMGRHKPENIVIEMARENQTTQKGQKNSRERMKRIEEGIKELGSQILKEHPVENTQLQNEKLYLYYLQNGRDMYVDQELDINRLSDYDVDHIVPQSFLKDDSIDNKVLTRSDKARGKSDNVPSEEVVKKMKNYWRQLLNAKLITQRKFDNLTKAERGGLSELDKAGFIKRQLVETRQITKHVAQILDSRMNTKYDENDKLIREVKVITLKSKLVSDFRKDFQFYKVREINNYHHAHDAYLNAVVGTALIKKYPKLESEFVYGDYKVYDVRKMIAKSEQEIGKATAKYFFYSNIMNFFKTEITLANGEIRKRPLIETNGETGEIVWDKGRDFATVRKVLSMPQVNIVKKTEVQTGGFSKESILPKRNSDKLIARKKDWDPKKYGGFDSPTVAYSVLVVAKVEKGKSKKLKSVKELLGITIMERSSFEKNPIDFLEAKGYKEVKKDLIIKLPKYSLFELENGRKRMLASAGELQKGNELALPSKYVNFLYLASHYEKLKGSPEDNEQKQLFVEQHKHYLDEIIEQISEFSKRVILADANLDKVLSAYNKHRDKPIREQAENIIHLFTLTNLGAPAAFKYFDTTIDRKRYTSTKEVLDATLIHQSITGLYETRIDLSQLGGDGGGGGGSGGGGSGGGGSGGGGSGGMDPLQLLQPLEAEIKGTKLKAHWNSGATITCVPQAFLEEEVPIKNIWIKTIHGEKEQPVYYLTFKIQGRKVEAEVISSPYDYILVSPSDIPWLMKKPLQLTTLVPLQEYEERLLKQTMLTGSYKEKLQSLFLKYDALWQHWENQVGHRRIKPHHIATGTVNPRPQKQYPINPKAKASIQTVINDLLKQGVLIQQNSIMNTPVYPVPKPDGKWRMVLDYREVNKTIPLIAAQNQHSAGILSSIFRGKYKTTLDLSNGFWAHSITPESYWLTAFTWLGQQYCWTRLPQGFLNSPALFNADVVDLLKEVPNVQVYVDDIYISHDDPREHLEQLEKVFSLLLNAGYVVSLKKSEIAQHEVEFLGFNITKEGRGLTETFKQKLLNITPPRDLKQLQSILGLLNFARNFIPNFSELVKPLYNIIATAPGKYITWTTDNSQQLQNIISMLNSAENLEERNPEVRLIMKVNTSPSAGYIRFYNEFAKRPIMYLNYVYTKAEVKFTNTEKLLTTIHKGLIKALDLGMGQEILVYSPIVSMTKIQKTPLPERKALPIRWITWMSYLEDPRIQFHYDKTLPELQQVPTVTDDIIAKIKHPSEFSMVFYTDGSAIKHPNVNKSHNAGMGIAQVQFKPEFTVINTWSIPLGDHTAQLAEVAAVEFACKKALKIDGPVLIVTDSFYVAESVNKELPYWQSNGFFNNKKKPLKHVSKWKSIADCIQLKPDIIIIHEKGHQPTASTFHTEGNNLADKLATQGSYVVNAGKRTADGSEFEKRTADGSEFESPKKKAKVE

SEQ ID NO: 616 - protein, 2176 aa, synthetic construct
MPAAKRVKLDGGDKKYSIGLDIGTNSVGWAVITDEYKVPSKKFKVLGNTDRHSIKKNLIGALLFDSGETAEATRLKRTARRRYTRRKNRICYLQEIFSNEMAKVDDSFFHRLEESFLVEEDKKHERHPIFGNIVDEVAYHEKYPTIYHLRKKLVDSTDKADLRLIYLALAHMIKFRGHFLIEGDLNPDNSDVDKLFIQLVQTYNQLFEENPINASGVDAKAILSARLSKSRRLENLIAQLPGEKKNGLFGNLIALSLGLTPNFKSNFDLAEDAKLQLSKDTYDDDLDNLLAQIGDQYADLFLAAKNLSDAILLSDILRVNTEITKAPLSASMIKRYDEHHQDLTLLKALVRQQLPEKYKEIFFDQSKNGYAGYIDGGASQEEFYKFIKPILEKMDGTEELLVKLNREDLLRKQRTFDNGSIPHQIHLGELHAILRRQEDFYPFLKDNREKIEKILTFRIPYYVGPLARGNSRFAWMTRKSEETITPWNFEEVVDKGASAQSFIERMTNFDKNLPNEKVLPKHSLLYEYFTVYNELTKVKYVTEGMRKPAFLSGEQKKAIVDLLFKTNRKVTVKQLKEDYFKKIECFDSVEISGVEDRFNASLGTYHDLLKIIKDKDFLDNEENEDILEDIVLTLTLFEDREMIEERLKTYAHLFDDKVMKQLKRRRYTGWGRLSRKLINGIRDKQSGKTILDFLKSDGFANRNFMQLIHDDSLTFKEDIQKAQVSGQGDSLHEHIANLAGSPAIKKGILQTVKVVDELVKVMGRHKPENIVIEMARENQTTQKGQKNSRERMKRIEEGIKELGSQILKEHPVENTQLQNEKLYLYYLQNGRDMYVDQELDINRLSDYDVDHIVPQSFLKDDSIDNKVLTRSDKARGKSDNVPSEEVVKKMKNYWRQLLNAKLITQRKFDNLTKAERGGLSELDKAGFIKRQLVETRQITKHVAQILDSRMNTKYDENDKLIREVKVITLKSKLVSDFRKDFQFYKVREINNYHHAHDAYLNAVVGTALIKKYPKLESEFVYGDYKVYDVRKMIAKSEQEIGKATAKYFFYSNIMNFFKTEITLANGEIRKRPLIETNGETGEIVWDKGRDFATVRKVLSMPQVNIVKKTEVQTGGFSKESILPKRNSDKLIARKKDWDPKKYGGFDSPTVAYSVLVVAKVEKGKSKKLKSVKELLGITIMERSSFEKNPIDFLEAKGYKEVKKDLIIKLPKYSLFELENGRKRMLASAGELQKGNELALPSKYVNFLYLASHYEKLKGSPEDNEQKQLFVEQHKHYLDEIIEQISEFSKRVILADANLDKVLSAYNKHRDKPIREQAENIIHLFTLTNLGAPAAFKYFDTTIDRKRYTSTKEVLDATLIHQSITGLYETRIDLSQLGGDGGPAPEAAAKGGGGGMDPLQLLQPLEAEIKGTKLKAHWNSGATITCVPQAFLEEEVPIKNIWIKTIHGEKEQPVYYLTFKIQGRKVEAEVISSPYDYILVSPSDIPWLMKKPLQLTTLVPLQEYEERLLKQTMLTGSYKEKLQSLFLKYDALWQHWENQVGHRRIKPHHIATGTVNPRPQKQYPINPKAKASIQTVINDLLKQGVLIQQNSIMNTPVYPVPKPDGKWRMVLDYREVNKTIPLIAAQNQHSAGILSSIFRGKYKTTLDLSNGFWAHSITPESYWLTAFTWLGQQYCWTRLPQGFLNSPALFNADVVDLLKEVPNVQVYVDDIYISHDDPREHLEQLEKVFSLLLNAGYVVSLKKSEIAQHEVEFLGFNITKEGRGLTETFKQKLLNITPPRDLKQLQSILGLLNFARNFIPNFSELVKPLYNIIATAPGKYITWTTDNSQQLQNIISMLNSAENLEERNPEVRLIMKVNTSPSAGYIRFYNEFAKRPIMYLNYVYTKAEVKFTNTEKLLTTIHKGLIKALDLGMGQEILVYSPIVSMTKIQKTPLPERKALPIRWITWMSYLEDPRIQFHYDKTLPELQQVPTVTDDIIAKIKHPSEFSMVFYTDGSAIKHPNVNKSHNAGMGIAQVQFKPEFTVINTWSIPLGDHTAQLAEVAAVEFACKKALKIDGPVLIVTDSFYVAESVNKELPYWQSNGFFNNKKKPLKHVSKWKSIADCIQLKPDIIIIHEKGHQPTASTFHTEGNNLADKLATQGSYVVNAGKRTADGSEFEKRTADGSEFESPKKKAKVE

SEQ ID NO: 617 - protein, 2174 aa, synthetic construct
MPAAKRVKLDGGDKKYSIGLDIGTNSVGWAVITDEYKVPSKKFKVLGNTDRHSIKKNLIGALLFDSGETAEATRLKRTARRRYTRRKNRICYLQEIFSNEMAKVDDSFFHRLEESFLVEEDKKHERHPIFGNIVDEVAYHEKYPTIYHLRKKLVDSTDKADLRLIYLALAHMIKFRGHFLIEGDLNPDNSDVDKLFIQLVQTYNQLFEENPINASGVDAKAILSARLSKSRRLENLIAQLPGEKKNGLFGNLIALSLGLTPNFKSNFDLAEDAKLQLSKDTYDDDLDNLLAQIGDQYADLFLAAKNLSDAILLSDILRVNTEITKAPLSASMIKRYDEHHQDLTLLKALVRQQLPEKYKEIFFDQSKNGYAGYIDGGASQEEFYKFIKPILEKMDGTEELLVKLNREDLLRKQRTFDNGSIPHQIHLGELHAILRRQEDFYPFLKDNREKIEKILTFRIPYYVGPLARGNSRFAWMTRKSEETITPWNFEEVVDKGASAQSFIERMTNFDKNLPNEKVLPKHSLLYEYFTVYNELTKVKYVTEGMRKPAFLSGEQKKAIVDLLFKTNRKVTVKQLKEDYFKKIECFDSVEISGVEDRFNASLGTYHDLLKIIKDKDFLDNEENEDILEDIVLTLTLFEDREMIEERLKTYAHLFDDKVMKQLKRRRYTGWGRLSRKLINGIRDKQSGKTILDFLKSDGFANRNFMQLIHDDSLTFKEDIQKAQVSGQGDSLHEHIANLAGSPAIKKGILQTVKVVDELVKVMGRHKPENIVIEMARENQTTQKGQKNSRERMKRIEEGIKELGSQILKEHPVENTQLQNEKLYLYYLQNGRDMYVDQELDINRLSDYDVDHIVPQSFLKDDSIDNKVLTRSDKARGKSDNVPSEEVVKKMKNYWRQLLNAKLITQRKFDNLTKAERGGLSELDKAGFIKRQLVETRQITKHVAQILDSRMNTKYDENDKLIREVKVITLKSKLVSDFRKDFQFYKVREINNYHHAHDAYLNAVVGTALIKKYPKLESEFVYGDYKVYDVRKMIAKSEQEIGKATAKYFFYSNIMNFFKTEITLANGEIRKRPLIETNGETGEIVWDKGRDFATVRKVLSMPQVNIVKKTEVQTGGFSKESILPKRNSDKLIARKKDWDPKKYGGFDSPTVAYSVLVVAKVEKGKSKKLKSVKELLGITIMERSSFEKNPIDFLEAKGYKEVKKDLIIKLPKYSLFELENGRKRMLASAGELQKGNELALPSKYVNFLYLASHYEKLKGSPEDNEQKQLFVEQHKHYLDEIIEQISEFSKRVILADANLDKVLSAYNKHRDKPIREQAENIIHLFTLTNLGAPAAFKYFDTTIDRKRYTSTKEVLDATLIHQSITGLYETRIDLSQLGGDGGPAPGSSGGGGGMDPLQLLQPLEAEIKGTKLKAHWNSGATITCVPQAFLEEEVPIKNIWIKTIHGEKEQPVYYLTFKIQGRKVEAEVISSPYDYILVSPSDIPWLMKKPLQLTTLVPLQEYEERLLKQTMLTGSYKEKLQSLFLKYDALWQHWENQVGHRRIKPHHIATGTVNPRPQKQYPINPKAKASIQTVINDLLKQGVLIQQNSIMNTPVYPVPKPDGKWRMVLDYREVNKTIPLIAAQNQHSAGILSSIFRGKYKTTLDLSNGFWAHSITPESYWLTAFTWLGQQYCWTRLPQGFLNSPALFNADVVDLLKEVPNVQVYVDDIYISHDDPREHLEQLEKVFSLLLNAGYVVSLKKSEIAQHEVEFLGFNITKEGRGLTETFKQKLLNITPPRDLKQLQSILGLLNFARNFIPNFSELVKPLYNIIATAPGKYITWTTDNSQQLQNIISMLNSAENLEERNPEVRLIMKVNTSPSAGYIRFYNEFAKRPIMYLNYVYTKAEVKFTNTEKLLTTIHKGLIKALDLGMGQEILVYSPIVSMTKIQKTPLPERKALPIRWITWMSYLEDPRIQFHYDKTLPELQQVPTVTDDIIAKIKHPSEFSMVFYTDGSAIKHPNVNKSHNAGMGIAQVQFKPEFTVINTWSIPLGDHTAQLAEVAAVEFACKKALKIDGPVLIVTDSFYVAESVNKELPYWQSNGFFNNKKKPLKHVSKWKSIADCIQLKPDIIIIHEKGHQPTASTFHTEGNNLADKLATQGSYVVNAGKRTADGSEFEKRTADGSEFESPKKKAKVE

SEQ ID NO: 618 - protein, 2174 aa, synthetic construct
MPAAKRVKLDGGDKKYSIGLDIGTNSVGWAVITDEYKVPSKKFKVLGNTDRHSIKKNLIGALLFDSGETAEATRLKRTARRRYTRRKNRICYLQEIFSNEMAKVDDSFFHRLEESFLVEEDKKHERHPIFGNIVDEVAYHEKYPTIYHLRKKLVDSTDKADLRLIYLALAHMIKFRGHFLIEGDLNPDNSDVDKLFIQLVQTYNQLFEENPINASGVDAKAILSARLSKSRRLENLIAQLPGEKKNGLFGNLIALSLGLTPNFKSNFDLAEDAKLQLSKDTYDDDLDNLLAQIGDQYADLFLAAKNLSDAILLSDILRVNTEITKAPLSASMIKRYDEHHQDLTLLKALVRQQLPEKYKEIFFDQSKNGYAGYIDGGASQEEFYKFIKPILEKMDGTEELLVKLNREDLLRKQRTFDNGSIPHQIHLGELHAILRRQEDFYPFLKDNREKIEKILTFRIPYYVGPLARGNSRFAWMTRKSEETITPWNFEEVVDKGASAQSFIERMTNFDKNLPNEKVLPKHSLLYEYFTVYNELTKVKYVTEGMRKPAFLSGEQKKAIVDLLFKTNRKVTVKQLKEDYFKKIECFDSVEISGVEDRFNASLGTYHDLLKIIKDKDFLDNEENEDILEDIVLTLTLFEDREMIEERLKTYAHLFDDKVMKQLKRRRYTGWGRLSRKLINGIRDKQSGKTILDFLKSDGFANRNFMQLIHDDSLTFKEDIQKAQVSGQGDSLHEHIANLAGSPAIKKGILQTVKVVDELVKVMGRHKPENIVIEMARENQTTQKGQKNSRERMKRIEEGIKELGSQILKEHPVENTQLQNEKLYLYYLQNGRDMYVDQELDINRLSDYDVDHIVPQSFLKDDSIDNKVLTRSDKARGKSDNVPSEEVVKKMKNYWRQLLNAKLITQRKFDNLTKAERGGLSELDKAGFIKRQLVETRQITKHVAQILDSRMNTKYDENDKLIREVKVITLKSKLVSDFRKDFQFYKVREINNYHHAHDAYLNAVVGTALIKKYPKLESEFVYGDYKVYDVRKMIAKSEQEIGKATAKYFFYSNIMNFFKTEITLANGEIRKRPLIETNGETGEIVWDKGRDFATVRKVLSMPQVNIVKKTEVQTGGFSKESILPKRNSDKLIARKKDWDPKKYGGFDSPTVAYSVLVVAKVEKGKSKKLKSVKELLGITIMERSSFEKNPIDFLEAKGYKEVKKDLIIKLPKYSLFELENGRKRMLASAGELQKGNELALPSKYVNFLYLASHYEKLKGSPEDNEQKQLFVEQHKHYLDEIIEQISEFSKRVILADANLDKVLSAYNKHRDKPIREQAENIIHLFTLTNLGAPAAFKYFDTTIDRKRYTSTKEVLDATLIHQSITGLYETRIDLSQLGGDGGPAPGGSGGGGGMDPLQLLQPLEAEIKGTKLKAHWNSGATITCVPQAFLEEEVPIKNIWIKTIHGEKEQPVYYLTFKIQGRKVEAEVISSPYDYILVSPSDIPWLMKKPLQLTTLVPLQEYEERLLKQTMLTGSYKEKLQSLFLKYDALWQHWENQVGHRRIKPHHIATGTVNPRPQKQYPINPKAKASIQTVINDLLKQGVLIQQNSIMNTPVYPVPKPDGKWRMVLDYREVNKTIPLIAAQNQHSAGILSSIFRGKYKTTLDLSNGFWAHSITPESYWLTAFTWLGQQYCWTRLPQGFLNSPALFNADVVDLLKEVPNVQVYVDDIYISHDDPREHLEQLEKVFSLLLNAGYVVSLKKSEIAQHEVEFLGFNITKEGRGLTETFKQKLLNITPPRDLKQLQSILGLLNFARNFIPNFSELVKPLYNIIATAPGKYITWTTDNSQQLQNIISMLNSAENLEERNPEVRLIMKVNTSPSAGYIRFYNEFAKRPIMYLNYVYTKAEVKFTNTEKLLTTIHKGLIKALDLGMGQEILVYSPIVSMTKIQKTPLPERKALPIRWITWMSYLEDPRIQFHYDKTLPELQQVPTVTDDIIAKIKHPSEFSMVFYTDGSAIKHPNVNKSHNAGMGIAQVQFKPEFTVINTWSIPLGDHTAQLAEVAAVEFACKKALKIDGPVLIVTDSFYVAESVNKELPYWQSNGFFNNKKKPLKHVSKWKSIADCIQLKPDIIIIHEKGHQPTASTFHTEGNNLADKLATQGSYVVNAGKRTADGSEFEKRTADGSEFESPKKKAKVE

SEQ ID NO: 619 - protein, 2173 aa, synthetic construct
MPAAKRVKLDGGDKKYSIGLDIGTNSVGWAVITDEYKVPSKKFKVLGNTDRHSIKKNLIGALLFDSGETAEATRLKRTARRRYTRRKNRICYLQEIFSNEMAKVDDSFFHRLEESFLVEEDKKHERHPIFGNIVDEVAYHEKYPTIYHLRKKLVDSTDKADLRLIYLALAHMIKFRGHFLIEGDLNPDNSDVDKLFIQLVQTYNQLFEENPINASGVDAKAILSARLSKSRRLENLIAQLPGEKKNGLFGNLIALSLGLTPNFKSNFDLAEDAKLQLSKDTYDDDLDNLLAQIGDQYADLFLAAKNLSDAILLSDILRVNTEITKAPLSASMIKRYDEHHQDLTLLKALVRQQLPEKYKEIFFDQSKNGYAGYIDGGASQEEFYKFIKPILEKMDGTEELLVKLNREDLLRKQRTFDNGSIPHQIHLGELHAILRRQEDFYPFLKDNREKIEKILTFRIPYYVGPLARGNSRFAWMTRKSEETITPWNFEEVVDKGASAQSFIERMTNFDKNLPNEKVLPKHSLLYEYFTVYNELTKVKYVTEGMRKPAFLSGEQKKAIVDLLFKTNRKVTVKQLKEDYFKKIECFDSVEISGVEDRFNASLGTYHDLLKIIKDKDFLDNEENEDILEDIVLTLTLFEDREMIEERLKTYAHLFDDKVMKQLKRRRYTGWGRLSRKLINGIRDKQSGKTILDFLKSDGFANRNFMQLIHDDSLTFKEDIQKAQVSGQGDSLHEHIANLAGSPAIKKGILQTVKVVDELVKVMGRHKPENIVIEMARENQTTQKGQKNSRERMKRIEEGIKELGSQILKEHPVENTQLQNEKLYLYYLQNGRDMYVDQELDINRLSDYDVDHIVPQSFLKDDSIDNKVLTRSDKARGKSDNVPSEEVVKKMKNYWRQLLNAKLITQRKFDNLTKAERGGLSELDKAGFIKRQLVETRQITKHVAQILDSRMNTKYDENDKLIREVKVITLKSKLVSDFRKDFQFYKVREINNYHHAHDAYLNAVVGTALIKKYPKLESEFVYGDYKVYDVRKMIAKSEQEIGKATAKYFFYSNIMNFFKTEITLANGEIRKRPLIETNGETGEIVWDKGRDFATVRKVLSMPQVNIVKKTEVQTGGFSKESILPKRNSDKLIARKKDWDPKKYGGFDSPTVAYSVLVVAKVEKGKSKKLKSVKELLGITIMERSSFEKNPIDFLEAKGYKEVKKDLIIKLPKYSLFELENGRKRMLASAGELQKGNELALPSKYVNFLYLASHYEKLKGSPEDNEQKQLFVEQHKHYLDEIIEQISEFSKRVILADANLDKVLSAYNKHRDKPIREQAENIIHLFTLTNLGAPAAFKYFDTTIDRKRYTSTKEVLDATLIHQSITGLYETRIDLSQLGGDGGEAAAKPAPGGMDPLQLLQPLEAEIKGTKLKAHWNSGATITCVPQAFLEEEVPIKNIWIKTIHGEKEQPVYYLTFKIQGRKVEAEVISSPYDYILVSPSDIPWLMKKPLQLTTLVPLQEYEERLLKQTMLTGSYKEKLQSLFLKYDALWQHWENQVGHRRIKPHHIATGTVNPRPQKQYPINPKAKASIQTVINDLLKQGVLIQQNSIMNTPVYPVPKPDGKWRMVLDYREVNKTIPLIAAQNQHSAGILSSIFRGKYKTTLDLSNGFWAHSITPESYWLTAFTWLGQQYCWTRLPQGFLNSPALFNADVVDLLKEVPNVQVYVDDIYISHDDPREHLEQLEKVFSLLLNAGYVVSLKKSEIAQHEVEFLGFNITKEGRGLTETFKQKLLNITPPRDLKQLQSILGLLNFARNFIPNFSELVKPLYNIIATAPGKYITWTTDNSQQLQNIISMLNSAENLEERNPEVRLIMKVNTSPSAGYIRFYNEFAKRPIMYLNYVYTKAEVKFTNTEKLLTTIHKGLIKALDLGMGQEILVYSPIVSMTKIQKTPLPERKALPIRWITWMSYLEDPRIQFHYDKTLPELQQVPTVTDDIIAKIKHPSEFSMVFYTDGSAIKHPNVNKSHNAGMGIAQVQFKPEFTVINTWSIPLGDHTAQLAEVAAVEFACKKALKIDGPVLIVTDSFYVAESVNKELPYWQSNGFFNNKKKPLKHVSKWKSIADCIQLKPDIIIIHEKGHQPTASTFHTEGNNLADKLATQGSYVVNAGKRTADGSEFEKRTADGSEFESPKKKAKVE

SEQ ID NO: 620 - protein, 2176 aa, synthetic construct
MPAAKRVKLDGGDKKYSIGLDIGTNSVGWAVITDEYKVPSKKFKVLGNTDRHSIKKNLIGALLFDSGETAEATRLKRTARRRYTRRKNRICYLQEIFSNEMAKVDDSFFHRLEESFLVEEDKKHERHPIFGNIVDEVAYHEKYPTIYHLRKKLVDSTDKADLRLIYLALAHMIKFRGHFLIEGDLNPDNSDVDKLFIQLVQTYNQLFEENPINASGVDAKAILSARLSKSRRLENLIAQLPGEKKNGLFGNLIALSLGLTPNFKSNFDLAEDAKLQLSKDTYDDDLDNLLAQIGDQYADLFLAAKNLSDAILLSDILRVNTEITKAPLSASMIKRYDEHHQDLTLLKALVRQQLPEKYKEIFFDQSKNGYAGYIDGGASQEEFYKFIKPILEKMDGTEELLVKLNREDLLRKQRTFDNGSIPHQIHLGELHAILRRQEDFYPFLKDNREKIEKILTFRIPYYVGPLARGNSRFAWMTRKSEETITPWNFEEVVDKGASAQSFIERMTNFDKNLPNEKVLPKHSLLYEYFTVYNELTKVKYVTEGMRKPAFLSGEQKKAIVDLLFKTNRKVTVKQLKEDYFKKIECFDSVEISGVEDRFNASLGTYHDLLKIIKDKDFLDNEENEDILEDIVLTLTLFEDREMIEERLKTYAHLFDDKVMKQLKRRRYTGWGRLSRKLINGIRDKQSGKTILDFLKSDGFANRNFMQLIHDDSLTFKEDIQKAQVSGQGDSLHEHIANLAGSPAIKKGILQTVKVVDELVKVMGRHKPENIVIEMARENQTTQKGQKNSRERMKRIEEGIKELGSQILKEHPVENTQLQNEKLYLYYLQNGRDMYVDQELDINRLSDYDVDHIVPQSFLKDDSIDNKVLTRSDKARGKSDNVPSEEVVKKMKNYWRQLLNAKLITQRKFDNLTKAERGGLSELDKAGFIKRQLVETRQITKHVAQILDSRMNTKYDENDKLIREVKVITLKSKLVSDFRKDFQFYKVREINNYHHAHDAYLNAVVGTALIKKYPKLESEFVYGDYKVYDVRKMIAKSEQEIGKATAKYFFYSNIMNFFKTEITLANGEIRKRPLIETNGETGEIVWDKGRDFATVRKVLSMPQVNIVKKTEVQTGGFSKESILPKRNSDKLIARKKDWDPKKYGGFDSPTVAYSVLVVAKVEKGKSKKLKSVKELLGITIMERSSFEKNPIDFLEAKGYKEVKKDLIIKLPKYSLFELENGRKRMLASAGELQKGNELALPSKYVNFLYLASHYEKLKGSPEDNEQKQLFVEQHKHYLDEIIEQISEFSKRVILADANLDKVLSAYNKHRDKPIREQAENIIHLFTLTNLGAPAAFKYFDTTIDRKRYTSTKEVLDATLIHQSITGLYETRIDLSQLGGDGGGGGEAAAKGSSGGMDPLQLLQPLEAEIKGTKLKAHWNSGATITCVPQAFLEEEVPIKNIWIKTIHGEKEQPVYYLTFKIQGRKVEAEVISSPYDYILVSPSDIPWLMKKPLQLTTLVPLQEYEERLLKQTMLTGSYKEKLQSLFLKYDALWQHWENQVGHRRIKPHHIATGTVNPRPQKQYPINPKAKASIQTVINDLLKQGVLIQQNSIMNTPVYPVPKPDGKWRMVLDYREVNKTIPLIAAQNQHSAGILSSIFRGKYKTTLDLSNGFWAHSITPESYWLTAFTWLGQQYCWTRLPQGFLNSPALFNADVVDLLKEVPNVQVYVDDIYISHDDPREHLEQLEKVFSLLLNAGYVVSLKKSEIAQHEVEFLGFNITKEGRGLTETFKQKLLNITPPRDLKQLQSILGLLNFARNFIPNFSELVKPLYNIIATAPGKYITWTTDNSQQLQNIISMLNSAENLEERNPEVRLIMKVNTSPSAGYIRFYNEFAKRPIMYLNYVYTKAEVKFTNTEKLLTTIHKGLIKALDLGMGQEILVYSPIVSMTKIQKTPLPERKALPIRWITWMSYLEDPRIQFHYDKTLPELQQVPTVTDDIIAKIKHPSEFSMVFYTDGSAIKHPNVNKSHNAGMGIAQVQFKPEFTVINTWSIPLGDHTAQLAEVAAVEFACKKALKIDGPVLIVTDSFYVAESVNKELPYWQSNGFFNNKKKPLKHVSKWKSIADCIQLKPDIIIIHEKGHQPTASTFHTEGNNLADKLATQGSYVVNAGKRTADGSEFEKRTADGSEFESPKKKAKVE

SEQ ID NO: 621 - protein, 2176 aa, synthetic construct
MPAAKRVKLDGGDKKYSIGLDIGTNSVGWAVITDEYKVPSKKFKVLGNTDRHSIKKNLIGALLFDSGETAEATRLKRTARRRYTRRKNRICYLQEIFSNEMAKVDDSFFHRLEESFLVEEDKKHERHPIFGNIVDEVAYHEKYPTIYHLRKKLVDSTDKADLRLIYLALAHMIKFRGHFLIEGDLNPDNSDVDKLFIQLVQTYNQLFEENPINASGVDAKAILSARLSKSRRLENLIAQLPGEKKNGLFGNLIALSLGLTPNFKSNFDLAEDAKLQLSKDTYDDDLDNLLAQIGDQYADLFLAAKNLSDAILLSDILRVNTEITKAPLSASMIKRYDEHHQDLTLLKALVRQQLPEKYKEIFFDQSKNGYAGYIDGGASQEEFYKFIKPILEKMDGTEELLVKLNREDLLRKQRTFDNGSIPHQIHLGELHAILRRQEDFYPFLKDNREKIEKILTFRIPYYVGPLARGNSRFAWMTRKSEETITPWNFEEVVDKGASAQSFIERMTNFDKNLPNEKVLPKHSLLYEYFTVYNELTKVKYVTEGMRKPAFLSGEQKKAIVDLLFKTNRKVTVKQLKEDYFKKIECFDSVEISGVEDRFNASLGTYHDLLKIIKDKDFLDNEENEDILEDIVLTLTLFEDREMIEERLKTYAHLFDDKVMKQLKRRRYTGWGRLSRKLINGIRDKQSGKTILDFLKSDGFANRNFMQLIHDDSLTFKEDIQKAQVSGQGDSLHEHIANLAGSPAIKKGILQTVKVVDELVKVMGRHKPENIVIEMARENQTTQKGQKNSRERMKRIEEGIKELGSQILKEHPVENTQLQNEKLYLYYLQNGRDMYVDQELDINRLSDYDVDHIVPQSFLKDDSIDNKVLTRSDKARGKSDNVPSEEVVKKMKNYWRQLLNAKLITQRKFDNLTKAERGGLSELDKAGFIKRQLVETRQITKHVAQILDSRMNTKYDENDKLIREVKVITLKSKLVSDFRKDFQFYKVREINNYHHAHDAYLNAVVGTALIKKYPKLESEFVYGDYKVYDVRKMIAKSEQEIGKATAKYFFYSNIMNFFKTEITLANGEIRKRPLIETNGETGEIVWDKGRDFATVRKVLSMPQVNIVKKTEVQTGGFSKESILPKRNSDKLIARKKDWDPKKYGGFDSPTVAYSVLVVAKVEKGKSKKLKSVKELLGITIMERSSFEKNPIDFLEAKGYKEVKKDLIIKLPKYSLFELENGRKRMLASAGELQKGNELALPSKYVNFLYLASHYEKLKGSPEDNEQKQLFVEQHKHYLDEIIEQISEFSKRVILADANLDKVLSAYNKHRDKPIREQAENIIHLFTLTNLGAPAAFKYFDTTIDRKRYTSTKEVLDATLIHQSITGLYETRIDLSQLGGDGGGGGEAAAKPAPGGMDPLQLLQPLEAEIKGTKLKAHWNSGATITCVPQAFLEEEVPIKNIWIKTIHGEKEQPVYYLTFKIQGRKVEAEVISSPYDYILVSPSDIPWLMKKPLQLTTLVPLQEYEERLLKQTMLTGSYKEKLQSLFLKYDALWQHWENQVGHRRIKPHHIATGTVNPRPQKQYPINPKAKASIQTVINDLLKQGVLIQQNSIMNTPVYPVPKPDGKWRMVLDYREVNKTIPLIAAQNQHSAGILSSIFRGKYKTTLDLSNGFWAHSITPESYWLTAFTWLGQQYCWTRLPQGFLNSPALFNADVVDLLKEVPNVQVYVDDIYISHDDPREHLEQLEKVFSLLLNAGYVVSLKKSEIAQHEVEFLGFNITKEGRGLTETFKQKLLNITPPRDLKQLQSILGLLNFARNFIPNFSELVKPLYNIIATAPGKYITWTTDNSQQLQNIISMLNSAENLEERNPEVRLIMKVNTSPSAGYIRFYNEFAKRPIMYLNYVYTKAEVKFTNTEKLLTTIHKGLIKALDLGMGQEILVYSPIVSMTKIQKTPLPERKALPIRWITWMSYLEDPRIQFHYDKTLPELQQVPTVTDDIIAKIKHPSEFSMVFYTDGSAIKHPNVNKSHNAGMGIAQVQFKPEFTVINTWSIPLGDHTAQLAEVAAVEFACKKALKIDGPVLIVTDSFYVAESVNKELPYWQSNGFFNNKKKPLKHVSKWKSIADCIQLKPDIIIIHEKGHQPTASTFHTEGNNLADKLATQGSYVVNAGKRTADGSEFEKRTADGSEFESPKKKAKVE

SEQ ID NO: 622 - protein, 2176 aa, synthetic construct
MPAAKRVKLDGGDKKYSIGLDIGTNSVGWAVITDEYKVPSKKFKVLGNTDRHSIKKNLIGALLFDSGETAEATRLKRTARRRYTRRKNRICYLQEIFSNEMAKVDDSFFHRLEESFLVEEDKKHERHPIFGNIVDEVAYHEKYPTIYHLRKKLVDSTDKADLRLIYLALAHMIKFRGHFLIEGDLNPDNSDVDKLFIQLVQTYNQLFEENPINASGVDAKAILSARLSKSRRLENLIAQLPGEKKNGLFGNLIALSLGLTPNFKSNFDLAEDAKLQLSKDTYDDDLDNLLAQIGDQYADLFLAAKNLSDAILLSDILRVNTEITKAPLSASMIKRYDEHHQDLTLLKALVRQQLPEKYKEIFFDQSKNGYAGYIDGGASQEEFYKFIKPILEKMDGTEELLVKLNREDLLRKQRTFDNGSIPHQIHLGELHAILRRQEDFYPFLKDNREKIEKILTFRIPYYVGPLARGNSRFAWMTRKSEETITPWNFEEVVDKGASAQSFIERMTNFDKNLPNEKVLPKHSLLYEYFTVYNELTKVKYVTEGMRKPAFLSGEQKKAIVDLLFKTNRKVTVKQLKEDYFKKIECFDSVEISGVEDRFNASLGTYHDLLKIIKDKDFLDNEENEDILEDIVLTLTLFEDREMIEERLKTYAHLFDDKVMKQLKRRRYTGWGRLSRKLINGIRDKQSGKTILDFLKSDGFANRNFMQLIHDDSLTFKEDIQKAQVSGQGDSLHEHIANLAGSPAIKKGILQTVKVVDELVKVMGRHKPENIVIEMARENQTTQKGQKNSRERMKRIEEGIKELGSQILKEHPVENTQLQNEKLYLYYLQNGRDMYVDQELDINRLSDYDVDHIVPQSFLKDDSIDNKVLTRSDKARGKSDNVPSEEVVKKMKNYWRQLLNAKLITQRKFDNLTKAERGGLSELDKAGFIKRQLVETRQITKHVAQILDSRMNTKYDENDKLIREVKVITLKSKLVSDFRKDFQFYKVREINNYHHAHDAYLNAVVGTALIKKYPKLESEFVYGDYKVYDVRKMIAKSEQEIGKATAKYFFYSNIMNFFKTEITLANGEIRKRPLIETNGETGEIVWDKGRDFATVRKVLSMPQVNIVKKTEVQTGGFSKESILPKRNSDKLIARKKDWDPKKYGGFDSPTVAYSVLVVAKVEKGKSKKLKSVKELLGITIMERSSFEKNPIDFLEAKGYKEVKKDLIIKLPKYSLFELENGRKRMLASAGELQKGNELALPSKYVNFLYLASHYEKLKGSPEDNEQKQLFVEQHKHYLDEIIEQISEFSKRVILADANLDKVLSAYNKHRDKPIREQAENIIHLFTLTNLGAPAAFKYFDTTIDRKRYTSTKEVLDATLIHQSITGLYETRIDLSQLGGDGGPAPGGGEAAAKGGMDPLQLLQPLEAEIKGTKLKAHWNSGATITCVPQAFLEEEVPIKNIWIKTIHGEKEQPVYYLTFKIQGRKVEAEVISSPYDYILVSPSDIPWLMKKPLQLTTLVPLQEYEERLLKQTMLTGSYKEKLQSLFLKYDALWQHWENQVGHRRIKPHHIATGTVNPRPQKQYPINPKAKASIQTVINDLLKQGVLIQQNSIMNTPVYPVPKPDGKWRMVLDYREVNKTIPLIAAQNQHSAGILSSIFRGKYKTTLDLSNGFWAHSITPESYWLTAFTWLGQQYCWTRLPQGFLNSPALFNADVVDLLKEVPNVQVYVDDIYISHDDPREHLEQLEKVFSLLLNAGYVVSLKKSEIAQHEVEFLGFNITKEGRGLTETFKQKLLNITPPRDLKQLQSILGLLNFARNFIPNFSELVKPLYNIIATAPGKYITWTTDNSQQLQNIISMLNSAENLEERNPEVRLIMKVNTSPSAGYIRFYNEFAKRPIMYLNYVYTKAEVKFTNTEKLLTTIHKGLIKALDLGMGQEILVYSPIVSMTKIQKTPLPERKALPIRWITWMSYLEDPRIQFHYDKTLPELQQVPTVTDDIIAKIKHPSEFSMVFYTDGSAIKHPNVNKSHNAGMGIAQVQFKPEFTVINTWSIPLGDHTAQLAEVAAVEFACKKALKIDGPVLIVTDSFYVAESVNKELPYWQSNGFFNNKKKPLKHVSKWKSIADCIQLKPDIIIIHEKGHQPTASTFHTEGNNLADKLATQGSYVVNAGKRTADGSEFEKRTADGSEFESPKKKAKVE

SEQ ID NO: 623 - protein, 2168 aa, synthetic construct
MPAAKRVKLDGGDKKYSIGLDIGTNSVGWAVITDEYKVPSKKFKVLGNTDRHSIKKNLIGALLFDSGETAEATRLKRTARRRYTRRKNRICYLQEIFSNEMAKVDDSFFHRLEESFLVEEDKKHERHPIFGNIVDEVAYHEKYPTIYHLRKKLVDSTDKADLRLIYLALAHMIKFRGHFLIEGDLNPDNSDVDKLFIQLVQTYNQLFEENPINASGVDAKAILSARLSKSRRLENLIAQLPGEKKNGLFGNLIALSLGLTPNFKSNFDLAEDAKLQLSKDTYDDDLDNLLAQIGDQYADLFLAAKNLSDAILLSDILRVNTEITKAPLSASMIKRYDEHHQDLTLLKALVRQQLPEKYKEIFFDQSKNGYAGYIDGGASQEEFYKFIKPILEKMDGTEELLVKLNREDLLRKQRTFDNGSIPHQIHLGELHAILRRQEDFYPFLKDNREKIEKILTFRIPYYVGPLARGNSRFAWMTRKSEETITPWNFEEVVDKGASAQSFIERMTNFDKNLPNEKVLPKHSLLYEYFTVYNELTKVKYVTEGMRKPAFLSGEQKKAIVDLLFKTNRKVTVKQLKEDYFKKIECFDSVEISGVEDRFNASLGTYHDLLKIIKDKDFLDNEENEDILEDIVLTLTLFEDREMIEERLKTYAHLFDDKVMKQLKRRRYTGWGRLSRKLINGIRDKQSGKTILDFLKSDGFANRNFMQLIHDDSLTFKEDIQKAQVSGQGDSLHEHIANLAGSPAIKKGILQTVKVVDELVKVMGRHKPENIVIEMARENQTTQKGQKNSRERMKRIEEGIKELGSQILKEHPVENTQLQNEKLYLYYLQNGRDMYVDQELDINRLSDYDVDHIVPQSFLKDDSIDNKVLTRSDKARGKSDNVPSEEVVKKMKNYWRQLLNAKLITQRKFDNLTKAERGGLSELDKAGFIKRQLVETRQITKHVAQILDSRMNTKYDENDKLIREVKVITLKSKLVSDFRKDFQFYKVREINNYHHAHDAYLNAVVGTALIKKYPKLESEFVYGDYKVYDVRKMIAKSEQEIGKATAKYFFYSNIMNFFKTEITLANGEIRKRPLIETNGETGEIVWDKGRDFATVRKVLSMPQVNIVKKTEVQTGGFSKESILPKRNSDKLIARKKDWDPKKYGGFDSPTVAYSVLVVAKVEKGKSKKLKSVKELLGITIMERSSFEKNPIDFLEAKGYKEVKKDLIIKLPKYSLFELENGRKRMLASAGELQKGNELALPSKYVNFLYLASHYEKLKGSPEDNEQKQLFVEQHKHYLDEIIEQISEFSKRVILADANLDKVLSAYNKHRDKPIREQAENIIHLFTLTNLGAPAAFKYFDTTIDRKRYTSTKEVLDATLIHQSITGLYETRIDLSQLGGDGGGGGGGMDPLQLLQPLEAEIKGTKLKAHWNSGATITCVPQAFLEEEVPIKNIWIKTIHGEKEQPVYYLTFKIQGRKVEAEVISSPYDYILVSPSDIPWLMKKPLQLTTLVPLQEYEERLLKQTMLTGSYKEKLQSLFLKYDALWQHWENQVGHRRIKPHHIATGTVNPRPQKQYPINPKAKASIQTVINDLLKQGVLIQQNSIMNTPVYPVPKPDGKWRMVLDYREVNKTIPLIAAQNQHSAGILSSIFRGKYKTTLDLSNGFWAHSITPESYWLTAFTWLGQQYCWTRLPQGFLNSPALFNADVVDLLKEVPNVQVYVDDIYISHDDPREHLEQLEKVFSLLLNAGYVVSLKKSEIAQHEVEFLGFNITKEGRGLTETFKQKLLNITPPRDLKQLQSILGLLNFARNFIPNFSELVKPLYNIIATAPGKYITWTTDNSQQLQNIISMLNSAENLEERNPEVRLIMKVNTSPSAGYIRFYNEFAKRPIMYLNYVYTKAEVKFTNTEKLLTTIHKGLIKALDLGMGQEILVYSPIVSMTKIQKTPLPERKALPIRWITWMSYLEDPRIQFHYDKTLPELQQVPTVTDDIIAKIKHPSEFSMVFYTDGSAIKHPNVNKSHNAGMGIAQVQFKPEFTVINTWSIPLGDHTAQLAEVAAVEFACKKALKIDGPVLIVTDSFYVAESVNKELPYWQSNGFFNNKKKPLKHVSKWKSIADCIQLKPDIIIIHEKGHQPTASTFHTEGNNLADKLATQGSYVVNAGKRTADGSEFEKRTADGSEFESPKKKAKVE

SEQ ID NO: 624 - protein, 2180 aa, synthetic construct
MPAAKRVKLDGGDKKYSIGLDIGTNSVGWAVITDEYKVPSKKFKVLGNTDRHSIKKNLIGALLFDSGETAEATRLKRTARRRYTRRKNRICYLQEIFSNEMAKVDDSFFHRLEESFLVEEDKKHERHPIFGNIVDEVAYHEKYPTIYHLRKKLVDSTDKADLRLIYLALAHMIKFRGHFLIEGDLNPDNSDVDKLFIQLVQTYNQLFEENPINASGVDAKAILSARLSKSRRLENLIAQLPGEKKNGLFGNLIALSLGLTPNFKSNFDLAEDAKLQLSKDTYDDDLDNLLAQIGDQYADLFLAAKNLSDAILLSDILRVNTEITKAPLSASMIKRYDEHHQDLTLLKALVRQQLPEKYKEIFFDQSKNGYAGYIDGGASQEEFYKFIKPILEKMDGTEELLVKLNREDLLRKQRTFDNGSIPHQIHLGELHAILRRQEDFYPFLKDNREKIEKILTFRIPYYVGPLARGNSRFAWMTRKSEETITPWNFEEVVDKGASAQSFIERMTNFDKNLPNEKVLPKHSLLYEYFTVYNELTKVKYVTEGMRKPAFLSGEQKKAIVDLLFKTNRKVTVKQLKEDYFKKIECFDSVEISGVEDRFNASLGTYHDLLKIIKDKDFLDNEENEDILEDIVLTLTLFEDREMIEERLKTYAHLFDDKVMKQLKRRRYTGWGRLSRKLINGIRDKQSGKTILDFLKSDGFANRNFMQLIHDDSLTFKEDIQKAQVSGQGDSLHEHIANLAGSPAIKKGILQTVKVVDELVKVMGRHKPENIVIEMARENQTTQKGQKNSRERMKRIEEGIKELGSQILKEHPVENTQLQNEKLYLYYLQNGRDMYVDQELDINRLSDYDVDHIVPQSFLKDDSIDNKVLTRSDKARGKSDNVPSEEVVKKMKNYWRQLLNAKLITQRKFDNLTKAERGGLSELDKAGFIKRQLVETRQITKHVAQILDSRMNTKYDENDKLIREVKVITLKSKLVSDFRKDFQFYKVREINNYHHAHDAYLNAVVGTALIKKYPKLESEFVYGDYKVYDVRKMIAKSEQEIGKATAKYFFYSNIMNFFKTEITLANGEIRKRPLIETNGETGEIVWDKGRDFATVRKVLSMPQVNIVKKTEVQTGGFSKESILPKRNSDKLIARKKDWDPKKYGGFDSPTVAYSVLVVAKVEKGKSKKLKSVKELLGITIMERSSFEKNPIDFLEAKGYKEVKKDLIIKLPKYSLFELENGRKRMLASAGELQKGNELALPSKYVNFLYLASHYEKLKGSPEDNEQKQLFVEQHKHYLDEIIEQISEFSKRVILADANLDKVLSAYNKHRDKPIREQAENIIHLFTLTNLGAPAAFKYFDTTIDRKRYTSTKEVLDATLIHQSITGLYETRIDLSQLGGDGGEAAAKEAAAKEAAAKGGMDPLQLLQPLEAEIKGTKLKAHWNSGATITCVPQAFLEEEVPIKNIWIKTIHGEKEQPVYYLTFKIQGRKVEAEVISSPYDYILVSPSDIPWLMKKPLQLTTLVPLQEYEERLLKQTMLTGSYKEKLQSLFLKYDALWQHWENQVGHRRIKPHHIATGTVNPRPQKQYPINPKAKASIQTVINDLLKQGVLIQQNSIMNTPVYPVPKPDGKWRMVLDYREVNKTIPLIAAQNQHSAGILSSIFRGKYKTTLDLSNGFWAHSITPESYWLTAFTWLGQQYCWTRLPQGFLNSPALFNADVVDLLKEVPNVQVYVDDIYISHDDPREHLEQLEKVFSLLLNAGYVVSLKKSEIAQHEVEFLGFNITKEGRGLTETFKQKLLNITPPRDLKQLQSILGLLNFARNFIPNFSELVKPLYNIIATAPGKYITWTTDNSQQLQNIISMLNSAENLEERNPEVRLIMKVNTSPSAGYIRFYNEFAKRPIMYLNYVYTKAEVKFTNTEKLLTTIHKGLIKALDLGMGQEILVYSPIVSMTKIQKTPLPERKALPIRWITWMSYLEDPRIQFHYDKTLPELQQVPTVTDDIIAKIKHPSEFSMVFYTDGSAIKHPNVNKSHNAGMGIAQVQFKPEFTVINTWSIPLGDHTAQLAEVAAVEFACKKALKIDGPVLIVTDSFYVAESVNKELPYWQSNGFFNNKKKPLKHVSKWKSIADCIQLKPDIIIIHEKGHQPTASTFHTEGNNLADKLATQGSYVVNAGKRTADGSEFEKRTADGSEFESPKKKAKVE

SEQ ID NO: 625 - protein, 2173 aa, synthetic construct
MPAAKRVKLDGGDKKYSIGLDIGTNSVGWAVITDEYKVPSKKFKVLGNTDRHSIKKNLIGALLFDSGETAEATRLKRTARRRYTRRKNRICYLQEIFSNEMAKVDDSFFHRLEESFLVEEDKKHERHPIFGNIVDEVAYHEKYPTIYHLRKKLVDSTDKADLRLIYLALAHMIKFRGHFLIEGDLNPDNSDVDKLFIQLVQTYNQLFEENPINASGVDAKAILSARLSKSRRLENLIAQLPGEKKNGLFGNLIALSLGLTPNFKSNFDLAEDAKLQLSKDTYDDDLDNLLAQIGDQYADLFLAAKNLSDAILLSDILRVNTEITKAPLSASMIKRYDEHHQDLTLLKALVRQQLPEKYKEIFFDQSKNGYAGYIDGGASQEEFYKFIKPILEKMDGTEELLVKLNREDLLRKQRTFDNGSIPHQIHLGELHAILRRQEDFYPFLKDNREKIEKILTFRIPYYVGPLARGNSRFAWMTRKSEETITPWNFEEVVDKGASAQSFIERMTNFDKNLPNEKVLPKHSLLYEYFTVYNELTKVKYVTEGMRKPAFLSGEQKKAIVDLLFKTNRKVTVKQLKEDYFKKIECFDSVEISGVEDRFNASLGTYHDLLKIIKDKDFLDNEENEDILEDIVLTLTLFEDREMIEERLKTYAHLFDDKVMKQLKRRRYTGWGRLSRKLINGIRDKQSGKTILDFLKSDGFANRNFMQLIHDDSLTFKEDIQKAQVSGQGDSLHEHIANLAGSPAIKKGILQTVKVVDELVKVMGRHKPENIVIEMARENQTTQKGQKNSRERMKRIEEGIKELGSQILKEHPVENTQLQNEKLYLYYLQNGRDMYVDQELDINRLSDYDVDHIVPQSFLKDDSIDNKVLTRSDKARGKSDNVPSEEVVKKMKNYWRQLLNAKLITQRKFDNLTKAERGGLSELDKAGFIKRQLVETRQITKHVAQILDSRMNTKYDENDKLIREVKVITLKSKLVSDFRKDFQFYKVREINNYHHAHDAYLNAVVGTALIKKYPKLESEFVYGDYKVYDVRKMIAKSEQEIGKATAKYFFYSNIMNFFKTEITLANGEIRKRPLIETNGETGEIVWDKGRDFATVRKVLSMPQVNIVKKTEVQTGGFSKESILPKRNSDKLIARKKDWDPKKYGGFDSPTVAYSVLVVAKVEKGKSKKLKSVKELLGITIMERSSFEKNPIDFLEAKGYKEVKKDLIIKLPKYSLFELENGRKRMLASAGELQKGNELALPSKYVNFLYLASHYEKLKGSPEDNEQKQLFVEQHKHYLDEIIEQISEFSKRVILADANLDKVLSAYNKHRDKPIREQAENIIHLFTLTNLGAPAAFKYFDTTIDRKRYTSTKEVLDATLIHQSITGLYETRIDLSQLGGDGGEAAAKGGGGGMDPLQLLQPLEAEIKGTKLKAHWNSGATITCVPQAFLEEEVPIKNIWIKTIHGEKEQPVYYLTFKIQGRKVEAEVISSPYDYILVSPSDIPWLMKKPLQLTTLVPLQEYEERLLKQTMLTGSYKEKLQSLFLKYDALWQHWENQVGHRRIKPHHIATGTVNPRPQKQYPINPKAKASIQTVINDLLKQGVLIQQNSIMNTPVYPVPKPDGKWRMVLDYREVNKTIPLIAAQNQHSAGILSSIFRGKYKTTLDLSNGFWAHSITPESYWLTAFTWLGQQYCWTRLPQGFLNSPALFNADVVDLLKEVPNVQVYVDDIYISHDDPREHLEQLEKVFSLLLNAGYVVSLKKSEIAQHEVEFLGFNITKEGRGLTETFKQKLLNITPPRDLKQLQSILGLLNFARNFIPNFSELVKPLYNIIATAPGKYITWTTDNSQQLQNIISMLNSAENLEERNPEVRLIMKVNTSPSAGYIRFYNEFAKRPIMYLNYVYTKAEVKFTNTEKLLTTIHKGLIKALDLGMGQEILVYSPIVSMTKIQKTPLPERKALPIRWITWMSYLEDPRIQFHYDKTLPELQQVPTVTDDIIAKIKHPSEFSMVFYTDGSAIKHPNVNKSHNAGMGIAQVQFKPEFTVINTWSIPLGDHTAQLAEVAAVEFACKKALKIDGPVLIVTDSFYVAESVNKELPYWQSNGFFNNKKKPLKHVSKWKSIADCIQLKPDIIIIHEKGHQPTASTFHTEGNNLADKLATQGSYVVNAGKRTADGSEFEKRTADGSEFESPKKKAKVE

SEQ ID NO: 626 - protein, 2176 aa, synthetic construct
MPAAKRVKLDGGDKKYSIGLDIGTNSVGWAVITDEYKVPSKKFKVLGNTDRHSIKKNLIGALLFDSGETAEATRLKRTARRRYTRRKNRICYLQEIFSNEMAKVDDSFFHRLEESFLVEEDKKHERHPIFGNIVDEVAYHEKYPTIYHLRKKLVDSTDKADLRLIYLALAHMIKFRGHFLIEGDLNPDNSDVDKLFIQLVQTYNQLFEENPINASGVDAKAILSARLSKSRRLENLIAQLPGEKKNGLFGNLIALSLGLTPNFKSNFDLAEDAKLQLSKDTYDDDLDNLLAQIGDQYADLFLAAKNLSDAILLSDILRVNTEITKAPLSASMIKRYDEHHQDLTLLKALVRQQLPEKYKEIFFDQSKNGYAGYIDGGASQEEFYKFIKPILEKMDGTEELLVKLNREDLLRKQRTFDNGSIPHQIHLGELHAILRRQEDFYPFLKDNREKIEKILTFRIPYYVGPLARGNSRFAWMTRKSEETITPWNFEEVVDKGASAQSFIERMTNFDKNLPNEKVLPKHSLLYEYFTVYNELTKVKYVTEGMRKPAFLSGEQKKAIVDLLFKTNRKVTVKQLKEDYFKKIECFDSVEISGVEDRFNASLGTYHDLLKIIKDKDFLDNEENEDILEDIVLTLTLFEDREMIEERLKTYAHLFDDKVMKQLKRRRYTGWGRLSRKLINGIRDKQSGKTILDFLKSDGFANRNFMQLIHDDSLTFKEDIQKAQVSGQGDSLHEHIANLAGSPAIKKGILQTVKVVDELVKVMGRHKPENIVIEMARENQTTQKGQKNSRERMKRIEEGIKELGSQILKEHPVENTQLQNEKLYLYYLQNGRDMYVDQELDINRLSDYDVDHIVPQSFLKDDSIDNKVLTRSDKARGKSDNVPSEEVVKKMKNYWRQLLNAKLITQRKFDNLTKAERGGLSELDKAGFIKRQLVETRQITKHVAQILDSRMNTKYDENDKLIREVKVITLKSKLVSDFRKDFQFYKVREINNYHHAHDAYLNAVVGTALIKKYPKLESEFVYGDYKVYDVRKMIAKSEQEIGKATAKYFFYSNIMNFFKTEITLANGEIRKRPLIETNGETGEIVWDKGRDFATVRKVLSMPQVNIVKKTEVQTGGFSKESILPKRNSDKLIARKKDWDPKKYGGFDSPTVAYSVLVVAKVEKGKSKKLKSVKELLGITIMERSSFEKNPIDFLEAKGYKEVKKDLIIKLPKYSLFELENGRKRMLASAGELQKGNELALPSKYVNFLYLASHYEKLKGSPEDNEQKQLFVEQHKHYLDEIIEQISEFSKRVILADANLDKVLSAYNKHRDKPIREQAENIIHLFTLTNLGAPAAFKYFDTTIDRKRYTSTKEVLDATLIHQSITGLYETRIDLSQLGGDGGEAAAKGGGGGSGGMDPLQLLQPLEAEIKGTKLKAHWNSGATITCVPQAFLEEEVPIKNIWIKTIHGEKEQPVYYLTFKIQGRKVEAEVISSPYDYILVSPSDIPWLMKKPLQLTTLVPLQEYEERLLKQTMLTGSYKEKLQSLFLKYDALWQHWENQVGHRRIKPHHIATGTVNPRPQKQYPINPKAKASIQTVINDLLKQGVLIQQNSIMNTPVYPVPKPDGKWRMVLDYREVNKTIPLIAAQNQHSAGILSSIFRGKYKTTLDLSNGFWAHSITPESYWLTAFTWLGQQYCWTRLPQGFLNSPALFNADVVDLLKEVPNVQVYVDDIYISHDDPREHLEQLEKVFSLLLNAGYVVSLKKSEIAQHEVEFLGFNITKEGRGLTETFKQKLLNITPPRDLKQLQSILGLLNFARNFIPNFSELVKPLYNIIATAPGKYITWTTDNSQQLQNIISMLNSAENLEERNPEVRLIMKVNTSPSAGYIRFYNEFAKRPIMYLNYVYTKAEVKFTNTEKLLTTIHKGLIKALDLGMGQEILVYSPIVSMTKIQKTPLPERKALPIRWITWMSYLEDPRIQFHYDKTLPELQQVPTVTDDIIAKIKHPSEFSMVFYTDGSAIKHPNVNKSHNAGMGIAQVQFKPEFTVINTWSIPLGDHTAQLAEVAAVEFACKKALKIDGPVLIVTDSFYVAESVNKELPYWQSNGFFNNKKKPLKHVSKWKSIADCIQLKPDIIIIHEKGHQPTASTFHTEGNNLADKLATQGSYVVNAGKRTADGSEFEKRTADGSEFESPKKKAKVE

SEQ ID NO: 627 - protein, 2177 aa, synthetic construct
MPAAKRVKLDGGDKKYSIGLDIGTNSVGWAVITDEYKVPSKKFKVLGNTDRHSIKKNLIGALLFDSGETAEATRLKRTARRRYTRRKNRICYLQEIFSNEMAKVDDSFFHRLEESFLVEEDKKHERHPIFGNIVDEVAYHEKYPTIYHLRKKLVDSTDKADLRLIYLALAHMIKFRGHFLIEGDLNPDNSDVDKLFIQLVQTYNQLFEENPINASGVDAKAILSARLSKSRRLENLIAQLPGEKKNGLFGNLIALSLGLTPNFKSNFDLAEDAKLQLSKDTYDDDLDNLLAQIGDQYADLFLAAKNLSDAILLSDILRVNTEITKAPLSASMIKRYDEHHQDLTLLKALVRQQLPEKYKEIFFDQSKNGYAGYIDGGASQEEFYKFIKPILEKMDGTEELLVKLNREDLLRKQRTFDNGSIPHQIHLGELHAILRRQEDFYPFLKDNREKIEKILTFRIPYYVGPLARGNSRFAWMTRKSEETITPWNFEEVVDKGASAQSFIERMTNFDKNLPNEKVLPKHSLLYEYFTVYNELTKVKYVTEGMRKPAFLSGEQKKAIVDLLFKTNRKVTVKQLKEDYFKKIECFDSVEISGVEDRFNASLGTYHDLLKIIKDKDFLDNEENEDILEDIVLTLTLFEDREMIEERLKTYAHLFDDKVMKQLKRRRYTGWGRLSRKLINGIRDKQSGKTILDFLKSDGFANRNFMQLIHDDSLTFKEDIQKAQVSGQGDSLHEHIANLAGSPAIKKGILQTVKVVDELVKVMGRHKPENIVIEMARENQTTQKGQKNSRERMKRIEEGIKELGSQILKEHPVENTQLQNEKLYLYYLQNGRDMYVDQELDINRLSDYDVDHIVPQSFLKDDSIDNKVLTRSDKARGKSDNVPSEEVVKKMKNYWRQLLNAKLITQRKFDNLTKAERGGLSELDKAGFIKRQLVETRQITKHVAQILDSRMNTKYDENDKLIREVKVITLKSKLVSDFRKDFQFYKVREINNYHHAHDAYLNAVVGTALIKKYPKLESEFVYGDYKVYDVRKMIAKSEQEIGKATAKYFFYSNIMNFFKTEITLANGEIRKRPLIETNGETGEIVWDKGRDFATVRKVLSMPQVNIVKKTEVQTGGFSKESILPKRNSDKLIARKKDWDPKKYGGFDSPTVAYSVLVVAKVEKGKSKKLKSVKELLGITIMERSSFEKNPIDFLEAKGYKEVKKDLIIKLPKYSLFELENGRKRMLASAGELQKGNELALPSKYVNFLYLASHYEKLKGSPEDNEQKQLFVEQHKHYLDEIIEQISEFSKRVILADANLDKVLSAYNKHRDKPIREQAENIIHLFTLTNLGAPAAFKYFDTTIDRKRYTSTKEVLDATLIHQSITGLYETRIDLSQLGGDGGGSSGSSGSSGSSGGMDPLQLLQPLEAEIKGTKLKAHWNSGATITCVPQAFLEEEVPIKNIWIKTIHGEKEQPVYYLTFKIQGRKVEAEVISSPYDYILVSPSDIPWLMKKPLQLTTLVPLQEYEERLLKQTMLTGSYKEKLQSLFLKYDALWQHWENQVGHRRIKPHHIATGTVNPRPQKQYPINPKAKASIQTVINDLLKQGVLIQQNSIMNTPVYPVPKPDGKWRMVLDYREVNKTIPLIAAQNQHSAGILSSIFRGKYKTTLDLSNGFWAHSITPESYWLTAFTWLGQQYCWTRLPQGFLNSPALFNADVVDLLKEVPNVQVYVDDIYISHDDPREHLEQLEKVFSLLLNAGYVVSLKKSEIAQHEVEFLGFNITKEGRGLTETFKQKLLNITPPRDLKQLQSILGLLNFARNFIPNFSELVKPLYNIIATAPGKYITWTTDNSQQLQNIISMLNSAENLEERNPEVRLIMKVNTSPSAGYIRFYNEFAKRPIMYLNYVYTKAEVKFTNTEKLLTTIHKGLIKALDLGMGQEILVYSPIVSMTKIQKTPLPERKALPIRWITWMSYLEDPRIQFHYDKTLPELQQVPTVTDDIIAKIKHPSEFSMVFYTDGSAIKHPNVNKSHNAGMGIAQVQFKPEFTVINTWSIPLGDHTAQLAEVAAVEFACKKALKIDGPVLIVTDSFYVAESVNKELPYWQSNGFFNNKKKPLKHVSKWKSIADCIQLKPDIIIIHEKGHQPTASTFHTEGNNLADKLATQGSYVVNAGKRTADGSEFEKRTADGSEFESPKKKAKVE

SEQ ID NO: 628 - protein, 2176 aa, synthetic construct
MPAAKRVKLDGGDKKYSIGLDIGTNSVGWAVITDEYKVPSKKFKVLGNTDRHSIKKNLIGALLFDSGETAEATRLKRTARRRYTRRKNRICYLQEIFSNEMAKVDDSFFHRLEESFLVEEDKKHERHPIFGNIVDEVAYHEKYPTIYHLRKKLVDSTDKADLRLIYLALAHMIKFRGHFLIEGDLNPDNSDVDKLFIQLVQTYNQLFEENPINASGVDAKAILSARLSKSRRLENLIAQLPGEKKNGLFGNLIALSLGLTPNFKSNFDLAEDAKLQLSKDTYDDDLDNLLAQIGDQYADLFLAAKNLSDAILLSDILRVNTEITKAPLSASMIKRYDEHHQDLTLLKALVRQQLPEKYKEIFFDQSKNGYAGYIDGGASQEEFYKFIKPILEKMDGTEELLVKLNREDLLRKQRTFDNGSIPHQIHLGELHAILRRQEDFYPFLKDNREKIEKILTFRIPYYVGPLARGNSRFAWMTRKSEETITPWNFEEVVDKGASAQSFIERMTNFDKNLPNEKVLPKHSLLYEYFTVYNELTKVKYVTEGMRKPAFLSGEQKKAIVDLLFKTNRKVTVKQLKEDYFKKIECFDSVEISGVEDRFNASLGTYHDLLKIIKDKDFLDNEENEDILEDIVLTLTLFEDREMIEERLKTYAHLFDDKVMKQLKRRRYTGWGRLSRKLINGIRDKQSGKTILDFLKSDGFANRNFMQLIHDDSLTFKEDIQKAQVSGQGDSLHEHIANLAGSPAIKKGILQTVKVVDELVKVMGRHKPENIVIEMARENQTTQKGQKNSRERMKRIEEGIKELGSQILKEHPVENTQLQNEKLYLYYLQNGRDMYVDQELDINRLSDYDVDHIVPQSFLKDDSIDNKVLTRSDKARGKSDNVPSEEVVKKMKNYWRQLLNAKLITQRKFDNLTKAERGGLSELDKAGFIKRQLVETRQITKHVAQILDSRMNTKYDENDKLIREVKVITLKSKLVSDFRKDFQFYKVREINNYHHAHDAYLNAVVGTALIKKYPKLESEFVYGDYKVYDVRKMIAKSEQEIGKATAKYFFYSNIMNFFKTEITLANGEIRKRPLIETNGETGEIVWDKGRDFATVRKVLSMPQVNIVKKTEVQTGGFSKESILPKRNSDKLIARKKDWDPKKYGGFDSPTVAYSVLVVAKVEKGKSKKLKSVKELLGITIMERSSFEKNPIDFLEAKGYKEVKKDLIIKLPKYSLFELENGRKRMLASAGELQKGNELALPSKYVNFLYLASHYEKLKGSPEDNEQKQLFVEQHKHYLDEIIEQISEFSKRVILADANLDKVLSAYNKHRDKPIREQAENIIHLFTLTNLGAPAAFKYFDTTIDRKRYTSTKEVLDATLIHQSITGLYETRIDLSQLGGDGGGSSEAAAKGGSGGMDPLQLLQPLEAEIKGTKLKAHWNSGATITCVPQAFLEEEVPIKNIWIKTIHGEKEQPVYYLTFKIQGRKVEAEVISSPYDYILVSPSDIPWLMKKPLQLTTLVPLQEYEERLLKQTMLTGSYKEKLQSLFLKYDALWQHWENQVGHRRIKPHHIATGTVNPRPQKQYPINPKAKASIQTVINDLLKQGVLIQQNSIMNTPVYPVPKPDGKWRMVLDYREVNKTIPLIAAQNQHSAGILSSIFRGKYKTTLDLSNGFWAHSITPESYWLTAFTWLGQQYCWTRLPQGFLNSPALFNADVVDLLKEVPNVQVYVDDIYISHDDPREHLEQLEKVFSLLLNAGYVVSLKKSEIAQHEVEFLGFNITKEGRGLTETFKQKLLNITPPRDLKQLQSILGLLNFARNFIPNFSELVKPLYNIIATAPGKYITWTTDNSQQLQNIISMLNSAENLEERNPEVRLIMKVNTSPSAGYIRFYNEFAKRPIMYLNYVYTKAEVKFTNTEKLLTTIHKGLIKALDLGMGQEILVYSPIVSMTKIQKTPLPERKALPIRWITWMSYLEDPRIQFHYDKTLPELQQVPTVTDDIIAKIKHPSEFSMVFYTDGSAIKHPNVNKSHNAGMGIAQVQFKPEFTVINTWSIPLGDHTAQLAEVAAVEFACKKALKIDGPVLIVTDSFYVAESVNKELPYWQSNGFFNNKKKPLKHVSKWKSIADCIQLKPDIIIIHEKGHQPTASTFHTEGNNLADKLATQGSYVVNAGKRTADGSEFEKRTADGSEFESPKKKAKVE

SEQ ID NO: 629 - protein, 2176 aa, synthetic construct
MPAAKRVKLDGGDKKYSIGLDIGTNSVGWAVITDEYKVPSKKFKVLGNTDRHSIKKNLIGALLFDSGETAEATRLKRTARRRYTRRKNRICYLQEIFSNEMAKVDDSFFHRLEESFLVEEDKKHERHPIFGNIVDEVAYHEKYPTIYHLRKKLVDSTDKADLRLIYLALAHMIKFRGHFLIEGDLNPDNSDVDKLFIQLVQTYNQLFEENPINASGVDAKAILSARLSKSRRLENLIAQLPGEKKNGLFGNLIALSLGLTPNFKSNFDLAEDAKLQLSKDTYDDDLDNLLAQIGDQYADLFLAAKNLSDAILLSDILRVNTEITKAPLSASMIKRYDEHHQDLTLLKALVRQQLPEKYKEIFFDQSKNGYAGYIDGGASQEEFYKFIKPILEKMDGTEELLVKLNREDLLRKQRTFDNGSIPHQIHLGELHAILRRQEDFYPFLKDNREKIEKILTFRIPYYVGPLARGNSRFAWMTRKSEETITPWNFEEVVDKGASAQSFIERMTNFDKNLPNEKVLPKHSLLYEYFTVYNELTKVKYVTEGMRKPAFLSGEQKKAIVDLLFKTNRKVTVKQLKEDYFKKIECFDSVEISGVEDRFNASLGTYHDLLKIIKDKDFLDNEENEDILEDIVLTLTLFEDREMIEERLKTYAHLFDDKVMKQLKRRRYTGWGRLSRKLINGIRDKQSGKTILDFLKSDGFANRNFMQLIHDDSLTFKEDIQKAQVSGQGDSLHEHIANLAGSPAIKKGILQTVKVVDELVKVMGRHKPENIVIEMARENQTTQKGQKNSRERMKRIEEGIKELGSQILKEHPVENTQLQNEKLYLYYLQNGRDMYVDQELDINRLSDYDVDHIVPQSFLKDDSIDNKVLTRSDKARGKSDNVPSEEVVKKMKNYWRQLLNAKLITQRKFDNLTKAERGGLSELDKAGFIKRQLVETRQITKHVAQILDSRMNTKYDENDKLIREVKVITLKSKLVSDFRKDFQFYKVREINNYHHAHDAYLNAVVGTALIKKYPKLESEFVYGDYKVYDVRKMIAKSEQEIGKATAKYFFYSNIMNFFKTEITLANGEIRKRPLIETNGETGEIVWDKGRDFATVRKVLSMPQVNIVKKTEVQTGGFSKESILPKRNSDKLIARKKDWDPKKYGGFDSPTVAYSVLVVAKVEKGKSKKLKSVKELLGITIMERSSFEKNPIDFLEAKGYKEVKKDLIIKLPKYSLFELENGRKRMLASAGELQKGNELALPSKYVNFLYLASHYEKLKGSPEDNEQKQLFVEQHKHYLDEIIEQISEFSKRVILADANLDKVLSAYNKHRDKPIREQAENIIHLFTLTNLGAPAAFKYFDTTIDRKRYTSTKEVLDATLIHQSITGLYETRIDLSQLGGDGGEAAAKGGSPAPGGMDPLQLLQPLEAEIKGTKLKAHWNSGATITCVPQAFLEEEVPIKNIWIKTIHGEKEQPVYYLTFKIQGRKVEAEVISSPYDYILVSPSDIPWLMKKPLQLTTLVPLQEYEERLLKQTMLTGSYKEKLQSLFLKYDALWQHWENQVGHRRIKPHHIATGTVNPRPQKQYPINPKAKASIQTVINDLLKQGVLIQQNSIMNTPVYPVPKPDGKWRMVLDYREVNKTIPLIAAQNQHSAGILSSIFRGKYKTTLDLSNGFWAHSITPESYWLTAFTWLGQQYCWTRLPQGFLNSPALFNADVVDLLKEVPNVQVYVDDIYISHDDPREHLEQLEKVFSLLLNAGYVVSLKKSEIAQHEVEFLGFNITKEGRGLTETFKQKLLNITPPRDLKQLQSILGLLNFARNFIPNFSELVKPLYNIIATAPGKYITWTTDNSQQLQNIISMLNSAENLEERNPEVRLIMKVNTSPSAGYIRFYNEFAKRPIMYLNYVYTKAEVKFTNTEKLLTTIHKGLIKALDLGMGQEILVYSPIVSMTKIQKTPLPERKALPIRWITWMSYLEDPRIQFHYDKTLPELQQVPTVTDDIIAKIKHPSEFSMVFYTDGSAIKHPNVNKSHNAGMGIAQVQFKPEFTVINTWSIPLGDHTAQLAEVAAVEFACKKALKIDGPVLIVTDSFYVAESVNKELPYWQSNGFFNNKKKPLKHVSKWKSIADCIQLKPDIIIIHEKGHQPTASTFHTEGNNLADKLATQGSYVVNAGKRTADGSEFEKRTADGSEFESPKKKAKVE

SEQ ID NO: 630 - protein, 2176 aa, synthetic construct
MPAAKRVKLDGGDKKYSIGLDIGTNSVGWAVITDEYKVPSKKFKVLGNTDRHSIKKNLIGALLFDSGETAEATRLKRTARRRYTRRKNRICYLQEIFSNEMAKVDDSFFHRLEESFLVEEDKKHERHPIFGNIVDEVAYHEKYPTIYHLRKKLVDSTDKADLRLIYLALAHMIKFRGHFLIEGDLNPDNSDVDKLFIQLVQTYNQLFEENPINASGVDAKAILSARLSKSRRLENLIAQLPGEKKNGLFGNLIALSLGLTPNFKSNFDLAEDAKLQLSKDTYDDDLDNLLAQIGDQYADLFLAAKNLSDAILLSDILRVNTEITKAPLSASMIKRYDEHHQDLTLLKALVRQQLPEKYKEIFFDQSKNGYAGYIDGGASQEEFYKFIKPILEKMDGTEELLVKLNREDLLRKQRTFDNGSIPHQIHLGELHAILRRQEDFYPFLKDNREKIEKILTFRIPYYVGPLARGNSRFAWMTRKSEETITPWNFEEVVDKGASAQSFIERMTNFDKNLPNEKVLPKHSLLYEYFTVYNELTKVKYVTEGMRKPAFLSGEQKKAIVDLLFKTNRKVTVKQLKEDYFKKIECFDSVEISGVEDRFNASLGTYHDLLKIIKDKDFLDNEENEDILEDIVLTLTLFEDREMIEERLKTYAHLFDDKVMKQLKRRRYTGWGRLSRKLINGIRDKQSGKTILDFLKSDGFANRNFMQLIHDDSLTFKEDIQKAQVSGQGDSLHEHIANLAGSPAIKKGILQTVKVVDELVKVMGRHKPENIVIEMARENQTTQKGQKNSRERMKRIEEGIKELGSQILKEHPVENTQLQNEKLYLYYLQNGRDMYVDQELDINRLSDYDVDHIVPQSFLKDDSIDNKVLTRSDKARGKSDNVPSEEVVKKMKNYWRQLLNAKLITQRKFDNLTKAERGGLSELDKAGFIKRQLVETRQITKHVAQILDSRMNTKYDENDKLIREVKVITLKSKLVSDFRKDFQFYKVREINNYHHAHDAYLNAVVGTALIKKYPKLESEFVYGDYKVYDVRKMIAKSEQEIGKATAKYFFYSNIMNFFKTEITLANGEIRKRPLIETNGETGEIVWDKGRDFATVRKVLSMPQVNIVKKTEVQTGGFSKESILPKRNSDKLIARKKDWDPKKYGGFDSPTVAYSVLVVAKVEKGKSKKLKSVKELLGITIMERSSFEKNPIDFLEAKGYKEVKKDLIIKLPKYSLFELENGRKRMLASAGELQKGNELALPSKYVNFLYLASHYEKLKGSPEDNEQKQLFVEQHKHYLDEIIEQISEFSKRVILADANLDKVLSAYNKHRDKPIREQAENIIHLFTLTNLGAPAAFKYFDTTIDRKRYTSTKEVLDATLIHQSITGLYETRIDLSQLGGDGGGGGGGSEAAAKGGMDPLQLLQPLEAEIKGTKLKAHWNSGATITCVPQAFLEEEVPIKNIWIKTIHGEKEQPVYYLTFKIQGRKVEAEVISSPYDYILVSPSDIPWLMKKPLQLTTLVPLQEYEERLLKQTMLTGSYKEKLQSLFLKYDALWQHWENQVGHRRIKPHHIATGTVNPRPQKQYPINPKAKASIQTVINDLLKQGVLIQQNSIMNTPVYPVPKPDGKWRMVLDYREVNKTIPLIAAQNQHSAGILSSIFRGKYKTTLDLSNGFWAHSITPESYWLTAFTWLGQQYCWTRLPQGFLNSPALFNADVVDLLKEVPNVQVYVDDIYISHDDPREHLEQLEKVFSLLLNAGYVVSLKKSEIAQHEVEFLGFNITKEGRGLTETFKQKLLNITPPRDLKQLQSILGLLNFARNFIPNFSELVKPLYNIIATAPGKYITWTTDNSQQLQNIISMLNSAENLEERNPEVRLIMKVNTSPSAGYIRFYNEFAKRPIMYLNYVYTKAEVKFTNTEKLLTTIHKGLIKALDLGMGQEILVYSPIVSMTKIQKTPLPERKALPIRWITWMSYLEDPRIQFHYDKTLPELQQVPTVTDDIIAKIKHPSEFSMVFYTDGSAIKHPNVNKSHNAGMGIAQVQFKPEFTVINTWSIPLGDHTAQLAEVAAVEFACKKALKIDGPVLIVTDSFYVAESVNKELPYWQSNGFFNNKKKPLKHVSKWKSIADCIQLKPDIIIIHEKGHQPTASTFHTEGNNLADKLATQGSYVVNAGKRTADGSEFEKRTADGSEFESPKKKAKVE

SEQ ID NO: 631 - protein, 2174 aa, synthetic construct
MPAAKRVKLDGGDKKYSIGLDIGTNSVGWAVITDEYKVPSKKFKVLGNTDRHSIKKNLIGALLFDSGETAEATRLKRTARRRYTRRKNRICYLQEIFSNEMAKVDDSFFHRLEESFLVEEDKKHERHPIFGNIVDEVAYHEKYPTIYHLRKKLVDSTDKADLRLIYLALAHMIKFRGHFLIEGDLNPDNSDVDKLFIQLVQTYNQLFEENPINASGVDAKAILSARLSKSRRLENLIAQLPGEKKNGLFGNLIALSLGLTPNFKSNFDLAEDAKLQLSKDTYDDDLDNLLAQIGDQYADLFLAAKNLSDAILLSDILRVNTEITKAPLSASMIKRYDEHHQDLTLLKALVRQQLPEKYKEIFFDQSKNGYAGYIDGGASQEEFYKFIKPILEKMDGTEELLVKLNREDLLRKQRTFDNGSIPHQIHLGELHAILRRQEDFYPFLKDNREKIEKILTFRIPYYVGPLARGNSRFAWMTRKSEETITPWNFEEVVDKGASAQSFIERMTNFDKNLPNEKVLPKHSLLYEYFTVYNELTKVKYVTEGMRKPAFLSGEQKKAIVDLLFKTNRKVTVKQLKEDYFKKIECFDSVEISGVEDRFNASLGTYHDLLKIIKDKDFLDNEENEDILEDIVLTLTLFEDREMIEERLKTYAHLFDDKVMKQLKRRRYTGWGRLSRKLINGIRDKQSGKTILDFLKSDGFANRNFMQLIHDDSLTFKEDIQKAQVSGQGDSLHEHIANLAGSPAIKKGILQTVKVVDELVKVMGRHKPENIVIEMARENQTTQKGQKNSRERMKRIEEGIKELGSQILKEHPVENTQLQNEKLYLYYLQNGRDMYVDQELDINRLSDYDVDHIVPQSFLKDDSIDNKVLTRSDKARGKSDNVPSEEVVKKMKNYWRQLLNAKLITQRKFDNLTKAERGGLSELDKAGFIKRQLVETRQITKHVAQILDSRMNTKYDENDKLIREVKVITLKSKLVSDFRKDFQFYKVREINNYHHAHDAYLNAVVGTALIKKYPKLESEFVYGDYKVYDVRKMIAKSEQEIGKATAKYFFYSNIMNFFKTEITLANGEIRKRPLIETNGETGEIVWDKGRDFATVRKVLSMPQVNIVKKTEVQTGGFSKESILPKRNSDKLIARKKDWDPKKYGGFDSPTVAYSVLVVAKVEKGKSKKLKSVKELLGITIMERSSFEKNPIDFLEAKGYKEVKKDLIIKLPKYSLFELENGRKRMLASAGELQKGNELALPSKYVNFLYLASHYEKLKGSPEDNEQKQLFVEQHKHYLDEIIEQISEFSKRVILADANLDKVLSAYNKHRDKPIREQAENIIHLFTLTNLGAPAAFKYFDTTIDRKRYTSTKEVLDATLIHQSITGLYETRIDLSQLGGDGGGGGGSSPAPGGMDPLQLLQPLEAEIKGTKLKAHWNSGATITCVPQAFLEEEVPIKNIWIKTIHGEKEQPVYYLTFKIQGRKVEAEVISSPYDYILVSPSDIPWLMKKPLQLTTLVPLQEYEERLLKQTMLTGSYKEKLQSLFLKYDALWQHWENQVGHRRIKPHHIATGTVNPRPQKQYPINPKAKASIQTVINDLLKQGVLIQQNSIMNTPVYPVPKPDGKWRMVLDYREVNKTIPLIAAQNQHSAGILSSIFRGKYKTTLDLSNGFWAHSITPESYWLTAFTWLGQQYCWTRLPQGFLNSPALFNADVVDLLKEVPNVQVYVDDIYISHDDPREHLEQLEKVFSLLLNAGYVVSLKKSEIAQHEVEFLGFNITKEGRGLTETFKQKLLNITPPRDLKQLQSILGLLNFARNFIPNFSELVKPLYNIIATAPGKYITWTTDNSQQLQNIISMLNSAENLEERNPEVRLIMKVNTSPSAGYIRFYNEFAKRPIMYLNYVYTKAEVKFTNTEKLLTTIHKGLIKALDLGMGQEILVYSPIVSMTKIQKTPLPERKALPIRWITWMSYLEDPRIQFHYDKTLPELQQVPTVTDDIIAKIKHPSEFSMVFYTDGSAIKHPNVNKSHNAGMGIAQVQFKPEFTVINTWSIPLGDHTAQLAEVAAVEFACKKALKIDGPVLIVTDSFYVAESVNKELPYWQSNGFFNNKKKPLKHVSKWKSIADCIQLKPDIIIIHEKGHQPTASTFHTEGNNLADKLATQGSYVVNAGKRTADGSEFEKRTADGSEFESPKKKAKVE

SEQ ID NO: 632 - protein, 2176 aa, synthetic construct
MPAAKRVKLDGGDKKYSIGLDIGTNSVGWAVITDEYKVPSKKFKVLGNTDRHSIKKNLIGALLFDSGETAEATRLKRTARRRYTRRKNRICYLQEIFSNEMAKVDDSFFHRLEESFLVEEDKKHERHPIFGNIVDEVAYHEKYPTIYHLRKKLVDSTDKADLRLIYLALAHMIKFRGHFLIEGDLNPDNSDVDKLFIQLVQTYNQLFEENPINASGVDAKAILSARLSKSRRLENLIAQLPGEKKNGLFGNLIALSLGLTPNFKSNFDLAEDAKLQLSKDTYDDDLDNLLAQIGDQYADLFLAAKNLSDAILLSDILRVNTEITKAPLSASMIKRYDEHHQDLTLLKALVRQQLPEKYKEIFFDQSKNGYAGYIDGGASQEEFYKFIKPILEKMDGTEELLVKLNREDLLRKQRTFDNGSIPHQIHLGELHAILRRQEDFYPFLKDNREKIEKILTFRIPYYVGPLARGNSRFAWMTRKSEETITPWNFEEVVDKGASAQSFIERMTNFDKNLPNEKVLPKHSLLYEYFTVYNELTKVKYVTEGMRKPAFLSGEQKKAIVDLLFKTNRKVTVKQLKEDYFKKIECFDSVEISGVEDRFNASLGTYHDLLKIIKDKDFLDNEENEDILEDIVLTLTLFEDREMIEERLKTYAHLFDDKVMKQLKRRRYTGWGRLSRKLINGIRDKQSGKTILDFLKSDGFANRNFMQLIHDDSLTFKEDIQKAQVSGQGDSLHEHIANLAGSPAIKKGILQTVKVVDELVKVMGRHKPENIVIEMARENQTTQKGQKNSRERMKRIEEGIKELGSQILKEHPVENTQLQNEKLYLYYLQNGRDMYVDQELDINRLSDYDVDHIVPQSFLKDDSIDNKVLTRSDKARGKSDNVPSEEVVKKMKNYWRQLLNAKLITQRKFDNLTKAERGGLSELDKAGFIKRQLVETRQITKHVAQILDSRMNTKYDENDKLIREVKVITLKSKLVSDFRKDFQFYKVREINNYHHAHDAYLNAVVGTALIKKYPKLESEFVYGDYKVYDVRKMIAKSEQEIGKATAKYFFYSNIMNFFKTEITLANGEIRKRPLIETNGETGEIVWDKGRDFATVRKVLSMPQVNIVKKTEVQTGGFSKESILPKRNSDKLIARKKDWDPKKYGGFDSPTVAYSVLVVAKVEKGKSKKLKSVKELLGITIMERSSFEKNPIDFLEAKGYKEVKKDLIIKLPKYSLFELENGRKRMLASAGELQKGNELALPSKYVNFLYLASHYEKLKGSPEDNEQKQLFVEQHKHYLDEIIEQISEFSKRVILADANLDKVLSAYNKHRDKPIREQAENIIHLFTLTNLGAPAAFKYFDTTIDRKRYTSTKEVLDATLIHQSITGLYETRIDLSQLGGDGGEAAAKPAPGSSGGMDPLQLLQPLEAEIKGTKLKAHWNSGATITCVPQAFLEEEVPIKNIWIKTIHGEKEQPVYYLTFKIQGRKVEAEVISSPYDYILVSPSDIPWLMKKPLQLTTLVPLQEYEERLLKQTMLTGSYKEKLQSLFLKYDALWQHWENQVGHRRIKPHHIATGTVNPRPQKQYPINPKAKASIQTVINDLLKQGVLIQQNSIMNTPVYPVPKPDGKWRMVLDYREVNKTIPLIAAQNQHSAGILSSIFRGKYKTTLDLSNGFWAHSITPESYWLTAFTWLGQQYCWTRLPQGFLNSPALFNADVVDLLKEVPNVQVYVDDIYISHDDPREHLEQLEKVFSLLLNAGYVVSLKKSEIAQHEVEFLGFNITKEGRGLTETFKQKLLNITPPRDLKQLQSILGLLNFARNFIPNFSELVKPLYNIIATAPGKYITWTTDNSQQLQNIISMLNSAENLEERNPEVRLIMKVNTSPSAGYIRFYNEFAKRPIMYLNYVYTKAEVKFTNTEKLLTTIHKGLIKALDLGMGQEILVYSPIVSMTKIQKTPLPERKALPIRWITWMSYLEDPRIQFHYDKTLPELQQVPTVTDDIIAKIKHPSEFSMVFYTDGSAIKHPNVNKSHNAGMGIAQVQFKPEFTVINTWSIPLGDHTAQLAEVAAVEFACKKALKIDGPVLIVTDSFYVAESVNKELPYWQSNGFFNNKKKPLKHVSKWKSIADCIQLKPDIIIIHEKGHQPTASTFHTEGNNLADKLATQGSYVVNAGKRTADGSEFEKRTADGSEFESPKKKAKVE

SEQ ID NO: 633 - protein, 2176 aa, synthetic construct
MPAAKRVKLDGGDKKYSIGLDIGTNSVGWAVITDEYKVPSKKFKVLGNTDRHSIKKNLIGALLFDSGETAEATRLKRTARRRYTRRKNRICYLQEIFSNEMAKVDDSFFHRLEESFLVEEDKKHERHPIFGNIVDEVAYHEKYPTIYHLRKKLVDSTDKADLRLIYLALAHMIKFRGHFLIEGDLNPDNSDVDKLFIQLVQTYNQLFEENPINASGVDAKAILSARLSKSRRLENLIAQLPGEKKNGLFGNLIALSLGLTPNFKSNFDLAEDAKLQLSKDTYDDDLDNLLAQIGDQYADLFLAAKNLSDAILLSDILRVNTEITKAPLSASMIKRYDEHHQDLTLLKALVRQQLPEKYKEIFFDQSKNGYAGYIDGGASQEEFYKFIKPILEKMDGTEELLVKLNREDLLRKQRTFDNGSIPHQIHLGELHAILRRQEDFYPFLKDNREKIEKILTFRIPYYVGPLARGNSRFAWMTRKSEETITPWNFEEVVDKGASAQSFIERMTNFDKNLPNEKVLPKHSLLYEYFTVYNELTKVKYVTEGMRKPAFLSGEQKKAIVDLLFKTNRKVTVKQLKEDYFKKIECFDSVEISGVEDRFNASLGTYHDLLKIIKDKDFLDNEENEDILEDIVLTLTLFEDREMIEERLKTYAHLFDDKVMKQLKRRRYTGWGRLSRKLINGIRDKQSGKTILDFLKSDGFANRNFMQLIHDDSLTFKEDIQKAQVSGQGDSLHEHIANLAGSPAIKKGILQTVKVVDELVKVMGRHKPENIVIEMARENQTTQKGQKNSRERMKRIEEGIKELGSQILKEHPVENTQLQNEKLYLYYLQNGRDMYVDQELDINRLSDYDVDHIVPQSFLKDDSIDNKVLTRSDKARGKSDNVPSEEVVKKMKNYWRQLLNAKLITQRKFDNLTKAERGGLSELDKAGFIKRQLVETRQITKHVAQILDSRMNTKYDENDKLIREVKVITLKSKLVSDFRKDFQFYKVREINNYHHAHDAYLNAVVGTALIKKYPKLESEFVYGDYKVYDVRKMIAKSEQEIGKATAKYFFYSNIMNFFKTEITLANGEIRKRPLIETNGETGEIVWDKGRDFATVRKVLSMPQVNIVKKTEVQTGGFSKESILPKRNSDKLIARKKDWDPKKYGGFDSPTVAYSVLVVAKVEKGKSKKLKSVKELLGITIMERSSFEKNPIDFLEAKGYKEVKKDLIIKLPKYSLFELENGRKRMLASAGELQKGNELALPSKYVNFLYLASHYEKLKGSPEDNEQKQLFVEQHKHYLDEIIEQISEFSKRVILADANLDKVLSAYNKHRDKPIREQAENIIHLFTLTNLGAPAAFKYFDTTIDRKRYTSTKEVLDATLIHQSITGLYETRIDLSQLGGDGGGGSPAPEAAAKGGMDPLQLLQPLEAEIKGTKLKAHWNSGATITCVPQAFLEEEVPIKNIWIKTIHGEKEQPVYYLTFKIQGRKVEAEVISSPYDYILVSPSDIPWLMKKPLQLTTLVPLQEYEERLLKQTMLTGSYKEKLQSLFLKYDALWQHWENQVGHRRIKPHHIATGTVNPRPQKQYPINPKAKASIQTVINDLLKQGVLIQQNSIMNTPVYPVPKPDGKWRMVLDYREVNKTIPLIAAQNQHSAGILSSIFRGKYKTTLDLSNGFWAHSITPESYWLTAFTWLGQQYCWTRLPQGFLNSPALFNADVVDLLKEVPNVQVYVDDIYISHDDPREHLEQLEKVFSLLLNAGYVVSLKKSEIAQHEVEFLGFNITKEGRGLTETFKQKLLNITPPRDLKQLQSILGLLNFARNFIPNFSELVKPLYNIIATAPGKYITWTTDNSQQLQNIISMLNSAENLEERNPEVRLIMKVNTSPSAGYIRFYNEFAKRPIMYLNYVYTKAEVKFTNTEKLLTTIHKGLIKALDLGMGQEILVYSPIVSMTKIQKTPLPERKALPIRWITWMSYLEDPRIQFHYDKTLPELQQVPTVTDDIIAKIKHPSEFSMVFYTDGSAIKHPNVNKSHNAGMGIAQVQFKPEFTVINTWSIPLGDHTAQLAEVAAVEFACKKALKIDGPVLIVTDSFYVAESVNKELPYWQSNGFFNNKKKPLKHVSKWKSIADCIQLKPDIIIIHEKGHQPTASTFHTEGNNLADKLATQGSYVVNAGKRTADGSEFEKRTADGSEFESPKKKAKVE

SEQ ID NO: 634 - protein, 2174 aa, synthetic construct
MPAAKRVKLDGGDKKYSIGLDIGTNSVGWAVITDEYKVPSKKFKVLGNTDRHSIKKNLIGALLFDSGETAEATRLKRTARRRYTRRKNRICYLQEIFSNEMAKVDDSFFHRLEESFLVEEDKKHERHPIFGNIVDEVAYHEKYPTIYHLRKKLVDSTDKADLRLIYLALAHMIKFRGHFLIEGDLNPDNSDVDKLFIQLVQTYNQLFEENPINASGVDAKAILSARLSKSRRLENLIAQLPGEKKNGLFGNLIALSLGLTPNFKSNFDLAEDAKLQLSKDTYDDDLDNLLAQIGDQYADLFLAAKNLSDAILLSDILRVNTEITKAPLSASMIKRYDEHHQDLTLLKALVRQQLPEKYKEIFFDQSKNGYAGYIDGGASQEEFYKFIKPILEKMDGTEELLVKLNREDLLRKQRTFDNGSIPHQIHLGELHAILRRQEDFYPFLKDNREKIEKILTFRIPYYVGPLARGNSRFAWMTRKSEETITPWNFEEVVDKGASAQSFIERMTNFDKNLPNEKVLPKHSLLYEYFTVYNELTKVKYVTEGMRKPAFLSGEQKKAIVDLLFKTNRKVTVKQLKEDYFKKIECFDSVEISGVEDRFNASLGTYHDLLKIIKDKDFLDNEENEDILEDIVLTLTLFEDREMIEERLKTYAHLFDDKVMKQLKRRRYTGWGRLSRKLINGIRDKQSGKTILDFLKSDGFANRNFMQLIHDDSLTFKEDIQKAQVSGQGDSLHEHIANLAGSPAIKKGILQTVKVVDELVKVMGRHKPENIVIEMARENQTTQKGQKNSRERMKRIEEGIKELGSQILKEHPVENTQLQNEKLYLYYLQNGRDMYVDQELDINRLSDYDVDHIVPQSFLKDDSIDNKVLTRSDKARGKSDNVPSEEVVKKMKNYWRQLLNAKLITQRKFDNLTKAERGGLSELDKAGFIKRQLVETRQITKHVAQILDSRMNTKYDENDKLIREVKVITLKSKLVSDFRKDFQFYKVREINNYHHAHDAYLNAVVGTALIKKYPKLESEFVYGDYKVYDVRKMIAKSEQEIGKATAKYFFYSNIMNFFKTEITLANGEIRKRPLIETNGETGEIVWDKGRDFATVRKVLSMPQVNIVKKTEVQTGGFSKESILPKRNSDKLIARKKDWDPKKYGGFDSPTVAYSVLVVAKVEKGKSKKLKSVKELLGITIMERSSFEKNPIDFLEAKGYKEVKKDLIIKLPKYSLFELENGRKRMLASAGELQKGNELALPSKYVNFLYLASHYEKLKGSPEDNEQKQLFVEQHKHYLDEIIEQISEFSKRVILADANLDKVLSAYNKHRDKPIREQAENIIHLFTLTNLGAPAAFKYFDTTIDRKRYTSTKEVLDATLIHQSITGLYETRIDLSQLGGDGGGGGPAPGSSGGMDPLQLLQPLEAEIKGTKLKAHWNSGATITCVPQAFLEEEVPIKNIWIKTIHGEKEQPVYYLTFKIQGRKVEAEVISSPYDYILVSPSDIPWLMKKPLQLTTLVPLQEYEERLLKQTMLTGSYKEKLQSLFLKYDALWQHWENQVGHRRIKPHHIATGTVNPRPQKQYPINPKAKASIQTVINDLLKQGVLIQQNSIMNTPVYPVPKPDGKWRMVLDYREVNKTIPLIAAQNQHSAGILSSIFRGKYKTTLDLSNGFWAHSITPESYWLTAFTWLGQQYCWTRLPQGFLNSPALFNADVVDLLKEVPNVQVYVDDIYISHDDPREHLEQLEKVFSLLLNAGYVVSLKKSEIAQHEVEFLGFNITKEGRGLTETFKQKLLNITPPRDLKQLQSILGLLNFARNFIPNFSELVKPLYNIIATAPGKYITWTTDNSQQLQNIISMLNSAENLEERNPEVRLIMKVNTSPSAGYIRFYNEFAKRPIMYLNYVYTKAEVKFTNTEKLLTTIHKGLIKALDLGMGQEILVYSPIVSMTKIQKTPLPERKALPIRWITWMSYLEDPRIQFHYDKTLPELQQVPTVTDDIIAKIKHPSEFSMVFYTDGSAIKHPNVNKSHNAGMGIAQVQFKPEFTVINTWSIPLGDHTAQLAEVAAVEFACKKALKIDGPVLIVTDSFYVAESVNKELPYWQSNGFFNNKKKPLKHVSKWKSIADCIQLKPDIIIIHEKGHQPTASTFHTEGNNLADKLATQGSYVVNAGKRTADGSEFEKRTADGSEFESPKKKAKVE

SEQ ID NO: 635 - protein, 2174 aa, synthetic construct
MPAAKRVKLDGGDKKYSIGLDIGTNSVGWAVITDEYKVPSKKFKVLGNTDRHSIKKNLIGALLFDSGETAEATRLKRTARRRYTRRKNRICYLQEIFSNEMAKVDDSFFHRLEESFLVEEDKKHERHPIFGNIVDEVAYHEKYPTIYHLRKKLVDSTDKADLRLIYLALAHMIKFRGHFLIEGDLNPDNSDVDKLFIQLVQTYNQLFEENPINASGVDAKAILSARLSKSRRLENLIAQLPGEKKNGLFGNLIALSLGLTPNFKSNFDLAEDAKLQLSKDTYDDDLDNLLAQIGDQYADLFLAAKNLSDAILLSDILRVNTEITKAPLSASMIKRYDEHHQDLTLLKALVRQQLPEKYKEIFFDQSKNGYAGYIDGGASQEEFYKFIKPILEKMDGTEELLVKLNREDLLRKQRTFDNGSIPHQIHLGELHAILRRQEDFYPFLKDNREKIEKILTFRIPYYVGPLARGNSRFAWMTRKSEETITPWNFEEVVDKGASAQSFIERMTNFDKNLPNEKVLPKHSLLYEYFTVYNELTKVKYVTEGMRKPAFLSGEQKKAIVDLLFKTNRKVTVKQLKEDYFKKIECFDSVEISGVEDRFNASLGTYHDLLKIIKDKDFLDNEENEDILEDIVLTLTLFEDREMIEERLKTYAHLFDDKVMKQLKRRRYTGWGRLSRKLINGIRDKQSGKTILDFLKSDGFANRNFMQLIHDDSLTFKEDIQKAQVSGQGDSLHEHIANLAGSPAIKKGILQTVKVVDELVKVMGRHKPENIVIEMARENQTTQKGQKNSRERMKRIEEGIKELGSQILKEHPVENTQLQNEKLYLYYLQNGRDMYVDQELDINRLSDYDVDHIVPQSFLKDDSIDNKVLTRSDKARGKSDNVPSEEVVKKMKNYWRQLLNAKLITQRKFDNLTKAERGGLSELDKAGFIKRQLVETRQITKHVAQILDSRMNTKYDENDKLIREVKVITLKSKLVSDFRKDFQFYKVREINNYHHAHDAYLNAVVGTALIKKYPKLESEFVYGDYKVYDVRKMIAKSEQEIGKATAKYFFYSNIMNFFKTEITLANGEIRKRPLIETNGETGEIVWDKGRDFATVRKVLSMPQVNIVKKTEVQTGGFSKESILPKRNSDKLIARKKDWDPKKYGGFDSPTVAYSVLVVAKVEKGKSKKLKSVKELLGITIMERSSFEKNPIDFLEAKGYKEVKKDLIIKLPKYSLFELENGRKRMLASAGELQKGNELALPSKYVNFLYLASHYEKLKGSPEDNEQKQLFVEQHKHYLDEIIEQISEFSKRVILADANLDKVLSAYNKHRDKPIREQAENIIHLFTLTNLGAPAAFKYFDTTIDRKRYTSTKEVLDATLIHQSITGLYETRIDLSQLGGDGGGGSGSSPAPGGMDPLQLLQPLEAEIKGTKLKAHWNSGATITCVPQAFLEEEVPIKNIWIKTIHGEKEQPVYYLTFKIQGRKVEAEVISSPYDYILVSPSDIPWLMKKPLQLTTLVPLQEYEERLLKQTMLTGSYKEKLQSLFLKYDALWQHWENQVGHRRIKPHHIATGTVNPRPQKQYPINPKAKASIQTVINDLLKQGVLIQQNSIMNTPVYPVPKPDGKWRMVLDYREVNKTIPLIAAQNQHSAGILSSIFRGKYKTTLDLSNGFWAHSITPESYWLTAFTWLGQQYCWTRLPQGFLNSPALFNADVVDLLKEVPNVQVYVDDIYISHDDPREHLEQLEKVFSLLLNAGYVVSLKKSEIAQHEVEFLGFNITKEGRGLTETFKQKLLNITPPRDLKQLQSILGLLNFARNFIPNFSELVKPLYNIIATAPGKYITWTTDNSQQLQNIISMLNSAENLEERNPEVRLIMKVNTSPSAGYIRFYNEFAKRPIMYLNYVYTKAEVKFTNTEKLLTTIHKGLIKALDLGMGQEILVYSPIVSMTKIQKTPLPERKALPIRWITWMSYLEDPRIQFHYDKTLPELQQVPTVTDDIIAKIKHPSEFSMVFYTDGSAIKHPNVNKSHNAGMGIAQVQFKPEFTVINTWSIPLGDHTAQLAEVAAVEFACKKALKIDGPVLIVTDSFYVAESVNKELPYWQSNGFFNNKKKPLKHVSKWKSIADCIQLKPDIIIIHEKGHQPTASTFHTEGNNLADKLATQGSYVVNAGKRTADGSEFEKRTADGSEFESPKKKAKVE

SEQ ID NO: 636 - protein, 2176 aa, synthetic construct
MPAAKRVKLDGGDKKYSIGLDIGTNSVGWAVITDEYKVPSKKFKVLGNTDRHSIKKNLIGALLFDSGETAEATRLKRTARRRYTRRKNRICYLQEIFSNEMAKVDDSFFHRLEESFLVEEDKKHERHPIFGNIVDEVAYHEKYPTIYHLRKKLVDSTDKADLRLIYLALAHMIKFRGHFLIEGDLNPDNSDVDKLFIQLVQTYNQLFEENPINASGVDAKAILSARLSKSRRLENLIAQLPGEKKNGLFGNLIALSLGLTPNFKSNFDLAEDAKLQLSKDTYDDDLDNLLAQIGDQYADLFLAAKNLSDAILLSDILRVNTEITKAPLSASMIKRYDEHHQDLTLLKALVRQQLPEKYKEIFFDQSKNGYAGYIDGGASQEEFYKFIKPILEKMDGTEELLVKLNREDLLRKQRTFDNGSIPHQIHLGELHAILRRQEDFYPFLKDNREKIEKILTFRIPYYVGPLARGNSRFAWMTRKSEETITPWNFEEVVDKGASAQSFIERMTNFDKNLPNEKVLPKHSLLYEYFTVYNELTKVKYVTEGMRKPAFLSGEQKKAIVDLLFKTNRKVTVKQLKEDYFKKIECFDSVEISGVEDRFNASLGTYHDLLKIIKDKDFLDNEENEDILEDIVLTLTLFEDREMIEERLKTYAHLFDDKVMKQLKRRRYTGWGRLSRKLINGIRDKQSGKTILDFLKSDGFANRNFMQLIHDDSLTFKEDIQKAQVSGQGDSLHEHIANLAGSPAIKKGILQTVKVVDELVKVMGRHKPENIVIEMARENQTTQKGQKNSRERMKRIEEGIKELGSQILKEHPVENTQLQNEKLYLYYLQNGRDMYVDQELDINRLSDYDVDHIVPQSFLKDDSIDNKVLTRSDKARGKSDNVPSEEVVKKMKNYWRQLLNAKLITQRKFDNLTKAERGGLSELDKAGFIKRQLVETRQITKHVAQILDSRMNTKYDENDKLIREVKVITLKSKLVSDFRKDFQFYKVREINNYHHAHDAYLNAVVGTALIKKYPKLESEFVYGDYKVYDVRKMIAKSEQEIGKATAKYFFYSNIMNFFKTEITLANGEIRKRPLIETNGETGEIVWDKGRDFATVRKVLSMPQVNIVKKTEVQTGGFSKESILPKRNSDKLIARKKDWDPKKYGGFDSPTVAYSVLVVAKVEKGKSKKLKSVKELLGITIMERSSFEKNPIDFLEAKGYKEVKKDLIIKLPKYSLFELENGRKRMLASAGELQKGNELALPSKYVNFLYLASHYEKLKGSPEDNEQKQLFVEQHKHYLDEIIEQISEFSKRVILADANLDKVLSAYNKHRDKPIREQAENIIHLFTLTNLGAPAAFKYFDTTIDRKRYTSTKEVLDATLIHQSITGLYETRIDLSQLGGDGGEAAAKGGGPAPGGMDPLQLLQPLEAEIKGTKLKAHWNSGATITCVPQAFLEEEVPIKNIWIKTIHGEKEQPVYYLTFKIQGRKVEAEVISSPYDYILVSPSDIPWLMKKPLQLTTLVPLQEYEERLLKQTMLTGSYKEKLQSLFLKYDALWQHWENQVGHRRIKPHHIATGTVNPRPQKQYPINPKAKASIQTVINDLLKQGVLIQQNSIMNTPVYPVPKPDGKWRMVLDYREVNKTIPLIAAQNQHSAGILSSIFRGKYKTTLDLSNGFWAHSITPESYWLTAFTWLGQQYCWTRLPQGFLNSPALFNADVVDLLKEVPNVQVYVDDIYISHDDPREHLEQLEKVFSLLLNAGYVVSLKKSEIAQHEVEFLGFNITKEGRGLTETFKQKLLNITPPRDLKQLQSILGLLNFARNFIPNFSELVKPLYNIIATAPGKYITWTTDNSQQLQNIISMLNSAENLEERNPEVRLIMKVNTSPSAGYIRFYNEFAKRPIMYLNYVYTKAEVKFTNTEKLLTTIHKGLIKALDLGMGQEILVYSPIVSMTKIQKTPLPERKALPIRWITWMSYLEDPRIQFHYDKTLPELQQVPTVTDDIIAKIKHPSEFSMVFYTDGSAIKHPNVNKSHNAGMGIAQVQFKPEFTVINTWSIPLGDHTAQLAEVAAVEFACKKALKIDGPVLIVTDSFYVAESVNKELPYWQSNGFFNNKKKPLKHVSKWKSIADCIQLKPDIIIIHEKGHQPTASTFHTEGNNLADKLATQGSYVVNAGKRTADGSEFEKRTADGSEFESPKKKAKVE

SEQ ID NO: 637 - protein, 2180 aa, synthetic construct
MPAAKRVKLDGGDKKYSIGLDIGTNSVGWAVITDEYKVPSKKFKVLGNTDRHSIKKNLIGALLFDSGETAEATRLKRTARRRYTRRKNRICYLQEIFSNEMAKVDDSFFHRLEESFLVEEDKKHERHPIFGNIVDEVAYHEKYPTIYHLRKKLVDSTDKADLRLIYLALAHMIKFRGHFLIEGDLNPDNSDVDKLFIQLVQTYNQLFEENPINASGVDAKAILSARLSKSRRLENLIAQLPGEKKNGLFGNLIALSLGLTPNFKSNFDLAEDAKLQLSKDTYDDDLDNLLAQIGDQYADLFLAAKNLSDAILLSDILRVNTEITKAPLSASMIKRYDEHHQDLTLLKALVRQQLPEKYKEIFFDQSKNGYAGYIDGGASQEEFYKFIKPILEKMDGTEELLVKLNREDLLRKQRTFDNGSIPHQIHLGELHAILRRQEDFYPFLKDNREKIEKILTFRIPYYVGPLARGNSRFAWMTRKSEETITPWNFEEVVDKGASAQSFIERMTNFDKNLPNEKVLPKHSLLYEYFTVYNELTKVKYVTEGMRKPAFLSGEQKKAIVDLLFKTNRKVTVKQLKEDYFKKIECFDSVEISGVEDRFNASLGTYHDLLKIIKDKDFLDNEENEDILEDIVLTLTLFEDREMIEERLKTYAHLFDDKVMKQLKRRRYTGWGRLSRKLINGIRDKQSGKTILDFLKSDGFANRNFMQLIHDDSLTFKEDIQKAQVSGQGDSLHEHIANLAGSPAIKKGILQTVKVVDELVKVMGRHKPENIVIEMARENQTTQKGQKNSRERMKRIEEGIKELGSQILKEHPVENTQLQNEKLYLYYLQNGRDMYVDQELDINRLSDYDVDHIVPQSFLKDDSIDNKVLTRSDKARGKSDNVPSEEVVKKMKNYWRQLLNAKLITQRKFDNLTKAERGGLSELDKAGFIKRQLVETRQITKHVAQILDSRMNTKYDENDKLIREVKVITLKSKLVSDFRKDFQFYKVREINNYHHAHDAYLNAVVGTALIKKYPKLESEFVYGDYKVYDVRKMIAKSEQEIGKATAKYFFYSNIMNFFKTEITLANGEIRKRPLIETNGETGEIVWDKGRDFATVRKVLSMPQVNIVKKTEVQTGGFSKESILPKRNSDKLIARKKDWDPKKYGGFDSPTVAYSVLVVAKVEKGKSKKLKSVKELLGITIMERSSFEKNPIDFLEAKGYKEVKKDLIIKLPKYSLFELENGRKRMLASAGELQKGNELALPSKYVNFLYLASHYEKLKGSPEDNEQKQLFVEQHKHYLDEIIEQISEFSKRVILADANLDKVLSAYNKHRDKPIREQAENIIHLFTLTNLGAPAAFKYFDTTIDRKRYTSTKEVLDATLIHQSITGLYETRIDLSQLGGDGGGSSGSSGSSGSSGSSGGMDPLQLLQPLEAEIKGTKLKAHWNSGATITCVPQAFLEEEVPIKNIWIKTIHGEKEQPVYYLTFKIQGRKVEAEVISSPYDYILVSPSDIPWLMKKPLQLTTLVPLQEYEERLLKQTMLTGSYKEKLQSLFLKYDALWQHWENQVGHRRIKPHHIATGTVNPRPQKQYPINPKAKASIQTVINDLLKQGVLIQQNSIMNTPVYPVPKPDGKWRMVLDYREVNKTIPLIAAQNQHSAGILSSIFRGKYKTTLDLSNGFWAHSITPESYWLTAFTWLGQQYCWTRLPQGFLNSPALFNADVVDLLKEVPNVQVYVDDIYISHDDPREHLEQLEKVFSLLLNAGYVVSLKKSEIAQHEVEFLGFNITKEGRGLTETFKQKLLNITPPRDLKQLQSILGLLNFARNFIPNFSELVKPLYNIIATAPGKYITWTTDNSQQLQNIISMLNSAENLEERNPEVRLIMKVNTSPSAGYIRFYNEFAKRPIMYLNYVYTKAEVKFTNTEKLLTTIHKGLIKALDLGMGQEILVYSPIVSMTKIQKTPLPERKALPIRWITWMSYLEDPRIQFHYDKTLPELQQVPTVTDDIIAKIKHPSEFSMVFYTDGSAIKHPNVNKSHNAGMGIAQVQFKPEFTVINTWSIPLGDHTAQLAEVAAVEFACKKALKIDGPVLIVTDSFYVAESVNKELPYWQSNGFFNNKKKPLKHVSKWKSIADCIQLKPDIIIIHEKGHQPTASTFHTEGNNLADKLATQGSYVVNAGKRTADGSEFEKRTADGSEFESPKKKAKVE

SEQ ID NO: 638 - protein, 2173 aa, synthetic construct
MPAAKRVKLDGGDKKYSIGLDIGTNSVGWAVITDEYKVPSKKFKVLGNTDRHSIKKNLIGALLFDSGETAEATRLKRTARRRYTRRKNRICYLQEIFSNEMAKVDDSFFHRLEESFLVEEDKKHERHPIFGNIVDEVAYHEKYPTIYHLRKKLVDSTDKADLRLIYLALAHMIKFRGHFLIEGDLNPDNSDVDKLFIQLVQTYNQLFEENPINASGVDAKAILSARLSKSRRLENLIAQLPGEKKNGLFGNLIALSLGLTPNFKSNFDLAEDAKLQLSKDTYDDDLDNLLAQIGDQYADLFLAAKNLSDAILLSDILRVNTEITKAPLSASMIKRYDEHHQDLTLLKALVRQQLPEKYKEIFFDQSKNGYAGYIDGGASQEEFYKFIKPILEKMDGTEELLVKLNREDLLRKQRTFDNGSIPHQIHLGELHAILRRQEDFYPFLKDNREKIEKILTFRIPYYVGPLARGNSRFAWMTRKSEETITPWNFEEVVDKGASAQSFIERMTNFDKNLPNEKVLPKHSLLYEYFTVYNELTKVKYVTEGMRKPAFLSGEQKKAIVDLLFKTNRKVTVKQLKEDYFKKIECFDSVEISGVEDRFNASLGTYHDLLKIIKDKDFLDNEENEDILEDIVLTLTLFEDREMIEERLKTYAHLFDDKVMKQLKRRRYTGWGRLSRKLINGIRDKQSGKTILDFLKSDGFANRNFMQLIHDDSLTFKEDIQKAQVSGQGDSLHEHIANLAGSPAIKKGILQTVKVVDELVKVMGRHKPENIVIEMARENQTTQKGQKNSRERMKRIEEGIKELGSQILKEHPVENTQLQNEKLYLYYLQNGRDMYVDQELDINRLSDYDVDHIVPQSFLKDDSIDNKVLTRSDKARGKSDNVPSEEVVKKMKNYWRQLLNAKLITQRKFDNLTKAERGGLSELDKAGFIKRQLVETRQITKHVAQILDSRMNTKYDENDKLIREVKVITLKSKLVSDFRKDFQFYKVREINNYHHAHDAYLNAVVGTALIKKYPKLESEFVYGDYKVYDVRKMIAKSEQEIGKATAKYFFYSNIMNFFKTEITLANGEIRKRPLIETNGETGEIVWDKGRDFATVRKVLSMPQVNIVKKTEVQTGGFSKESILPKRNSDKLIARKKDWDPKKYGGFDSPTVAYSVLVVAKVEKGKSKKLKSVKELLGITIMERSSFEKNPIDFLEAKGYKEVKKDLIIKLPKYSLFELENGRKRMLASAGELQKGNELALPSKYVNFLYLASHYEKLKGSPEDNEQKQLFVEQHKHYLDEIIEQISEFSKRVILADANLDKVLSAYNKHRDKPIREQAENIIHLFTLTNLGAPAAFKYFDTTIDRKRYTSTKEVLDATLIHQSITGLYETRIDLSQLGGDGGEAAAKGSSGGMDPLQLLQPLEAEIKGTKLKAHWNSGATITCVPQAFLEEEVPIKNIWIKTIHGEKEQPVYYLTFKIQGRKVEAEVISSPYDYILVSPSDIPWLMKKPLQLTTLVPLQEYEERLLKQTMLTGSYKEKLQSLFLKYDALWQHWENQVGHRRIKPHHIATGTVNPRPQKQYPINPKAKASIQTVINDLLKQGVLIQQNSIMNTPVYPVPKPDGKWRMVLDYREVNKTIPLIAAQNQHSAGILSSIFRGKYKTTLDLSNGFWAHSITPESYWLTAFTWLGQQYCWTRLPQGFLNSPALFNADVVDLLKEVPNVQVYVDDIYISHDDPREHLEQLEKVFSLLLNAGYVVSLKKSEIAQHEVEFLGFNITKEGRGLTETFKQKLLNITPPRDLKQLQSILGLLNFARNFIPNFSELVKPLYNIIATAPGKYITWTTDNSQQLQNIISMLNSAENLEERNPEVRLIMKVNTSPSAGYIRFYNEFAKRPIMYLNYVYTKAEVKFTNTEKLLTTIHKGLIKALDLGMGQEILVYSPIVSMTKIQKTPLPERKALPIRWITWMSYLEDPRIQFHYDKTLPELQQVPTVTDDIIAKIKHPSEFSMVFYTDGSAIKHPNVNKSHNAGMGIAQVQFKPEFTVINTWSIPLGDHTAQLAEVAAVEFACKKALKIDGPVLIVTDSFYVAESVNKELPYWQSNGFFNNKKKPLKHVSKWKSIADCIQLKPDIIIIHEKGHQPTASTFHTEGNNLADKLATQGSYVVNAGKRTADGSEFEKRTADGSEFESPKKKAKVE

SEQ ID NO: 639 - protein, 2172 aa, synthetic construct
MPAAKRVKLDGGDKKYSIGLDIGTNSVGWAVITDEYKVPSKKFKVLGNTDRHSIKKNLIGALLFDSGETAEATRLKRTARRRYTRRKNRICYLQEIFSNEMAKVDDSFFHRLEESFLVEEDKKHERHPIFGNIVDEVAYHEKYPTIYHLRKKLVDSTDKADLRLIYLALAHMIKFRGHFLIEGDLNPDNSDVDKLFIQLVQTYNQLFEENPINASGVDAKAILSARLSKSRRLENLIAQLPGEKKNGLFGNLIALSLGLTPNFKSNFDLAEDAKLQLSKDTYDDDLDNLLAQIGDQYADLFLAAKNLSDAILLSDILRVNTEITKAPLSASMIKRYDEHHQDLTLLKALVRQQLPEKYKEIFFDQSKNGYAGYIDGGASQEEFYKFIKPILEKMDGTEELLVKLNREDLLRKQRTFDNGSIPHQIHLGELHAILRRQEDFYPFLKDNREKIEKILTFRIPYYVGPLARGNSRFAWMTRKSEETITPWNFEEVVDKGASAQSFIERMTNFDKNLPNEKVLPKHSLLYEYFTVYNELTKVKYVTEGMRKPAFLSGEQKKAIVDLLFKTNRKVTVKQLKEDYFKKIECFDSVEISGVEDRFNASLGTYHDLLKIIKDKDFLDNEENEDILEDIVLTLTLFEDREMIEERLKTYAHLFDDKVMKQLKRRRYTGWGRLSRKLINGIRDKQSGKTILDFLKSDGFANRNFMQLIHDDSLTFKEDIQKAQVSGQGDSLHEHIANLAGSPAIKKGILQTVKVVDELVKVMGRHKPENIVIEMARENQTTQKGQKNSRERMKRIEEGIKELGSQILKEHPVENTQLQNEKLYLYYLQNGRDMYVDQELDINRLSDYDVDHIVPQSFLKDDSIDNKVLTRSDKARGKSDNVPSEEVVKKMKNYWRQLLNAKLITQRKFDNLTKAERGGLSELDKAGFIKRQLVETRQITKHVAQILDSRMNTKYDENDKLIREVKVITLKSKLVSDFRKDFQFYKVREINNYHHAHDAYLNAVVGTALIKKYPKLESEFVYGDYKVYDVRKMIAKSEQEIGKATAKYFFYSNIMNFFKTEITLANGEIRKRPLIETNGETGEIVWDKGRDFATVRKVLSMPQVNIVKKTEVQTGGFSKESILPKRNSDKLIARKKDWDPKKYGGFDSPTVAYSVLVVAKVEKGKSKKLKSVKELLGITIMERSSFEKNPIDFLEAKGYKEVKKDLIIKLPKYSLFELENGRKRMLASAGELQKGNELALPSKYVNFLYLASHYEKLKGSPEDNEQKQLFVEQHKHYLDEIIEQISEFSKRVILADANLDKVLSAYNKHRDKPIREQAENIIHLFTLTNLGAPAAFKYFDTTIDRKRYTSTKEVLDATLIHQSITGLYETRIDLSQLGGDGGGGGGGGGGGMDPLQLLQPLEAEIKGTKLKAHWNSGATITCVPQAFLEEEVPIKNIWIKTIHGEKEQPVYYLTFKIQGRKVEAEVISSPYDYILVSPSDIPWLMKKPLQLTTLVPLQEYEERLLKQTMLTGSYKEKLQSLFLKYDALWQHWENQVGHRRIKPHHIATGTVNPRPQKQYPINPKAKASIQTVINDLLKQGVLIQQNSIMNTPVYPVPKPDGKWRMVLDYREVNKTIPLIAAQNQHSAGILSSIFRGKYKTTLDLSNGFWAHSITPESYWLTAFTWLGQQYCWTRLPQGFLNSPALFNADVVDLLKEVPNVQVYVDDIYISHDDPREHLEQLEKVFSLLLNAGYVVSLKKSEIAQHEVEFLGFNITKEGRGLTETFKQKLLNITPPRDLKQLQSILGLLNFARNFIPNFSELVKPLYNIIATAPGKYITWTTDNSQQLQNIISMLNSAENLEERNPEVRLIMKVNTSPSAGYIRFYNEFAKRPIMYLNYVYTKAEVKFTNTEKLLTTIHKGLIKALDLGMGQEILVYSPIVSMTKIQKTPLPERKALPIRWITWMSYLEDPRIQFHYDKTLPELQQVPTVTDDIIAKIKHPSEFSMVFYTDGSAIKHPNVNKSHNAGMGIAQVQFKPEFTVINTWSIPLGDHTAQLAEVAAVEFACKKALKIDGPVLIVTDSFYVAESVNKELPYWQSNGFFNNKKKPLKHVSKWKSIADCIQLKPDIIIIHEKGHQPTASTFHTEGNNLADKLATQGSYVVNAGKRTADGSEFEKRTADGSEFESPKKKAKVE

SEQ ID NO: 640 - protein, 2176 aa, synthetic construct
MPAAKRVKLDGGDKKYSIGLDIGTNSVGWAVITDEYKVPSKKFKVLGNTDRHSIKKNLIGALLFDSGETAEATRLKRTARRRYTRRKNRICYLQEIFSNEMAKVDDSFFHRLEESFLVEEDKKHERHPIFGNIVDEVAYHEKYPTIYHLRKKLVDSTDKADLRLIYLALAHMIKFRGHFLIEGDLNPDNSDVDKLFIQLVQTYNQLFEENPINASGVDAKAILSARLSKSRRLENLIAQLPGEKKNGLFGNLIALSLGLTPNFKSNFDLAEDAKLQLSKDTYDDDLDNLLAQIGDQYADLFLAAKNLSDAILLSDILRVNTEITKAPLSASMIKRYDEHHQDLTLLKALVRQQLPEKYKEIFFDQSKNGYAGYIDGGASQEEFYKFIKPILEKMDGTEELLVKLNREDLLRKQRTFDNGSIPHQIHLGELHAILRRQEDFYPFLKDNREKIEKILTFRIPYYVGPLARGNSRFAWMTRKSEETITPWNFEEVVDKGASAQSFIERMTNFDKNLPNEKVLPKHSLLYEYFTVYNELTKVKYVTEGMRKPAFLSGEQKKAIVDLLFKTNRKVTVKQLKEDYFKKIECFDSVEISGVEDRFNASLGTYHDLLKIIKDKDFLDNEENEDILEDIVLTLTLFEDREMIEERLKTYAHLFDDKVMKQLKRRRYTGWGRLSRKLINGIRDKQSGKTILDFLKSDGFANRNFMQLIHDDSLTFKEDIQKAQVSGQGDSLHEHIANLAGSPAIKKGILQTVKVVDELVKVMGRHKPENIVIEMARENQTTQKGQKNSRERMKRIEEGIKELGSQILKEHPVENTQLQNEKLYLYYLQNGRDMYVDQELDINRLSDYDVDHIVPQSFLKDDSIDNKVLTRSDKARGKSDNVPSEEVVKKMKNYWRQLLNAKLITQRKFDNLTKAERGGLSELDKAGFIKRQLVETRQITKHVAQILDSRMNTKYDENDKLIREVKVITLKSKLVSDFRKDFQFYKVREINNYHHAHDAYLNAVVGTALIKKYPKLESEFVYGDYKVYDVRKMIAKSEQEIGKATAKYFFYSNIMNFFKTEITLANGEIRKRPLIETNGETGEIVWDKGRDFATVRKVLSMPQVNIVKKTEVQTGGFSKESILPKRNSDKLIARKKDWDPKKYGGFDSPTVAYSVLVVAKVEKGKSKKLKSVKELLGITIMERSSFEKNPIDFLEAKGYKEVKKDLIIKLPKYSLFELENGRKRMLASAGELQKGNELALPSKYVNFLYLASHYEKLKGSPEDNEQKQLFVEQHKHYLDEIIEQISEFSKRVILADANLDKVLSAYNKHRDKPIREQAENIIHLFTLTNLGAPAAFKYFDTTIDRKRYTSTKEVLDATLIHQSITGLYETRIDLSQLGGDGGGGSEAAAKGSSGGMDPLQLLQPLEAEIKGTKLKAHWNSGATITCVPQAFLEEEVPIKNIWIKTIHGEKEQPVYYLTFKIQGRKVEAEVISSPYDYILVSPSDIPWLMKKPLQLTTLVPLQEYEERLLKQTMLTGSYKEKLQSLFLKYDALWQHWENQVGHRRIKPHHIATGTVNPRPQKQYPINPKAKASIQTVINDLLKQGVLIQQNSIMNTPVYPVPKPDGKWRMVLDYREVNKTIPLIAAQNQHSAGILSSIFRGKYKTTLDLSNGFWAHSITPESYWLTAFTWLGQQYCWTRLPQGFLNSPALFNADVVDLLKEVPNVQVYVDDIYISHDDPREHLEQLEKVFSLLLNAGYVVSLKKSEIAQHEVEFLGFNITKEGRGLTETFKQKLLNITPPRDLKQLQSILGLLNFARNFIPNFSELVKPLYNIIATAPGKYITWTTDNSQQLQNIISMLNSAENLEERNPEVRLIMKVNTSPSAGYIRFYNEFAKRPIMYLNYVYTKAEVKFTNTEKLLTTIHKGLIKALDLGMGQEILVYSPIVSMTKIQKTPLPERKALPIRWITWMSYLEDPRIQFHYDKTLPELQQVPTVTDDIIAKIKHPSEFSMVFYTDGSAIKHPNVNKSHNAGMGIAQVQFKPEFTVINTWSIPLGDHTAQLAEVAAVEFACKKALKIDGPVLIVTDSFYVAESVNKELPYWQSNGFFNNKKKPLKHVSKWKSIADCIQLKPDIIIIHEKGHQPTASTFHTEGNNLADKLATQGSYVVNAGKRTADGSEFEKRTADGSEFESPKKKAKVE

SEQ ID NO: 641 - protein, 2176 aa, synthetic construct
MPAAKRVKLDGGDKKYSIGLDIGTNSVGWAVITDEYKVPSKKFKVLGNTDRHSIKKNLIGALLFDSGETAEATRLKRTARRRYTRRKNRICYLQEIFSNEMAKVDDSFFHRLEESFLVEEDKKHERHPIFGNIVDEVAYHEKYPTIYHLRKKLVDSTDKADLRLIYLALAHMIKFRGHFLIEGDLNPDNSDVDKLFIQLVQTYNQLFEENPINASGVDAKAILSARLSKSRRLENLIAQLPGEKKNGLFGNLIALSLGLTPNFKSNFDLAEDAKLQLSKDTYDDDLDNLLAQIGDQYADLFLAAKNLSDAILLSDILRVNTEITKAPLSASMIKRYDEHHQDLTLLKALVRQQLPEKYKEIFFDQSKNGYAGYIDGGASQEEFYKFIKPILEKMDGTEELLVKLNREDLLRKQRTFDNGSIPHQIHLGELHAILRRQEDFYPFLKDNREKIEKILTFRIPYYVGPLARGNSRFAWMTRKSEETITPWNFEEVVDKGASAQSFIERMTNFDKNLPNEKVLPKHSLLYEYFTVYNELTKVKYVTEGMRKPAFLSGEQKKAIVDLLFKTNRKVTVKQLKEDYFKKIECFDSVEISGVEDRFNASLGTYHDLLKIIKDKDFLDNEENEDILEDIVLTLTLFEDREMIEERLKTYAHLFDDKVMKQLKRRRYTGWGRLSRKLINGIRDKQSGKTILDFLKSDGFANRNFMQLIHDDSLTFKEDIQKAQVSGQGDSLHEHIANLAGSPAIKKGILQTVKVVDELVKVMGRHKPENIVIEMARENQTTQKGQKNSRERMKRIEEGIKELGSQILKEHPVENTQLQNEKLYLYYLQNGRDMYVDQELDINRLSDYDVDHIVPQSFLKDDSIDNKVLTRSDKARGKSDNVPSEEVVKKMKNYWRQLLNAKLITQRKFDNLTKAERGGLSELDKAGFIKRQLVETRQITKHVAQILDSRMNTKYDENDKLIREVKVITLKSKLVSDFRKDFQFYKVREINNYHHAHDAYLNAVVGTALIKKYPKLESEFVYGDYKVYDVRKMIAKSEQEIGKATAKYFFYSNIMNFFKTEITLANGEIRKRPLIETNGETGEIVWDKGRDFATVRKVLSMPQVNIVKKTEVQTGGFSKESILPKRNSDKLIARKKDWDPKKYGGFDSPTVAYSVLVVAKVEKGKSKKLKSVKELLGITIMERSSFEKNPIDFLEAKGYKEVKKDLIIKLPKYSLFELENGRKRMLASAGELQKGNELALPSKYVNFLYLASHYEKLKGSPEDNEQKQLFVEQHKHYLDEIIEQISEFSKRVILADANLDKVLSAYNKHRDKPIREQAENIIHLFTLTNLGAPAAFKYFDTTIDRKRYTSTKEVLDATLIHQSITGLYETRIDLSQLGGDGGPAPEAAAKGGSGGMDPLQLLQPLEAEIKGTKLKAHWNSGATITCVPQAFLEEEVPIKNIWIKTIHGEKEQPVYYLTFKIQGRKVEAEVISSPYDYILVSPSDIPWLMKKPLQLTTLVPLQEYEERLLKQTMLTGSYKEKLQSLFLKYDALWQHWENQVGHRRIKPHHIATGTVNPRPQKQYPINPKAKASIQTVINDLLKQGVLIQQNSIMNTPVYPVPKPDGKWRMVLDYREVNKTIPLIAAQNQHSAGILSSIFRGKYKTTLDLSNGFWAHSITPESYWLTAFTWLGQQYCWTRLPQGFLNSPALFNADVVDLLKEVPNVQVYVDDIYISHDDPREHLEQLEKVFSLLLNAGYVVSLKKSEIAQHEVEFLGFNITKEGRGLTETFKQKLLNITPPRDLKQLQSILGLLNFARNFIPNFSELVKPLYNIIATAPGKYITWTTDNSQQLQNIISMLNSAENLEERNPEVRLIMKVNTSPSAGYIRFYNEFAKRPIMYLNYVYTKAEVKFTNTEKLLTTIHKGLIKALDLGMGQEILVYSPIVSMTKIQKTPLPERKALPIRWITWMSYLEDPRIQFHYDKTLPELQQVPTVTDDIIAKIKHPSEFSMVFYTDGSAIKHPNVNKSHNAGMGIAQVQFKPEFTVINTWSIPLGDHTAQLAEVAAVEFACKKALKIDGPVLIVTDSFYVAESVNKELPYWQSNGFFNNKKKPLKHVSKWKSIADCIQLKPDIIIIHEKGHQPTASTFHTEGNNLADKLATQGSYVVNAGKRTADGSEFEKRTADGSEFESPKKKAKVE

SEQ ID NO: 642 - protein, 2173 aa, synthetic construct
MPAAKRVKLDGGDKKYSIGLDIGTNSVGWAVITDEYKVPSKKFKVLGNTDRHSIKKNLIGALLFDSGETAEATRLKRTARRRYTRRKNRICYLQEIFSNEMAKVDDSFFHRLEESFLVEEDKKHERHPIFGNIVDEVAYHEKYPTIYHLRKKLVDSTDKADLRLIYLALAHMIKFRGHFLIEGDLNPDNSDVDKLFIQLVQTYNQLFEENPINASGVDAKAILSARLSKSRRLENLIAQLPGEKKNGLFGNLIALSLGLTPNFKSNFDLAEDAKLQLSKDTYDDDLDNLLAQIGDQYADLFLAAKNLSDAILLSDILRVNTEITKAPLSASMIKRYDEHHQDLTLLKALVRQQLPEKYKEIFFDQSKNGYAGYIDGGASQEEFYKFIKPILEKMDGTEELLVKLNREDLLRKQRTFDNGSIPHQIHLGELHAILRRQEDFYPFLKDNREKIEKILTFRIPYYVGPLARGNSRFAWMTRKSEETITPWNFEEVVDKGASAQSFIERMTNFDKNLPNEKVLPKHSLLYEYFTVYNELTKVKYVTEGMRKPAFLSGEQKKAIVDLLFKTNRKVTVKQLKEDYFKKIECFDSVEISGVEDRFNASLGTYHDLLKIIKDKDFLDNEENEDILEDIVLTLTLFEDREMIEERLKTYAHLFDDKVMKQLKRRRYTGWGRLSRKLINGIRDKQSGKTILDFLKSDGFANRNFMQLIHDDSLTFKEDIQKAQVSGQGDSLHEHIANLAGSPAIKKGILQTVKVVDELVKVMGRHKPENIVIEMARENQTTQKGQKNSRERMKRIEEGIKELGSQILKEHPVENTQLQNEKLYLYYLQNGRDMYVDQELDINRLSDYDVDHIVPQSFLKDDSIDNKVLTRSDKARGKSDNVPSEEVVKKMKNYWRQLLNAKLITQRKFDNLTKAERGGLSELDKAGFIKRQLVETRQITKHVAQILDSRMNTKYDENDKLIREVKVITLKSKLVSDFRKDFQFYKVREINNYHHAHDAYLNAVVGTALIKKYPKLESEFVYGDYKVYDVRKMIAKSEQEIGKATAKYFFYSNIMNFFKTEITLANGEIRKRPLIETNGETGEIVWDKGRDFATVRKVLSMPQVNIVKKTEVQTGGFSKESILPKRNSDKLIARKKDWDPKKYGGFDSPTVAYSVLVVAKVEKGKSKKLKSVKELLGITIMERSSFEKNPIDFLEAKGYKEVKKDLIIKLPKYSLFELENGRKRMLASAGELQKGNELALPSKYVNFLYLASHYEKLKGSPEDNEQKQLFVEQHKHYLDEIIEQISEFSKRVILADANLDKVLSAYNKHRDKPIREQAENIIHLFTLTNLGAPAAFKYFDTTIDRKRYTSTKEVLDATLIHQSITGLYETRIDLSQLGGDGGGGGGGGGGGGMDPLQLLQPLEAEIKGTKLKAHWNSGATITCVPQAFLEEEVPIKNIWIKTIHGEKEQPVYYLTFKIQGRKVEAEVISSPYDYILVSPSDIPWLMKKPLQLTTLVPLQEYEERLLKQTMLTGSYKEKLQSLFLKYDALWQHWENQVGHRRIKPHHIATGTVNPRPQKQYPINPKAKASIQTVINDLLKQGVLIQQNSIMNTPVYPVPKPDGKWRMVLDYREVNKTIPLIAAQNQHSAGILSSIFRGKYKTTLDLSNGFWAHSITPESYWLTAFTWLGQQYCWTRLPQGFLNSPALFNADVVDLLKEVPNVQVYVDDIYISHDDPREHLEQLEKVFSLLLNAGYVVSLKKSEIAQHEVEFLGFNITKEGRGLTETFKQKLLNITPPRDLKQLQSILGLLNFARNFIPNFSELVKPLYNIIATAPGKYITWTTDNSQQLQNIISMLNSAENLEERNPEVRLIMKVNTSPSAGYIRFYNEFAKRPIMYLNYVYTKAEVKFTNTEKLLTTIHKGLIKALDLGMGQEILVYSPIVSMTKIQKTPLPERKALPIRWITWMSYLEDPRIQFHYDKTLPELQQVPTVTDDIIAKIKHPSEFSMVFYTDGSAIKHPNVNKSHNAGMGIAQVQFKPEFTVINTWSIPLGDHTAQLAEVAAVEFACKKALKIDGPVLIVTDSFYVAESVNKELPYWQSNGFFNNKKKPLKHVSKWKSIADCIQLKPDIIIIHEKGHQPTASTFHTEGNNLADKLATQGSYVVNAGKRTADGSEFEKRTADGSEFESPKKKAKVE

SEQ ID NO: 643 - protein, 2171 aa, synthetic construct
MPAAKRVKLDGGDKKYSIGLDIGTNSVGWAVITDEYKVPSKKFKVLGNTDRHSIKKNLIGALLFDSGETAEATRLKRTARRRYTRRKNRICYLQEIFSNEMAKVDDSFFHRLEESFLVEEDKKHERHPIFGNIVDEVAYHEKYPTIYHLRKKLVDSTDKADLRLIYLALAHMIKFRGHFLIEGDLNPDNSDVDKLFIQLVQTYNQLFEENPINASGVDAKAILSARLSKSRRLENLIAQLPGEKKNGLFGNLIALSLGLTPNFKSNFDLAEDAKLQLSKDTYDDDLDNLLAQIGDQYADLFLAAKNLSDAILLSDILRVNTEITKAPLSASMIKRYDEHHQDLTLLKALVRQQLPEKYKEIFFDQSKNGYAGYIDGGASQEEFYKFIKPILEKMDGTEELLVKLNREDLLRKQRTFDNGSIPHQIHLGELHAILRRQEDFYPFLKDNREKIEKILTFRIPYYVGPLARGNSRFAWMTRKSEETITPWNFEEVVDKGASAQSFIERMTNFDKNLPNEKVLPKHSLLYEYFTVYNELTKVKYVTEGMRKPAFLSGEQKKAIVDLLFKTNRKVTVKQLKEDYFKKIECFDSVEISGVEDRFNASLGTYHDLLKIIKDKDFLDNEENEDILEDIVLTLTLFEDREMIEERLKTYAHLFDDKVMKQLKRRRYTGWGRLSRKLINGIRDKQSGKTILDFLKSDGFANRNFMQLIHDDSLTFKEDIQKAQVSGQGDSLHEHIANLAGSPAIKKGILQTVKVVDELVKVMGRHKPENIVIEMARENQTTQKGQKNSRERMKRIEEGIKELGSQILKEHPVENTQLQNEKLYLYYLQNGRDMYVDQELDINRLSDYDVDHIVPQSFLKDDSIDNKVLTRSDKARGKSDNVPSEEVVKKMKNYWRQLLNAKLITQRKFDNLTKAERGGLSELDKAGFIKRQLVETRQITKHVAQILDSRMNTKYDENDKLIREVKVITLKSKLVSDFRKDFQFYKVREINNYHHAHDAYLNAVVGTALIKKYPKLESEFVYGDYKVYDVRKMIAKSEQEIGKATAKYFFYSNIMNFFKTEITLANGEIRKRPLIETNGETGEIVWDKGRDFATVRKVLSMPQVNIVKKTEVQTGGFSKESILPKRNSDKLIARKKDWDPKKYGGFDSPTVAYSVLVVAKVEKGKSKKLKSVKELLGITIMERSSFEKNPIDFLEAKGYKEVKKDLIIKLPKYSLFELENGRKRMLASAGELQKGNELALPSKYVNFLYLASHYEKLKGSPEDNEQKQLFVEQHKHYLDEIIEQISEFSKRVILADANLDKVLSAYNKHRDKPIREQAENIIHLFTLTNLGAPAAFKYFDTTIDRKRYTSTKEVLDATLIHQSITGLYETRIDLSQLGGDGGGGSGSSGGMDPLQLLQPLEAEIKGTKLKAHWNSGATITCVPQAFLEEEVPIKNIWIKTIHGEKEQPVYYLTFKIQGRKVEAEVISSPYDYILVSPSDIPWLMKKPLQLTTLVPLQEYEERLLKQTMLTGSYKEKLQSLFLKYDALWQHWENQVGHRRIKPHHIATGTVNPRPQKQYPINPKAKASIQTVINDLLKQGVLIQQNSIMNTPVYPVPKPDGKWRMVLDYREVNKTIPLIAAQNQHSAGILSSIFRGKYKTTLDLSNGFWAHSITPESYWLTAFTWLGQQYCWTRLPQGFLNSPALFNADVVDLLKEVPNVQVYVDDIYISHDDPREHLEQLEKVFSLLLNAGYVVSLKKSEIAQHEVEFLGFNITKEGRGLTETFKQKLLNITPPRDLKQLQSILGLLNFARNFIPNFSELVKPLYNIIATAPGKYITWTTDNSQQLQNIISMLNSAENLEERNPEVRLIMKVNTSPSAGYIRFYNEFAKRPIMYLNYVYTKAEVKFTNTEKLLTTIHKGLIKALDLGMGQEILVYSPIVSMTKIQKTPLPERKALPIRWITWMSYLEDPRIQFHYDKTLPELQQVPTVTDDIIAKIKHPSEFSMVFYTDGSAIKHPNVNKSHNAGMGIAQVQFKPEFTVINTWSIPLGDHTAQLAEVAAVEFACKKALKIDGPVLIVTDSFYVAESVNKELPYWQSNGFFNNKKKPLKHVSKWKSIADCIQLKPDIIIIHEKGHQPTASTFHTEGNNLADKLATQGSYVVNAGKRTADGSEFEKRTADGSEFESPKKKAKVE

SEQ ID NO: 644 - protein, 2171 aa, synthetic construct
MPAAKRVKLDGGDKKYSIGLDIGTNSVGWAVITDEYKVPSKKFKVLGNTDRHSIKKNLIGALLFDSGETAEATRLKRTARRRYTRRKNRICYLQEIFSNEMAKVDDSFFHRLEESFLVEEDKKHERHPIFGNIVDEVAYHEKYPTIYHLRKKLVDSTDKADLRLIYLALAHMIKFRGHFLIEGDLNPDNSDVDKLFIQLVQTYNQLFEENPINASGVDAKAILSARLSKSRRLENLIAQLPGEKKNGLFGNLIALSLGLTPNFKSNFDLAEDAKLQLSKDTYDDDLDNLLAQIGDQYADLFLAAKNLSDAILLSDILRVNTEITKAPLSASMIKRYDEHHQDLTLLKALVRQQLPEKYKEIFFDQSKNGYAGYIDGGASQEEFYKFIKPILEKMDGTEELLVKLNREDLLRKQRTFDNGSIPHQIHLGELHAILRRQEDFYPFLKDNREKIEKILTFRIPYYVGPLARGNSRFAWMTRKSEETITPWNFEEVVDKGASAQSFIERMTNFDKNLPNEKVLPKHSLLYEYFTVYNELTKVKYVTEGMRKPAFLSGEQKKAIVDLLFKTNRKVTVKQLKEDYFKKIECFDSVEISGVEDRFNASLGTYHDLLKIIKDKDFLDNEENEDILEDIVLTLTLFEDREMIEERLKTYAHLFDDKVMKQLKRRRYTGWGRLSRKLINGIRDKQSGKTILDFLKSDGFANRNFMQLIHDDSLTFKEDIQKAQVSGQGDSLHEHIANLAGSPAIKKGILQTVKVVDELVKVMGRHKPENIVIEMARENQTTQKGQKNSRERMKRIEEGIKELGSQILKEHPVENTQLQNEKLYLYYLQNGRDMYVDQELDINRLSDYDVDHIVPQSFLKDDSIDNKVLTRSDKARGKSDNVPSEEVVKKMKNYWRQLLNAKLITQRKFDNLTKAERGGLSELDKAGFIKRQLVETRQITKHVAQILDSRMNTKYDENDKLIREVKVITLKSKLVSDFRKDFQFYKVREINNYHHAHDAYLNAVVGTALIKKYPKLESEFVYGDYKVYDVRKMIAKSEQEIGKATAKYFFYSNIMNFFKTEITLANGEIRKRPLIETNGETGEIVWDKGRDFATVRKVLSMPQVNIVKKTEVQTGGFSKESILPKRNSDKLIARKKDWDPKKYGGFDSPTVAYSVLVVAKVEKGKSKKLKSVKELLGITIMERSSFEKNPIDFLEAKGYKEVKKDLIIKLPKYSLFELENGRKRMLASAGELQKGNELALPSKYVNFLYLASHYEKLKGSPEDNEQKQLFVEQHKHYLDEIIEQISEFSKRVILADANLDKVLSAYNKHRDKPIREQAENIIHLFTLTNLGAPAAFKYFDTTIDRKRYTSTKEVLDATLIHQSITGLYETRIDLSQLGGDGGGGGGGGGGMDPLQLLQPLEAEIKGTKLKAHWNSGATITCVPQAFLEEEVPIKNIWIKTIHGEKEQPVYYLTFKIQGRKVEAEVISSPYDYILVSPSDIPWLMKKPLQLTTLVPLQEYEERLLKQTMLTGSYKEKLQSLFLKYDALWQHWENQVGHRRIKPHHIATGTVNPRPQKQYPINPKAKASIQTVINDLLKQGVLIQQNSIMNTPVYPVPKPDGKWRMVLDYREVNKTIPLIAAQNQHSAGILSSIFRGKYKTTLDLSNGFWAHSITPESYWLTAFTWLGQQYCWTRLPQGFLNSPALFNADVVDLLKEVPNVQVYVDDIYISHDDPREHLEQLEKVFSLLLNAGYVVSLKKSEIAQHEVEFLGFNITKEGRGLTETFKQKLLNITPPRDLKQLQSILGLLNFARNFIPNFSELVKPLYNIIATAPGKYITWTTDNSQQLQNIISMLNSAENLEERNPEVRLIMKVNTSPSAGYIRFYNEFAKRPIMYLNYVYTKAEVKFTNTEKLLTTIHKGLIKALDLGMGQEILVYSPIVSMTKIQKTPLPERKALPIRWITWMSYLEDPRIQFHYDKTLPELQQVPTVTDDIIAKIKHPSEFSMVFYTDGSAIKHPNVNKSHNAGMGIAQVQFKPEFTVINTWSIPLGDHTAQLAEVAAVEFACKKALKIDGPVLIVTDSFYVAESVNKELPYWQSNGFFNNKKKPLKHVSKWKSIADCIQLKPDIIIIHEKGHQPTASTFHTEGNNLADKLATQGSYVVNAGKRTADGSEFEKRTADGSEFESPKKKAKVE

SEQ ID NO: 645 - protein, 2174 aa, synthetic construct
MPAAKRVKLDGGDKKYSIGLDIGTNSVGWAVITDEYKVPSKKFKVLGNTDRHSIKKNLIGALLFDSGETAEATRLKRTARRRYTRRKNRICYLQEIFSNEMAKVDDSFFHRLEESFLVEEDKKHERHPIFGNIVDEVAYHEKYPTIYHLRKKLVDSTDKADLRLIYLALAHMIKFRGHFLIEGDLNPDNSDVDKLFIQLVQTYNQLFEENPINASGVDAKAILSARLSKSRRLENLIAQLPGEKKNGLFGNLIALSLGLTPNFKSNFDLAEDAKLQLSKDTYDDDLDNLLAQIGDQYADLFLAAKNLSDAILLSDILRVNTEITKAPLSASMIKRYDEHHQDLTLLKALVRQQLPEKYKEIFFDQSKNGYAGYIDGGASQEEFYKFIKPILEKMDGTEELLVKLNREDLLRKQRTFDNGSIPHQIHLGELHAILRRQEDFYPFLKDNREKIEKILTFRIPYYVGPLARGNSRFAWMTRKSEETITPWNFEEVVDKGASAQSFIERMTNFDKNLPNEKVLPKHSLLYEYFTVYNELTKVKYVTEGMRKPAFLSGEQKKAIVDLLFKTNRKVTVKQLKEDYFKKIECFDSVEISGVEDRFNASLGTYHDLLKIIKDKDFLDNEENEDILEDIVLTLTLFEDREMIEERLKTYAHLFDDKVMKQLKRRRYTGWGRLSRKLINGIRDKQSGKTILDFLKSDGFANRNFMQLIHDDSLTFKEDIQKAQVSGQGDSLHEHIANLAGSPAIKKGILQTVKVVDELVKVMGRHKPENIVIEMARENQTTQKGQKNSRERMKRIEEGIKELGSQILKEHPVENTQLQNEKLYLYYLQNGRDMYVDQELDINRLSDYDVDHIVPQSFLKDDSIDNKVLTRSDKARGKSDNVPSEEVVKKMKNYWRQLLNAKLITQRKFDNLTKAERGGLSELDKAGFIKRQLVETRQITKHVAQILDSRMNTKYDENDKLIREVKVITLKSKLVSDFRKDFQFYKVREINNYHHAHDAYLNAVVGTALIKKYPKLESEFVYGDYKVYDVRKMIAKSEQEIGKATAKYFFYSNIMNFFKTEITLANGEIRKRPLIETNGETGEIVWDKGRDFATVRKVLSMPQVNIVKKTEVQTGGFSKESILPKRNSDKLIARKKDWDPKKYGGFDSPTVAYSVLVVAKVEKGKSKKLKSVKELLGITIMERSSFEKNPIDFLEAKGYKEVKKDLIIKLPKYSLFELENGRKRMLASAGELQKGNELALPSKYVNFLYLASHYEKLKGSPEDNEQKQLFVEQHKHYLDEIIEQISEFSKRVILADANLDKVLSAYNKHRDKPIREQAENIIHLFTLTNLGAPAAFKYFDTTIDRKRYTSTKEVLDATLIHQSITGLYETRIDLSQLGGDGGGGSGGGPAPGGMDPLQLLQPLEAEIKGTKLKAHWNSGATITCVPQAFLEEEVPIKNIWIKTIHGEKEQPVYYLTFKIQGRKVEAEVISSPYDYILVSPSDIPWLMKKPLQLTTLVPLQEYEERLLKQTMLTGSYKEKLQSLFLKYDALWQHWENQVGHRRIKPHHIATGTVNPRPQKQYPINPKAKASIQTVINDLLKQGVLIQQNSIMNTPVYPVPKPDGKWRMVLDYREVNKTIPLIAAQNQHSAGILSSIFRGKYKTTLDLSNGFWAHSITPESYWLTAFTWLGQQYCWTRLPQGFLNSPALFNADVVDLLKEVPNVQVYVDDIYISHDDPREHLEQLEKVFSLLLNAGYVVSLKKSEIAQHEVEFLGFNITKEGRGLTETFKQKLLNITPPRDLKQLQSILGLLNFARNFIPNFSELVKPLYNIIATAPGKYITWTTDNSQQLQNIISMLNSAENLEERNPEVRLIMKVNTSPSAGYIRFYNEFAKRPIMYLNYVYTKAEVKFTNTEKLLTTIHKGLIKALDLGMGQEILVYSPIVSMTKIQKTPLPERKALPIRWITWMSYLEDPRIQFHYDKTLPELQQVPTVTDDIIAKIKHPSEFSMVFYTDGSAIKHPNVNKSHNAGMGIAQVQFKPEFTVINTWSIPLGDHTAQLAEVAAVEFACKKALKIDGPVLIVTDSFYVAESVNKELPYWQSNGFFNNKKKPLKHVSKWKSIADCIQLKPDIIIIHEKGHQPTASTFHTEGNNLADKLATQGSYVVNAGKRTADGSEFEKRTADGSEFESPKKKAKVE

SEQ ID NO: 646 - protein, 2176 aa, synthetic construct
MPAAKRVKLDGGDKKYSIGLDIGTNSVGWAVITDEYKVPSKKFKVLGNTDRHSIKKNLIGALLFDSGETAEATRLKRTARRRYTRRKNRICYLQEIFSNEMAKVDDSFFHRLEESFLVEEDKKHERHPIFGNIVDEVAYHEKYPTIYHLRKKLVDSTDKADLRLIYLALAHMIKFRGHFLIEGDLNPDNSDVDKLFIQLVQTYNQLFEENPINASGVDAKAILSARLSKSRRLENLIAQLPGEKKNGLFGNLIALSLGLTPNFKSNFDLAEDAKLQLSKDTYDDDLDNLLAQIGDQYADLFLAAKNLSDAILLSDILRVNTEITKAPLSASMIKRYDEHHQDLTLLKALVRQQLPEKYKEIFFDQSKNGYAGYIDGGASQEEFYKFIKPILEKMDGTEELLVKLNREDLLRKQRTFDNGSIPHQIHLGELHAILRRQEDFYPFLKDNREKIEKILTFRIPYYVGPLARGNSRFAWMTRKSEETITPWNFEEVVDKGASAQSFIERMTNFDKNLPNEKVLPKHSLLYEYFTVYNELTKVKYVTEGMRKPAFLSGEQKKAIVDLLFKTNRKVTVKQLKEDYFKKIECFDSVEISGVEDRFNASLGTYHDLLKIIKDKDFLDNEENEDILEDIVLTLTLFEDREMIEERLKTYAHLFDDKVMKQLKRRRYTGWGRLSRKLINGIRDKQSGKTILDFLKSDGFANRNFMQLIHDDSLTFKEDIQKAQVSGQGDSLHEHIANLAGSPAIKKGILQTVKVVDELVKVMGRHKPENIVIEMARENQTTQKGQKNSRERMKRIEEGIKELGSQILKEHPVENTQLQNEKLYLYYLQNGRDMYVDQELDINRLSDYDVDHIVPQSFLKDDSIDNKVLTRSDKARGKSDNVPSEEVVKKMKNYWRQLLNAKLITQRKFDNLTKAERGGLSELDKAGFIKRQLVETRQITKHVAQILDSRMNTKYDENDKLIREVKVITLKSKLVSDFRKDFQFYKVREINNYHHAHDAYLNAVVGTALIKKYPKLESEFVYGDYKVYDVRKMIAKSEQEIGKATAKYFFYSNIMNFFKTEITLANGEIRKRPLIETNGETGEIVWDKGRDFATVRKVLSMPQVNIVKKTEVQTGGFSKESILPKRNSDKLIARKKDWDPKKYGGFDSPTVAYSVLVVAKVEKGKSKKLKSVKELLGITIMERSSFEKNPIDFLEAKGYKEVKKDLIIKLPKYSLFELENGRKRMLASAGELQKGNELALPSKYVNFLYLASHYEKLKGSPEDNEQKQLFVEQHKHYLDEIIEQISEFSKRVILADANLDKVLSAYNKHRDKPIREQAENIIHLFTLTNLGAPAAFKYFDTTIDRKRYTSTKEVLDATLIHQSITGLYETRIDLSQLGGDGGEAAAKGGSGGGGGMDPLQLLQPLEAEIKGTKLKAHWNSGATITCVPQAFLEEEVPIKNIWIKTIHGEKEQPVYYLTFKIQGRKVEAEVISSPYDYILVSPSDIPWLMKKPLQLTTLVPLQEYEERLLKQTMLTGSYKEKLQSLFLKYDALWQHWENQVGHRRIKPHHIATGTVNPRPQKQYPINPKAKASIQTVINDLLKQGVLIQQNSIMNTPVYPVPKPDGKWRMVLDYREVNKTIPLIAAQNQHSAGILSSIFRGKYKTTLDLSNGFWAHSITPESYWLTAFTWLGQQYCWTRLPQGFLNSPALFNADVVDLLKEVPNVQVYVDDIYISHDDPREHLEQLEKVFSLLLNAGYVVSLKKSEIAQHEVEFLGFNITKEGRGLTETFKQKLLNITPPRDLKQLQSILGLLNFARNFIPNFSELVKPLYNIIATAPGKYITWTTDNSQQLQNIISMLNSAENLEERNPEVRLIMKVNTSPSAGYIRFYNEFAKRPIMYLNYVYTKAEVKFTNTEKLLTTIHKGLIKALDLGMGQEILVYSPIVSMTKIQKTPLPERKALPIRWITWMSYLEDPRIQFHYDKTLPELQQVPTVTDDIIAKIKHPSEFSMVFYTDGSAIKHPNVNKSHNAGMGIAQVQFKPEFTVINTWSIPLGDHTAQLAEVAAVEFACKKALKIDGPVLIVTDSFYVAESVNKELPYWQSNGFFNNKKKPLKHVSKWKSIADCIQLKPDIIIIHEKGHQPTASTFHTEGNNLADKLATQGSYVVNAGKRTADGSEFEKRTADGSEFESPKKKAKVE

SEQ ID NO: 647 - protein, 2211 aa, synthetic construct
MPAAKRVKLDGGDKKYSIGLDIGTNSVGWAVITDEYKVPSKKFKVLGNTDRHSIKKNLIGALLFDSGETAEATRLKRTARRRYTRRKNRICYLQEIFSNEMAKVDDSFFHRLEESFLVEEDKKHERHPIFGNIVDEVAYHEKYPTIYHLRKKLVDSTDKADLRLIYLALAHMIKFRGHFLIEGDLNPDNSDVDKLFIQLVQTYNQLFEENPINASGVDAKAILSARLSKSRRLENLIAQLPGEKKNGLFGNLIALSLGLTPNFKSNFDLAEDAKLQLSKDTYDDDLDNLLAQIGDQYADLFLAAKNLSDAILLSDILRVNTEITKAPLSASMIKRYDEHHQDLTLLKALVRQQLPEKYKEIFFDQSKNGYAGYIDGGASQEEFYKFIKPILEKMDGTEELLVKLNREDLLRKQRTFDNGSIPHQIHLGELHAILRRQEDFYPFLKDNREKIEKILTFRIPYYVGPLARGNSRFAWMTRKSEETITPWNFEEVVDKGASAQSFIERMTNFDKNLPNEKVLPKHSLLYEYFTVYNELTKVKYVTEGMRKPAFLSGEQKKAIVDLLFKTNRKVTVKQLKEDYFKKIECFDSVEISGVEDRFNASLGTYHDLLKIIKDKDFLDNEENEDILEDIVLTLTLFEDREMIEERLKTYAHLFDDKVMKQLKRRRYTGWGRLSRKLINGIRDKQSGKTILDFLKSDGFANRNFMQLIHDDSLTFKEDIQKAQVSGQGDSLHEHIANLAGSPAIKKGILQTVKVVDELVKVMGRHKPENIVIEMARENQTTQKGQKNSRERMKRIEEGIKELGSQILKEHPVENTQLQNEKLYLYYLQNGRDMYVDQELDINRLSDYDVDHIVPQSFLKDDSIDNKVLTRSDKARGKSDNVPSEEVVKKMKNYWRQLLNAKLITQRKFDNLTKAERGGLSELDKAGFIKRQLVETRQITKHVAQILDSRMNTKYDENDKLIREVKVITLKSKLVSDFRKDFQFYKVREINNYHHAHDAYLNAVVGTALIKKYPKLESEFVYGDYKVYDVRKMIAKSEQEIGKATAKYFFYSNIMNFFKTEITLANGEIRKRPLIETNGETGEIVWDKGRDFATVRKVLSMPQVNIVKKTEVQTGGFSKESILPKRNSDKLIARKKDWDPKKYGGFDSPTVAYSVLVVAKVEKGKSKKLKSVKELLGITIMERSSFEKNPIDFLEAKGYKEVKKDLIIKLPKYSLFELENGRKRMLASAGELQKGNELALPSKYVNFLYLASHYEKLKGSPEDNEQKQLFVEQHKHYLDEIIEQISEFSKRVILADANLDKVLSAYNKHRDKPIREQAENIIHLFTLTNLGAPAAFKYFDTTIDRKRYTSTKEVLDATLIHQSITGLYETRIDLSQLGGDGGAEAAAKEAAAKEAAAKEAAAKALEAEAAAKEAAAKEAAAKEAAAKAGGMDPLQLLQPLEAEIKGTKLKAHWNSGATITCVPQAFLEEEVPIKNIWIKTIHGEKEQPVYYLTFKIQGRKVEAEVISSPYDYILVSPSDIPWLMKKPLQLTTLVPLQEYEERLLKQTMLTGSYKEKLQSLFLKYDALWQHWENQVGHRRIKPHHIATGTVNPRPQKQYPINPKAKASIQTVINDLLKQGVLIQQNSIMNTPVYPVPKPDGKWRMVLDYREVNKTIPLIAAQNQHSAGILSSIFRGKYKTTLDLSNGFWAHSITPESYWLTAFTWLGQQYCWTRLPQGFLNSPALFNADVVDLLKEVPNVQVYVDDIYISHDDPREHLEQLEKVFSLLLNAGYVVSLKKSEIAQHEVEFLGFNITKEGRGLTETFKQKLLNITPPRDLKQLQSILGKLNFARNFIPNFSELVKPLYNIIATAPGKYITWTTDNSQQLQNIISMLNSAENLEERNPEVRLIMKVNTSPSAGYIRFYNEFAKRPIMYLNYVYTKAEVKFTNTEKLLTTIHKGLIKALDLGMGQEILVYSPIVSMTKIQKTPLPERKALPIRWITWMSYLEDPRIQFHYDKTLPELQQVPTVTDDIIAKIKHPSEFSMVFYTDGSAIKHPNVNKSHNAGMGIAQVQFKPEFTVINTWSIPLGDHTAQLAEVAAVEFACKKALKIDGPVLIVTDSFYVAESVNKELPYWQSNGFFNNKKKPLKHVSKWKSIADCIQLKPDIIIIHEKGHQPTASTFHTEGNNLADKLATQGSYVVNAGKRTADGSEFEKRTADGSEFESPKKKAKVE

SEQ ID NO: 648 - protein, 2195 aa, synthetic construct
MPAAKRVKLDGGDKKYSIGLDIGTNSVGWAVITDEYKVPSKKFKVLGNTDRHSIKKNLIGALLFDSGETAEATRLKRTARRRYTRRKNRICYLQEIFSNEMAKVDDSFFHRLEESFLVEEDKKHERHPIFGNIVDEVAYHEKYPTIYHLRKKLVDSTDKADLRLIYLALAHMIKFRGHFLIEGDLNPDNSDVDKLFIQLVQTYNQLFEENPINASGVDAKAILSARLSKSRRLENLIAQLPGEKKNGLFGNLIALSLGLTPNFKSNFDLAEDAKLQLSKDTYDDDLDNLLAQIGDQYADLFLAAKNLSDAILLSDILRVNTEITKAPLSASMIKRYDEHHQDLTLLKALVRQQLPEKYKEIFFDQSKNGYAGYIDGGASQEEFYKFIKPILEKMDGTEELLVKLNREDLLRKQRTFDNGSIPHQIHLGELHAILRRQEDFYPFLKDNREKIEKILTFRIPYYVGPLARGNSRFAWMTRKSEETITPWNFEEVVDKGASAQSFIERMTNFDKNLPNEKVLPKHSLLYEYFTVYNELTKVKYVTEGMRKPAFLSGEQKKAIVDLLFKTNRKVTVKQLKEDYFKKIECFDSVEISGVEDRFNASLGTYHDLLKIIKDKDFLDNEENEDILEDIVLTLTLFEDREMIEERLKTYAHLFDDKVMKQLKRRRYTGWGRLSRKLINGIRDKQSGKTILDFLKSDGFANRNFMQLIHDDSLTFKEDIQKAQVSGQGDSLHEHIANLAGSPAIKKGILQTVKVVDELVKVMGRHKPENIVIEMARENQTTQKGQKNSRERMKRIEEGIKELGSQILKEHPVENTQLQNEKLYLYYLQNGRDMYVDQELDINRLSDYDVDHIVPQSFLKDDSIDNKVLTRSDKARGKSDNVPSEEVVKKMKNYWRQLLNAKLITQRKFDNLTKAERGGLSELDKAGFIKRQLVETRQITKHVAQILDSRMNTKYDENDKLIREVKVITLKSKLVSDFRKDFQFYKVREINNYHHAHDAYLNAVVGTALIKKYPKLESEFVYGDYKVYDVRKMIAKSEQEIGKATAKYFFYSNIMNFFKTEITLANGEIRKRPLIETNGETGEIVWDKGRDFATVRKVLSMPQVNIVKKTEVQTGGFSKESILPKRNSDKLIARKKDWDPKKYGGFDSPTVAYSVLVVAKVEKGKSKKLKSVKELLGITIMERSSFEKNPIDFLEAKGYKEVKKDLIIKLPKYSLFELENGRKRMLASAGELQKGNELALPSKYVNFLYLASHYEKLKGSPEDNEQKQLFVEQHKHYLDEIIEQISEFSKRVILADANLDKVLSAYNKHRDKPIREQAENIIHLFTLTNLGAPAAFKYFDTTIDRKRYTSTKEVLDATLIHQSITGLYETRIDLSQLGGDGGGGGGSGGGGSGGGGSGGGGSGGGGSGGGGSGGMDPLQLLQPLEAEIKGTKLKAHWNSGATITCVPQAFLEEEVPIKNIWIKTIHGEKEQPVYYLTFKIQGRKVEAEVISSPYDYILVSPSDIPWLMKKPLQLTTLVPLQEYEERLLKQTMLTGSYKEKLQSLFLKYDALWQHWENQVGHRRIKPHHIATGTVNPRPQKQYPINPKAKASIQTVINDLLKQGVLIQQNSIMNTPVYPVPKPDGKWRMVLDYREVNKTIPLIAAQNQHSAGILSSIFRGKYKTTLDLSNGFWAHSITPESYWLTAFTWLGQQYCWTRLPQGFLNSPALFNADVVDLLKEVPNVQVYVDDIYISHDDPREHLEQLEKVFSLLLNAGYVVSLKKSEIAQHEVEFLGFNITKEGRGLTETFKQKLLNITPPRDLKQLQSILGKLNFARNFIPNFSELVKPLYNIIATAPGKYITWTTDNSQQLQNIISMLNSAENLEERNPEVRLIMKVNTSPSAGYIRFYNEFAKRPIMYLNYVYTKAEVKFTNTEKLLTTIHKGLIKALDLGMGQEILVYSPIVSMTKIQKTPLPERKALPIRWITWMSYLEDPRIQFHYDKTLPELQQVPTVTDDIIAKIKHPSEFSMVFYTDGSAIKHPNVNKSHNAGMGIAQVQFKPEFTVINTWSIPLGDHTAQLAEVAAVEFACKKALKIDGPVLIVTDSFYVAESVNKELPYWQSNGFFNNKKKPLKHVSKWKSIADCIQLKPDIIIIHEKGHQPTASTFHTEGNNLADKLATQGSYVVNAGKRTADGSEFEKRTADGSEFESPKKKAKVE

SEQ ID NO: 649 - protein, 2190 aa, synthetic construct
MPAAKRVKLDGGDKKYSIGLDIGTNSVGWAVITDEYKVPSKKFKVLGNTDRHSIKKNLIGALLFDSGETAEATRLKRTARRRYTRRKNRICYLQEIFSNEMAKVDDSFFHRLEESFLVEEDKKHERHPIFGNIVDEVAYHEKYPTIYHLRKKLVDSTDKADLRLIYLALAHMIKFRGHFLIEGDLNPDNSDVDKLFIQLVQTYNQLFEENPINASGVDAKAILSARLSKSRRLENLIAQLPGEKKNGLFGNLIALSLGLTPNFKSNFDLAEDAKLQLSKDTYDDDLDNLLAQIGDQYADLFLAAKNLSDAILLSDILRVNTEITKAPLSASMIKRYDEHHQDLTLLKALVRQQLPEKYKEIFFDQSKNGYAGYIDGGASQEEFYKFIKPILEKMDGTEELLVKLNREDLLRKQRTFDNGSIPHQIHLGELHAILRRQEDFYPFLKDNREKIEKILTFRIPYYVGPLARGNSRFAWMTRKSEETITPWNFEEVVDKGASAQSFIERMTNFDKNLPNEKVLPKHSLLYEYFTVYNELTKVKYVTEGMRKPAFLSGEQKKAIVDLLFKTNRKVTVKQLKEDYFKKIECFDSVEISGVEDRFNASLGTYHDLLKIIKDKDFLDNEENEDILEDIVLTLTLFEDREMIEERLKTYAHLFDDKVMKQLKRRRYTGWGRLSRKLINGIRDKQSGKTILDFLKSDGFANRNFMQLIHDDSLTFKEDIQKAQVSGQGDSLHEHIANLAGSPAIKKGILQTVKVVDELVKVMGRHKPENIVIEMARENQTTQKGQKNSRERMKRIEEGIKELGSQILKEHPVENTQLQNEKLYLYYLQNGRDMYVDQELDINRLSDYDVDHIVPQSFLKDDSIDNKVLTRSDKARGKSDNVPSEEVVKKMKNYWRQLLNAKLITQRKFDNLTKAERGGLSELDKAGFIKRQLVETRQITKHVAQILDSRMNTKYDENDKLIREVKVITLKSKLVSDFRKDFQFYKVREINNYHHAHDAYLNAVVGTALIKKYPKLESEFVYGDYKVYDVRKMIAKSEQEIGKATAKYFFYSNIMNFFKTEITLANGEIRKRPLIETNGETGEIVWDKGRDFATVRKVLSMPQVNIVKKTEVQTGGFSKESILPKRNSDKLIARKKDWDPKKYGGFDSPTVAYSVLVVAKVEKGKSKKLKSVKELLGITIMERSSFEKNPIDFLEAKGYKEVKKDLIIKLPKYSLFELENGRKRMLASAGELQKGNELALPSKYVNFLYLASHYEKLKGSPEDNEQKQLFVEQHKHYLDEIIEQISEFSKRVILADANLDKVLSAYNKHRDKPIREQAENIIHLFTLTNLGAPAAFKYFDTTIDRKRYTSTKEVLDATLIHQSITGLYETRIDLSQLGGDGGEAAAKEAAAKEAAAKEAAAKEAAAKGGMDPLQLLQPLEAEIKGTKLKAHWNSGATITCVPQAFLEEEVPIKNIWIKTIHGEKEQPVYYLTFKIQGRKVEAEVISSPYDYILVSPSDIPWLMKKPLQLTTLVPLQEYEERLLKQTMLTGSYKEKLQSLFLKYDALWQHWENQVGHRRIKPHHIATGTVNPRPQKQYPINPKAKASIQTVINDLLKQGVLIQQNSIMNTPVYPVPKPDGKWRMVLDYREVNKTIPLIAAQNQHSAGILSSIFRGKYKTTLDLSNGFWAHSITPESYWLTAFTWLGQQYCWTRLPQGFLNSPALFNADVVDLLKEVPNVQVYVDDIYISHDDPREHLEQLEKVFSLLLNAGYVVSLKKSEIAQHEVEFLGFNITKEGRGLTETFKQKLLNITPPRDLKQLQSILGKLNFARNFIPNFSELVKPLYNIIATAPGKYITWTTDNSQQLQNIISMLNSAENLEERNPEVRLIMKVNTSPSAGYIRFYNEFAKRPIMYLNYVYTKAEVKFTNTEKLLTTIHKGLIKALDLGMGQEILVYSPIVSMTKIQKTPLPERKALPIRWITWMSYLEDPRIQFHYDKTLPELQQVPTVTDDIIAKIKHPSEFSMVFYTDGSAIKHPNVNKSHNAGMGIAQVQFKPEFTVINTWSIPLGDHTAQLAEVAAVEFACKKALKIDGPVLIVTDSFYVAESVNKELPYWQSNGFFNNKKKPLKHVSKWKSIADCIQLKPDIIIIHEKGHQPTASTFHTEGNNLADKLATQGSYVVNAGKRTADGSEFEKRTADGSEFESPKKKAKVE

SEQ ID NO: 650 - protein, 2176 aa, synthetic construct
MPAAKRVKLDGGDKKYSIGLDIGTNSVGWAVITDEYKVPSKKFKVLGNTDRHSIKKNLIGALLFDSGETAEATRLKRTARRRYTRRKNRICYLQEIFSNEMAKVDDSFFHRLEESFLVEEDKKHERHPIFGNIVDEVAYHEKYPTIYHLRKKLVDSTDKADLRLIYLALAHMIKFRGHFLIEGDLNPDNSDVDKLFIQLVQTYNQLFEENPINASGVDAKAILSARLSKSRRLENLIAQLPGEKKNGLFGNLIALSLGLTPNFKSNFDLAEDAKLQLSKDTYDDDLDNLLAQIGDQYADLFLAAKNLSDAILLSDILRVNTEITKAPLSASMIKRYDEHHQDLTLLKALVRQQLPEKYKEIFFDQSKNGYAGYIDGGASQEEFYKFIKPILEKMDGTEELLVKLNREDLLRKQRTFDNGSIPHQIHLGELHAILRRQEDFYPFLKDNREKIEKILTFRIPYYVGPLARGNSRFAWMTRKSEETITPWNFEEVVDKGASAQSFIERMTNFDKNLPNEKVLPKHSLLYEYFTVYNELTKVKYVTEGMRKPAFLSGEQKKAIVDLLFKTNRKVTVKQLKEDYFKKIECFDSVEISGVEDRFNASLGTYHDLLKIIKDKDFLDNEENEDILEDIVLTLTLFEDREMIEERLKTYAHLFDDKVMKQLKRRRYTGWGRLSRKLINGIRDKQSGKTILDFLKSDGFANRNFMQLIHDDSLTFKEDIQKAQVSGQGDSLHEHIANLAGSPAIKKGILQTVKVVDELVKVMGRHKPENIVIEMARENQTTQKGQKNSRERMKRIEEGIKELGSQILKEHPVENTQLQNEKLYLYYLQNGRDMYVDQELDINRLSDYDVDHIVPQSFLKDDSIDNKVLTRSDKARGKSDNVPSEEVVKKMKNYWRQLLNAKLITQRKFDNLTKAERGGLSELDKAGFIKRQLVETRQITKHVAQILDSRMNTKYDENDKLIREVKVITLKSKLVSDFRKDFQFYKVREINNYHHAHDAYLNAVVGTALIKKYPKLESEFVYGDYKVYDVRKMIAKSEQEIGKATAKYFFYSNIMNFFKTEITLANGEIRKRPLIETNGETGEIVWDKGRDFATVRKVLSMPQVNIVKKTEVQTGGFSKESILPKRNSDKLIARKKDWDPKKYGGFDSPTVAYSVLVVAKVEKGKSKKLKSVKELLGITIMERSSFEKNPIDFLEAKGYKEVKKDLIIKLPKYSLFELENGRKRMLASAGELQKGNELALPSKYVNFLYLASHYEKLKGSPEDNEQKQLFVEQHKHYLDEIIEQISEFSKRVILADANLDKVLSAYNKHRDKPIREQAENIIHLFTLTNLGAPAAFKYFDTTIDRKRYTSTKEVLDATLIHQSITGLYETRIDLSQLGGDGGPAPGSSEAAAKGGMDPLQLLQPLEAEIKGTKLKAHWNSGATITCVPQAFLEEEVPIKNIWIKTIHGEKEQPVYYLTFKIQGRKVEAEVISSPYDYILVSPSDIPWLMKKPLQLTTLVPLQEYEERLLKQTMLTGSYKEKLQSLFLKYDALWQHWENQVGHRRIKPHHIATGTVNPRPQKQYPINPKAKASIQTVINDLLKQGVLIQQNSIMNTPVYPVPKPDGKWRMVLDYREVNKTIPLIAAQNQHSAGILSSIFRGKYKTTLDLSNGFWAHSITPESYWLTAFTWLGQQYCWTRLPQGFLNSPALFNADVVDLLKEVPNVQVYVDDIYISHDDPREHLEQLEKVFSLLLNAGYVVSLKKSEIAQHEVEFLGFNITKEGRGLTETFKQKLLNITPPRDLKQLQSILGKLNFARNFIPNFSELVKPLYNIIATAPGKYITWTTDNSQQLQNIISMLNSAENLEERNPEVRLIMKVNTSPSAGYIRFYNEFAKRPIMYLNYVYTKAEVKFTNTEKLLTTIHKGLIKALDLGMGQEILVYSPIVSMTKIQKTPLPERKALPIRWITWMSYLEDPRIQFHYDKTLPELQQVPTVTDDIIAKIKHPSEFSMVFYTDGSAIKHPNVNKSHNAGMGIAQVQFKPEFTVINTWSIPLGDHTAQLAEVAAVEFACKKALKIDGPVLIVTDSFYVAESVNKELPYWQSNGFFNNKKKPLKHVSKWKSIADCIQLKPDIIIIHEKGHQPTASTFHTEGNNLADKLATQGSYVVNAGKRTADGSEFEKRTADGSEFESPKKKAKVE

SEQ ID NO: 651 - protein, 2195 aa, synthetic construct
MPAAKRVKLDGGDKKYSIGLDIGTNSVGWAVITDEYKVPSKKFKVLGNTDRHSIKKNLIGALLFDSGETAEATRLKRTARRRYTRRKNRICYLQEIFSNEMAKVDDSFFHRLEESFLVEEDKKHERHPIFGNIVDEVAYHEKYPTIYHLRKKLVDSTDKADLRLIYLALAHMIKFRGHFLIEGDLNPDNSDVDKLFIQLVQTYNQLFEENPINASGVDAKAILSARLSKSRRLENLIAQLPGEKKNGLFGNLIALSLGLTPNFKSNFDLAEDAKLQLSKDTYDDDLDNLLAQIGDQYADLFLAAKNLSDAILLSDILRVNTEITKAPLSASMIKRYDEHHQDLTLLKALVRQQLPEKYKEIFFDQSKNGYAGYIDGGASQEEFYKFIKPILEKMDGTEELLVKLNREDLLRKQRTFDNGSIPHQIHLGELHAILRRQEDFYPFLKDNREKIEKILTFRIPYYVGPLARGNSRFAWMTRKSEETITPWNFEEVVDKGASAQSFIERMTNFDKNLPNEKVLPKHSLLYEYFTVYNELTKVKYVTEGMRKPAFLSGEQKKAIVDLLFKTNRKVTVKQLKEDYFKKIECFDSVEISGVEDRFNASLGTYHDLLKIIKDKDFLDNEENEDILEDIVLTLTLFEDREMIEERLKTYAHLFDDKVMKQLKRRRYTGWGRLSRKLINGIRDKQSGKTILDFLKSDGFANRNFMQLIHDDSLTFKEDIQKAQVSGQGDSLHEHIANLAGSPAIKKGILQTVKVVDELVKVMGRHKPENIVIEMARENQTTQKGQKNSRERMKRIEEGIKELGSQILKEHPVENTQLQNEKLYLYYLQNGRDMYVDQELDINRLSDYDVDHIVPQSFLKDDSIDNKVLTRSDKARGKSDNVPSEEVVKKMKNYWRQLLNAKLITQRKFDNLTKAERGGLSELDKAGFIKRQLVETRQITKHVAQILDSRMNTKYDENDKLIREVKVITLKSKLVSDFRKDFQFYKVREINNYHHAHDAYLNAVVGTALIKKYPKLESEFVYGDYKVYDVRKMIAKSEQEIGKATAKYFFYSNIMNFFKTEITLANGEIRKRPLIETNGETGEIVWDKGRDFATVRKVLSMPQVNIVKKTEVQTGGFSKESILPKRNSDKLIARKKDWDPKKYGGFDSPTVAYSVLVVAKVEKGKSKKLKSVKELLGITIMERSSFEKNPIDFLEAKGYKEVKKDLIIKLPKYSLFELENGRKRMLASAGELQKGNELALPSKYVNFLYLASHYEKLKGSPEDNEQKQLFVEQHKHYLDEIIEQISEFSKRVILADANLDKVLSAYNKHRDKPIREQAENIIHLFTLTNLGAPAAFKYFDTTIDRKRYTSTKEVLDATLIHQSITGLYETRIDLSQLGGDGGEAAAKEAAAKEAAAKEAAAKEAAAKEAAAKGGMDPLQLLQPLEAEIKGTKLKAHWNSGATITCVPQAFLEEEVPIKNIWIKTIHGEKEQPVYYLTFKIQGRKVEAEVISSPYDYILVSPSDIPWLMKKPLQLTTLVPLQEYEERLLKQTMLTGSYKEKLQSLFLKYDALWQHWENQVGHRRIKPHHIATGTVNPRPQKQYPINPKAKASIQTVINDLLKQGVLIQQNSIMNTPVYPVPKPDGKWRMVLDYREVNKTIPLIAAQNQHSAGILSSIFRGKYKTTLDLSNGFWAHSITPESYWLTAFTWLGQQYCWTRLPQGFLNSPALFNADVVDLLKEVPNVQVYVDDIYISHDDPREHLEQLEKVFSLLLNAGYVVSLKKSEIAQHEVEFLGFNITKEGRGLTETFKQKLLNITPPRDLKQLQSILGKLNFARNFIPNFSELVKPLYNIIATAPGKYITWTTDNSQQLQNIISMLNSAENLEERNPEVRLIMKVNTSPSAGYIRFYNEFAKRPIMYLNYVYTKAEVKFTNTEKLLTTIHKGLIKALDLGMGQEILVYSPIVSMTKIQKTPLPERKALPIRWITWMSYLEDPRIQFHYDKTLPELQQVPTVTDDIIAKIKHPSEFSMVFYTDGSAIKHPNVNKSHNAGMGIAQVQFKPEFTVINTWSIPLGDHTAQLAEVAAVEFACKKALKIDGPVLIVTDSFYVAESVNKELPYWQSNGFFNNKKKPLKHVSKWKSIADCIQLKPDIIIIHEKGHQPTASTFHTEGNNLADKLATQGSYVVNAGKRTADGSEFEKRTADGSEFESPKKKAKVE

SEQ ID NO: 652 - protein, 2198 aa, synthetic construct
MPAAKRVKLDGGDKKYSIGLDIGTNSVGWAVITDEYKVPSKKFKVLGNTDRHSIKKNLIGALLFDSGETAEATRLKRTARRRYTRRKNRICYLQEIFSNEMAKVDDSFFHRLEESFLVEEDKKHERHPIFGNIVDEVAYHEKYPTIYHLRKKLVDSTDKADLRLIYLALAHMIKFRGHFLIEGDLNPDNSDVDKLFIQLVQTYNQLFEENPINASGVDAKAILSARLSKSRRLENLIAQLPGEKKNGLFGNLIALSLGLTPNFKSNFDLAEDAKLQLSKDTYDDDLDNLLAQIGDQYADLFLAAKNLSDAILLSDILRVNTEITKAPLSASMIKRYDEHHQDLTLLKALVRQQLPEKYKEIFFDQSKNGYAGYIDGGASQEEFYKFIKPILEKMDGTEELLVKLNREDLLRKQRTFDNGSIPHQIHLGELHAILRRQEDFYPFLKDNREKIEKILTFRIPYYVGPLARGNSRFAWMTRKSEETITPWNFEEVVDKGASAQSFIERMTNFDKNLPNEKVLPKHSLLYEYFTVYNELTKVKYVTEGMRKPAFLSGEQKKAIVDLLFKTNRKVTVKQLKEDYFKKIECFDSVEISGVEDRFNASLGTYHDLLKIIKDKDFLDNEENEDILEDIVLTLTLFEDREMIEERLKTYAHLFDDKVMKQLKRRRYTGWGRLSRKLINGIRDKQSGKTILDFLKSDGFANRNFMQLIHDDSLTFKEDIQKAQVSGQGDSLHEHIANLAGSPAIKKGILQTVKVVDELVKVMGRHKPENIVIEMARENQTTQKGQKNSRERMKRIEEGIKELGSQILKEHPVENTQLQNEKLYLYYLQNGRDMYVDQELDINRLSDYDVDHIVPQSFLKDDSIDNKVLTRSDKARGKSDNVPSEEVVKKMKNYWRQLLNAKLITQRKFDNLTKAERGGLSELDKAGFIKRQLVETRQITKHVAQILDSRMNTKYDENDKLIREVKVITLKSKLVSDFRKDFQFYKVREINNYHHAHDAYLNAVVGTALIKKYPKLESEFVYGDYKVYDVRKMIAKSEQEIGKATAKYFFYSNIMNFFKTEITLANGEIRKRPLIETNGETGEIVWDKGRDFATVRKVLSMPQVNIVKKTEVQTGGFSKESILPKRNSDKLIARKKDWDPKKYGGFDSPTVAYSVLVVAKVEKGKSKKLKSVKELLGITIMERSSFEKNPIDFLEAKGYKEVKKDLIIKLPKYSLFELENGRKRMLASAGELQKGNELALPSKYVNFLYLASHYEKLKGSPEDNEQKQLFVEQHKHYLDEIIEQISEFSKRVILADANLDKVLSAYNKHRDKPIREQAENIIHLFTLTNLGAPAAFKYFDTTIDRKRYTSTKEVLDATLIHQSITGLYETRIDLSQLGGDGGSGGSSGGSSGSETPGTSESATPESSGGSSGGSSGGMDPLQLLQPLEAEIKGTKLKAHWNSGATITCVPQAFLEEEVPIKNIWIKTIHGEKEQPVYYLTFKIQGRKVEAEVISSPYDYILVSPSDIPWLMKKPLQLTTLVPLQEYEERLLKQTMLTGSYKEKLQSLFLKYDALWQHWENQVGHRRIKPHHIATGTVNPRPQKQYPINPKAKASIQTVINDLLKQGVLIQQNSIMNTPVYPVPKPDGKWRMVLDYREVNKTIPLIAAQNQHSAGILSSIFRGKYKTTLDLSNGFWAHSITPESYWLTAFTWLGQQYCWTRLPQGFLNSPALFNADVVDLLKEVPNVQVYVDDIYISHDDPREHLEQLEKVFSLLLNAGYVVSLKKSEIAQHEVEFLGFNITKEGRGLTETFKQKLLNITPPRDLKQLQSILGKLNFARNFIPNFSELVKPLYNIIATAPGKYITWTTDNSQQLQNIISMLNSAENLEERNPEVRLIMKVNTSPSAGYIRFYNEFAKRPIMYLNYVYTKAEVKFTNTEKLLTTIHKGLIKALDLGMGQEILVYSPIVSMTKIQKTPLPERKALPIRWITWMSYLEDPRIQFHYDKTLPELQQVPTVTDDIIAKIKHPSEFSMVFYTDGSAIKHPNVNKSHNAGMGIAQVQFKPEFTVINTWSIPLGDHTAQLAEVAAVEFACKKALKIDGPVLIVTDSFYVAESVNKELPYWQSNGFFNNKKKPLKHVSKWKSIADCIQLKPDIIIIHEKGHQPTASTFHTEGNNLADKLATQGSYVVNAGKRTADGSEFEKRTADGSEFESPKKKAKVE

SEQ ID NO: 653 - protein, 2176 aa, synthetic construct
MPAAKRVKLDGGDKKYSIGLDIGTNSVGWAVITDEYKVPSKKFKVLGNTDRHSIKKNLIGALLFDSGETAEATRLKRTARRRYTRRKNRICYLQEIFSNEMAKVDDSFFHRLEESFLVEEDKKHERHPIFGNIVDEVAYHEKYPTIYHLRKKLVDSTDKADLRLIYLALAHMIKFRGHFLIEGDLNPDNSDVDKLFIQLVQTYNQLFEENPINASGVDAKAILSARLSKSRRLENLIAQLPGEKKNGLFGNLIALSLGLTPNFKSNFDLAEDAKLQLSKDTYDDDLDNLLAQIGDQYADLFLAAKNLSDAILLSDILRVNTEITKAPLSASMIKRYDEHHQDLTLLKALVRQQLPEKYKEIFFDQSKNGYAGYIDGGASQEEFYKFIKPILEKMDGTEELLVKLNREDLLRKQRTFDNGSIPHQIHLGELHAILRRQEDFYPFLKDNREKIEKILTFRIPYYVGPLARGNSRFAWMTRKSEETITPWNFEEVVDKGASAQSFIERMTNFDKNLPNEKVLPKHSLLYEYFTVYNELTKVKYVTEGMRKPAFLSGEQKKAIVDLLFKTNRKVTVKQLKEDYFKKIECFDSVEISGVEDRFNASLGTYHDLLKIIKDKDFLDNEENEDILEDIVLTLTLFEDREMIEERLKTYAHLFDDKVMKQLKRRRYTGWGRLSRKLINGIRDKQSGKTILDFLKSDGFANRNFMQLIHDDSLTFKEDIQKAQVSGQGDSLHEHIANLAGSPAIKKGILQTVKVVDELVKVMGRHKPENIVIEMARENQTTQKGQKNSRERMKRIEEGIKELGSQILKEHPVENTQLQNEKLYLYYLQNGRDMYVDQELDINRLSDYDVDHIVPQSFLKDDSIDNKVLTRSDKARGKSDNVPSEEVVKKMKNYWRQLLNAKLITQRKFDNLTKAERGGLSELDKAGFIKRQLVETRQITKHVAQILDSRMNTKYDENDKLIREVKVITLKSKLVSDFRKDFQFYKVREINNYHHAHDAYLNAVVGTALIKKYPKLESEFVYGDYKVYDVRKMIAKSEQEIGKATAKYFFYSNIMNFFKTEITLANGEIRKRPLIETNGETGEIVWDKGRDFATVRKVLSMPQVNIVKKTEVQTGGFSKESILPKRNSDKLIARKKDWDPKKYGGFDSPTVAYSVLVVAKVEKGKSKKLKSVKELLGITIMERSSFEKNPIDFLEAKGYKEVKKDLIIKLPKYSLFELENGRKRMLASAGELQKGNELALPSKYVNFLYLASHYEKLKGSPEDNEQKQLFVEQHKHYLDEIIEQISEFSKRVILADANLDKVLSAYNKHRDKPIREQAENIIHLFTLTNLGAPAAFKYFDTTIDRKRYTSTKEVLDATLIHQSITGLYETRIDLSQLGGDGGGGGGGSEAAAKGGMDPLQLLQPLEAEIKGTKLKAHWNSGATITCVPQAFLEEEVPIKNIWIKTIHGEKEQPVYYLTFKIQGRKVEAEVISSPYDYILVSPSDIPWLMKKPLQLTTLVPLQEYEERLLKQTMLTGSYKEKLQSLFLKYDALWQHWENQVGHRRIKPHHIATGTVNPRPQKQYPINPKAKASIQTVINDLLKQGVLIQQNSIMNTPVYPVPKPDGKWRMVLDYREVNKTIPLIAAQNQHSAGILSSIFRGKYKTTLDLSNGFWAHSITPESYWLTAFTWLGQQYCWTRLPQGFLNSPALFNADVVDLLKEVPNVQVYVDDIYISHDDPREHLEQLEKVFSLLLNAGYVVSLKKSEIAQHEVEFLGFNITKEGRGLTETFKQKLLNITPPRDLKQLQSILGKLNFARNFIPNFSELVKPLYNIIATAPGKYITWTTDNSQQLQNIISMLNSAENLEERNPEVRLIMKVNTSPSAGYIRFYNEFAKRPIMYLNYVYTKAEVKFTNTEKLLTTIHKGLIKALDLGMGQEILVYSPIVSMTKIQKTPLPERKALPIRWITWMSYLEDPRIQFHYDKTLPELQQVPTVTDDIIAKIKHPSEFSMVFYTDGSAIKHPNVNKSHNAGMGIAQVQFKPEFTVINTWSIPLGDHTAQLAEVAAVEFACKKALKIDGPVLIVTDSFYVAESVNKELPYWQSNGFFNNKKKPLKHVSKWKSIADCIQLKPDIIIIHEKGHQPTASTFHTEGNNLADKLATQGSYVVNAGKRTADGSEFEKRTADGSEFESPKKKAKVE

SEQ ID NO: 654 - protein, 2178 aa, synthetic construct
MPAAKRVKLDGGDKKYSIGLDIGTNSVGWAVITDEYKVPSKKFKVLGNTDRHSIKKNLIGALLFDSGETAEATRLKRTARRRYTRRKNRICYLQEIFSNEMAKVDDSFFHRLEESFLVEEDKKHERHPIFGNIVDEVAYHEKYPTIYHLRKKLVDSTDKADLRLIYLALAHMIKFRGHFLIEGDLNPDNSDVDKLFIQLVQTYNQLFEENPINASGVDAKAILSARLSKSRRLENLIAQLPGEKKNGLFGNLIALSLGLTPNFKSNFDLAEDAKLQLSKDTYDDDLDNLLAQIGDQYADLFLAAKNLSDAILLSDILRVNTEITKAPLSASMIKRYDEHHQDLTLLKALVRQQLPEKYKEIFFDQSKNGYAGYIDGGASQEEFYKFIKPILEKMDGTEELLVKLNREDLLRKQRTFDNGSIPHQIHLGELHAILRRQEDFYPFLKDNREKIEKILTFRIPYYVGPLARGNSRFAWMTRKSEETITPWNFEEVVDKGASAQSFIERMTNFDKNLPNEKVLPKHSLLYEYFTVYNELTKVKYVTEGMRKPAFLSGEQKKAIVDLLFKTNRKVTVKQLKEDYFKKIECFDSVEISGVEDRFNASLGTYHDLLKIIKDKDFLDNEENEDILEDIVLTLTLFEDREMIEERLKTYAHLFDDKVMKQLKRRRYTGWGRLSRKLINGIRDKQSGKTILDFLKSDGFANRNFMQLIHDDSLTFKEDIQKAQVSGQGDSLHEHIANLAGSPAIKKGILQTVKVVDELVKVMGRHKPENIVIEMARENQTTQKGQKNSRERMKRIEEGIKELGSQILKEHPVENTQLQNEKLYLYYLQNGRDMYVDQELDINRLSDYDVDHIVPQSFLKDDSIDNKVLTRSDKARGKSDNVPSEEVVKKMKNYWRQLLNAKLITQRKFDNLTKAERGGLSELDKAGFIKRQLVETRQITKHVAQILDSRMNTKYDENDKLIREVKVITLKSKLVSDFRKDFQFYKVREINNYHHAHDAYLNAVVGTALIKKYPKLESEFVYGDYKVYDVRKMIAKSEQEIGKATAKYFFYSNIMNFFKTEITLANGEIRKRPLIETNGETGEIVWDKGRDFATVRKVLSMPQVNIVKKTEVQTGGFSKESILPKRNSDKLIARKKDWDPKKYGGFDSPTVAYSVLVVAKVEKGKSKKLKSVKELLGITIMERSSFEKNPIDFLEAKGYKEVKKDLIIKLPKYSLFELENGRKRMLASAGELQKGNELALPSKYVNFLYLASHYEKLKGSPEDNEQKQLFVEQHKHYLDEIIEQISEFSKRVILADANLDKVLSAYNKHRDKPIREQAENIIHLFTLTNLGAPAAFKYFDTTIDRKRYTSTKEVLDATLIHQSITGLYETRIDLSQLGGDGGPAPAPAPAPAPAPGGMDPLQLLQPLEAEIKGTKLKAHWNSGATITCVPQAFLEEEVPIKNIWIKTIHGEKEQPVYYLTFKIQGRKVEAEVISSPYDYILVSPSDIPWLMKKPLQLTTLVPLQEYEERLLKQTMLTGSYKEKLQSLFLKYDALWQHWENQVGHRRIKPHHIATGTVNPRPQKQYPINPKAKASIQTVINDLLKQGVLIQQNSIMNTPVYPVPKPDGKWRMVLDYREVNKTIPLIAAQNQHSAGILSSIFRGKYKTTLDLSNGFWAHSITPESYWLTAFTWLGQQYCWTRLPQGFLNSPALFNADVVDLLKEVPNVQVYVDDIYISHDDPREHLEQLEKVFSLLLNAGYVVSLKKSEIAQHEVEFLGFNITKEGRGLTETFKQKLLNITPPRDLKQLQSILGKLNFARNFIPNFSELVKPLYNIIATAPGKYITWTTDNSQQLQNIISMLNSAENLEERNPEVRLIMKVNTSPSAGYIRFYNEFAKRPIMYLNYVYTKAEVKFTNTEKLLTTIHKGLIKALDLGMGQEILVYSPIVSMTKIQKTPLPERKALPIRWITWMSYLEDPRIQFHYDKTLPELQQVPTVTDDIIAKIKHPSEFSMVFYTDGSAIKHPNVNKSHNAGMGIAQVQFKPEFTVINTWSIPLGDHTAQLAEVAAVEFACKKALKIDGPVLIVTDSFYVAESVNKELPYWQSNGFFNNKKKPLKHVSKWKSIADCIQLKPDIIIIHEKGHQPTASTFHTEGNNLADKLATQGSYVVNAGKRTADGSEFEKRTADGSEFESPKKKAKVE

SEQ ID NO: 655 - protein, 2176 aa, synthetic construct
MPAAKRVKLDGGDKKYSIGLDIGTNSVGWAVITDEYKVPSKKFKVLGNTDRHSIKKNLIGALLFDSGETAEATRLKRTARRRYTRRKNRICYLQEIFSNEMAKVDDSFFHRLEESFLVEEDKKHERHPIFGNIVDEVAYHEKYPTIYHLRKKLVDSTDKADLRLIYLALAHMIKFRGHFLIEGDLNPDNSDVDKLFIQLVQTYNQLFEENPINASGVDAKAILSARLSKSRRLENLIAQLPGEKKNGLFGNLIALSLGLTPNFKSNFDLAEDAKLQLSKDTYDDDLDNLLAQIGDQYADLFLAAKNLSDAILLSDILRVNTEITKAPLSASMIKRYDEHHQDLTLLKALVRQQLPEKYKEIFFDQSKNGYAGYIDGGASQEEFYKFIKPILEKMDGTEELLVKLNREDLLRKQRTFDNGSIPHQIHLGELHAILRRQEDFYPFLKDNREKIEKILTFRIPYYVGPLARGNSRFAWMTRKSEETITPWNFEEVVDKGASAQSFIERMTNFDKNLPNEKVLPKHSLLYEYFTVYNELTKVKYVTEGMRKPAFLSGEQKKAIVDLLFKTNRKVTVKQLKEDYFKKIECFDSVEISGVEDRFNASLGTYHDLLKIIKDKDFLDNEENEDILEDIVLTLTLFEDREMIEERLKTYAHLFDDKVMKQLKRRRYTGWGRLSRKLINGIRDKQSGKTILDFLKSDGFANRNFMQLIHDDSLTFKEDIQKAQVSGQGDSLHEHIANLAGSPAIKKGILQTVKVVDELVKVMGRHKPENIVIEMARENQTTQKGQKNSRERMKRIEEGIKELGSQILKEHPVENTQLQNEKLYLYYLQNGRDMYVDQELDINRLSDYDVDHIVPQSFLKDDSIDNKVLTRSDKARGKSDNVPSEEVVKKMKNYWRQLLNAKLITQRKFDNLTKAERGGLSELDKAGFIKRQLVETRQITKHVAQILDSRMNTKYDENDKLIREVKVITLKSKLVSDFRKDFQFYKVREINNYHHAHDAYLNAVVGTALIKKYPKLESEFVYGDYKVYDVRKMIAKSEQEIGKATAKYFFYSNIMNFFKTEITLANGEIRKRPLIETNGETGEIVWDKGRDFATVRKVLSMPQVNIVKKTEVQTGGFSKESILPKRNSDKLIARKKDWDPKKYGGFDSPTVAYSVLVVAKVEKGKSKKLKSVKELLGITIMERSSFEKNPIDFLEAKGYKEVKKDLIIKLPKYSLFELENGRKRMLASAGELQKGNELALPSKYVNFLYLASHYEKLKGSPEDNEQKQLFVEQHKHYLDEIIEQISEFSKRVILADANLDKVLSAYNKHRDKPIREQAENIIHLFTLTNLGAPAAFKYFDTTIDRKRYTSTKEVLDATLIHQSITGLYETRIDLSQLGGDGGGGGGSSEAAAKGGMDPLQLLQPLEAEIKGTKLKAHWNSGATITCVPQAFLEEEVPIKNIWIKTIHGEKEQPVYYLTFKIQGRKVEAEVISSPYDYILVSPSDIPWLMKKPLQLTTLVPLQEYEERLLKQTMLTGSYKEKLQSLFLKYDALWQHWENQVGHRRIKPHHIATGTVNPRPQKQYPINPKAKASIQTVINDLLKQGVLIQQNSIMNTPVYPVPKPDGKWRMVLDYREVNKTIPLIAAQNQHSAGILSSIFRGKYKTTLDLSNGFWAHSITPESYWLTAFTWLGQQYCWTRLPQGFLNSPALFNADVVDLLKEVPNVQVYVDDIYISHDDPREHLEQLEKVFSLLLNAGYVVSLKKSEIAQHEVEFLGFNITKEGRGLTETFKQKLLNITPPRDLKQLQSILGKLNFARNFIPNFSELVKPLYNIIATAPGKYITWTTDNSQQLQNIISMLNSAENLEERNPEVRLIMKVNTSPSAGYIRFYNEFAKRPIMYLNYVYTKAEVKFTNTEKLLTTIHKGLIKALDLGMGQEILVYSPIVSMTKIQKTPLPERKALPIRWITWMSYLEDPRIQFHYDKTLPELQQVPTVTDDIIAKIKHPSEFSMVFYTDGSAIKHPNVNKSHNAGMGIAQVQFKPEFTVINTWSIPLGDHTAQLAEVAAVEFACKKALKIDGPVLIVTDSFYVAESVNKELPYWQSNGFFNNKKKPLKHVSKWKSIADCIQLKPDIIIIHEKGHQPTASTFHTEGNNLADKLATQGSYVVNAGKRTADGSEFEKRTADGSEFESPKKKAKVE

SEQ ID NO: 656 - protein, 2181 aa, synthetic construct
MPAAKRVKLDGGDKKYSIGLDIGTNSVGWAVITDEYKVPSKKFKVLGNTDRHSIKKNLIGALLFDSGETAEATRLKRTARRRYTRRKNRICYLQEIFSNEMAKVDDSFFHRLEESFLVEEDKKHERHPIFGNIVDEVAYHEKYPTIYHLRKKLVDSTDKADLRLIYLALAHMIKFRGHFLIEGDLNPDNSDVDKLFIQLVQTYNQLFEENPINASGVDAKAILSARLSKSRRLENLIAQLPGEKKNGLFGNLIALSLGLTPNFKSNFDLAEDAKLQLSKDTYDDDLDNLLAQIGDQYADLFLAAKNLSDAILLSDILRVNTEITKAPLSASMIKRYDEHHQDLTLLKALVRQQLPEKYKEIFFDQSKNGYAGYIDGGASQEEFYKFIKPILEKMDGTEELLVKLNREDLLRKQRTFDNGSIPHQIHLGELHAILRRQEDFYPFLKDNREKIEKILTFRIPYYVGPLARGNSRFAWMTRKSEETITPWNFEEVVDKGASAQSFIERMTNFDKNLPNEKVLPKHSLLYEYFTVYNELTKVKYVTEGMRKPAFLSGEQKKAIVDLLFKTNRKVTVKQLKEDYFKKIECFDSVEISGVEDRFNASLGTYHDLLKIIKDKDFLDNEENEDILEDIVLTLTLFEDREMIEERLKTYAHLFDDKVMKQLKRRRYTGWGRLSRKLINGIRDKQSGKTILDFLKSDGFANRNFMQLIHDDSLTFKEDIQKAQVSGQGDSLHEHIANLAGSPAIKKGILQTVKVVDELVKVMGRHKPENIVIEMARENQTTQKGQKNSRERMKRIEEGIKELGSQILKEHPVENTQLQNEKLYLYYLQNGRDMYVDQELDINRLSDYDVDHIVPQSFLKDDSIDNKVLTRSDKARGKSDNVPSEEVVKKMKNYWRQLLNAKLITQRKFDNLTKAERGGLSELDKAGFIKRQLVETRQITKHVAQILDSRMNTKYDENDKLIREVKVITLKSKLVSDFRKDFQFYKVREINNYHHAHDAYLNAVVGTALIKKYPKLESEFVYGDYKVYDVRKMIAKSEQEIGKATAKYFFYSNIMNFFKTEITLANGEIRKRPLIETNGETGEIVWDKGRDFATVRKVLSMPQVNIVKKTEVQTGGFSKESILPKRNSDKLIARKKDWDPKKYGGFDSPTVAYSVLVVAKVEKGKSKKLKSVKELLGITIMERSSFEKNPIDFLEAKGYKEVKKDLIIKLPKYSLFELENGRKRMLASAGELQKGNELALPSKYVNFLYLASHYEKLKGSPEDNEQKQLFVEQHKHYLDEIIEQISEFSKRVILADANLDKVLSAYNKHRDKPIREQAENIIHLFTLTNLGAPAAFKYFDTTIDRKRYTSTKEVLDATLIHQSITGLYETRIDLSQLGGDGGSGSETPGTSESATPESGGMDPLQLLQPLEAEIKGTKLKAHWNSGATITCVPQAFLEEEVPIKNIWIKTIHGEKEQPVYYLTFKIQGRKVEAEVISSPYDYILVSPSDIPWLMKKPLQLTTLVPLQEYEERLLKQTMLTGSYKEKLQSLFLKYDALWQHWENQVGHRRIKPHHIATGTVNPRPQKQYPINPKAKASIQTVINDLLKQGVLIQQNSIMNTPVYPVPKPDGKWRMVLDYREVNKTIPLIAAQNQHSAGILSSIFRGKYKTTLDLSNGFWAHSITPESYWLTAFTWLGQQYCWTRLPQGFLNSPALFNADVVDLLKEVPNVQVYVDDIYISHDDPREHLEQLEKVFSLLLNAGYVVSLKKSEIAQHEVEFLGFNITKEGRGLTETFKQKLLNITPPRDLKQLQSILGKLNFARNFIPNFSELVKPLYNIIATAPGKYITWTTDNSQQLQNIISMLNSAENLEERNPEVRLIMKVNTSPSAGYIRFYNEFAKRPIMYLNYVYTKAEVKFTNTEKLLTTIHKGLIKALDLGMGQEILVYSPIVSMTKIQKTPLPERKALPIRWITWMSYLEDPRIQFHYDKTLPELQQVPTVTDDIIAKIKHPSEFSMVFYTDGSAIKHPNVNKSHNAGMGIAQVQFKPEFTVINTWSIPLGDHTAQLAEVAAVEFACKKALKIDGPVLIVTDSFYVAESVNKELPYWQSNGFFNNKKKPLKHVSKWKSIADCIQLKPDIIIIHEKGHQPTASTFHTEGNNLADKLATQGSYVVNAGKRTADGSEFEKRTADGSEFESPKKKAKVE

SEQ ID NO: 657 - protein, 2177 aa, synthetic construct
MPAAKRVKLDGGDKKYSIGLDIGTNSVGWAVITDEYKVPSKKFKVLGNTDRHSIKKNLIGALLFDSGETAEATRLKRTARRRYTRRKNRICYLQEIFSNEMAKVDDSFFHRLEESFLVEEDKKHERHPIFGNIVDEVAYHEKYPTIYHLRKKLVDSTDKADLRLIYLALAHMIKFRGHFLIEGDLNPDNSDVDKLFIQLVQTYNQLFEENPINASGVDAKAILSARLSKSRRLENLIAQLPGEKKNGLFGNLIALSLGLTPNFKSNFDLAEDAKLQLSKDTYDDDLDNLLAQIGDQYADLFLAAKNLSDAILLSDILRVNTEITKAPLSASMIKRYDEHHQDLTLLKALVRQQLPEKYKEIFFDQSKNGYAGYIDGGASQEEFYKFIKPILEKMDGTEELLVKLNREDLLRKQRTFDNGSIPHQIHLGELHAILRRQEDFYPFLKDNREKIEKILTFRIPYYVGPLARGNSRFAWMTRKSEETITPWNFEEVVDKGASAQSFIERMTNFDKNLPNEKVLPKHSLLYEYFTVYNELTKVKYVTEGMRKPAFLSGEQKKAIVDLLFKTNRKVTVKQLKEDYFKKIECFDSVEISGVEDRFNASLGTYHDLLKIIKDKDFLDNEENEDILEDIVLTLTLFEDREMIEERLKTYAHLFDDKVMKQLKRRRYTGWGRLSRKLINGIRDKQSGKTILDFLKSDGFANRNFMQLIHDDSLTFKEDIQKAQVSGQGDSLHEHIANLAGSPAIKKGILQTVKVVDELVKVMGRHKPENIVIEMARENQTTQKGQKNSRERMKRIEEGIKELGSQILKEHPVENTQLQNEKLYLYYLQNGRDMYVDQELDINRLSDYDVDHIVPQSFLKDDSIDNKVLTRSDKARGKSDNVPSEEVVKKMKNYWRQLLNAKLITQRKFDNLTKAERGGLSELDKAGFIKRQLVETRQITKHVAQILDSRMNTKYDENDKLIREVKVITLKSKLVSDFRKDFQFYKVREINNYHHAHDAYLNAVVGTALIKKYPKLESEFVYGDYKVYDVRKMIAKSEQEIGKATAKYFFYSNIMNFFKTEITLANGEIRKRPLIETNGETGEIVWDKGRDFATVRKVLSMPQVNIVKKTEVQTGGFSKESILPKRNSDKLIARKKDWDPKKYGGFDSPTVAYSVLVVAKVEKGKSKKLKSVKELLGITIMERSSFEKNPIDFLEAKGYKEVKKDLIIKLPKYSLFELENGRKRMLASAGELQKGNELALPSKYVNFLYLASHYEKLKGSPEDNEQKQLFVEQHKHYLDEIIEQISEFSKRVILADANLDKVLSAYNKHRDKPIREQAENIIHLFTLTNLGAPAAFKYFDTTIDRKRYTSTKEVLDATLIHQSITGLYETRIDLSQLGGDGGGSAGSAAGSGEFGGMDPLQLLQPLEAEIKGTKLKAHWNSGATITCVPQAFLEEEVPIKNIWIKTIHGEKEQPVYYLTFKIQGRKVEAEVISSPYDYILVSPSDIPWLMKKPLQLTTLVPLQEYEERLLKQTMLTGSYKEKLQSLFLKYDALWQHWENQVGHRRIKPHHIATGTVNPRPQKQYPINPKAKASIQTVINDLLKQGVLIQQNSIMNTPVYPVPKPDGKWRMVLDYREVNKTIPLIAAQNQHSAGILSSIFRGKYKTTLDLSNGFWAHSITPESYWLTAFTWLGQQYCWTRLPQGFLNSPALFNADVVDLLKEVPNVQVYVDDIYISHDDPREHLEQLEKVFSLLLNAGYVVSLKKSEIAQHEVEFLGFNITKEGRGLTETFKQKLLNITPPRDLKQLQSILGKLNFARNFIPNFSELVKPLYNIIATAPGKYITWTTDNSQQLQNIISMLNSAENLEERNPEVRLIMKVNTSPSAGYIRFYNEFAKRPIMYLNYVYTKAEVKFTNTEKLLTTIHKGLIKALDLGMGQEILVYSPIVSMTKIQKTPLPERKALPIRWITWMSYLEDPRIQFHYDKTLPELQQVPTVTDDIIAKIKHPSEFSMVFYTDGSAIKHPNVNKSHNAGMGIAQVQFKPEFTVINTWSIPLGDHTAQLAEVAAVEFACKKALKIDGPVLIVTDSFYVAESVNKELPYWQSNGFFNNKKKPLKHVSKWKSIADCIQLKPDIIIIHEKGHQPTASTFHTEGNNLADKLATQGSYVVNAGKRTADGSEFEKRTADGSEFESPKKKAKVE

SEQ ID NO: 658 - protein, 2168 aa, synthetic construct
MPAAKRVKLDGGDKKYSIGLDIGTNSVGWAVITDEYKVPSKKFKVLGNTDRHSIKKNLIGALLFDSGETAEATRLKRTARRRYTRRKNRICYLQEIFSNEMAKVDDSFFHRLEESFLVEEDKKHERHPIFGNIVDEVAYHEKYPTIYHLRKKLVDSTDKADLRLIYLALAHMIKFRGHFLIEGDLNPDNSDVDKLFIQLVQTYNQLFEENPINASGVDAKAILSARLSKSRRLENLIAQLPGEKKNGLFGNLIALSLGLTPNFKSNFDLAEDAKLQLSKDTYDDDLDNLLAQIGDQYADLFLAAKNLSDAILLSDILRVNTEITKAPLSASMIKRYDEHHQDLTLLKALVRQQLPEKYKEIFFDQSKNGYAGYIDGGASQEEFYKFIKPILEKMDGTEELLVKLNREDLLRKQRTFDNGSIPHQIHLGELHAILRRQEDFYPFLKDNREKIEKILTFRIPYYVGPLARGNSRFAWMTRKSEETITPWNFEEVVDKGASAQSFIERMTNFDKNLPNEKVLPKHSLLYEYFTVYNELTKVKYVTEGMRKPAFLSGEQKKAIVDLLFKTNRKVTVKQLKEDYFKKIECFDSVEISGVEDRFNASLGTYHDLLKIIKDKDFLDNEENEDILEDIVLTLTLFEDREMIEERLKTYAHLFDDKVMKQLKRRRYTGWGRLSRKLINGIRDKQSGKTILDFLKSDGFANRNFMQLIHDDSLTFKEDIQKAQVSGQGDSLHEHIANLAGSPAIKKGILQTVKVVDELVKVMGRHKPENIVIEMARENQTTQKGQKNSRERMKRIEEGIKELGSQILKEHPVENTQLQNEKLYLYYLQNGRDMYVDQELDINRLSDYDVDHIVPQSFLKDDSIDNKVLTRSDKARGKSDNVPSEEVVKKMKNYWRQLLNAKLITQRKFDNLTKAERGGLSELDKAGFIKRQLVETRQITKHVAQILDSRMNTKYDENDKLIREVKVITLKSKLVSDFRKDFQFYKVREINNYHHAHDAYLNAVVGTALIKKYPKLESEFVYGDYKVYDVRKMIAKSEQEIGKATAKYFFYSNIMNFFKTEITLANGEIRKRPLIETNGETGEIVWDKGRDFATVRKVLSMPQVNIVKKTEVQTGGFSKESILPKRNSDKLIARKKDWDPKKYGGFDSPTVAYSVLVVAKVEKGKSKKLKSVKELLGITIMERSSFEKNPIDFLEAKGYKEVKKDLIIKLPKYSLFELENGRKRMLASAGELQKGNELALPSKYVNFLYLASHYEKLKGSPEDNEQKQLFVEQHKHYLDEIIEQISEFSKRVILADANLDKVLSAYNKHRDKPIREQAENIIHLFTLTNLGAPAAFKYFDTTIDRKRYTSTKEVLDATLIHQSITGLYETRIDLSQLGGDGGGGGGGMDPLQLLQPLEAEIKGTKLKAHWNSGATITCVPQAFLEEEVPIKNIWIKTIHGEKEQPVYYLTFKIQGRKVEAEVISSPYDYILVSPSDIPWLMKKPLQLTTLVPLQEYEERLLKQTMLTGSYKEKLQSLFLKYDALWQHWENQVGHRRIKPHHIATGTVNPRPQKQYPINPKAKASIQTVINDLLKQGVLIQQNSIMNTPVYPVPKPDGKWRMVLDYREVNKTIPLIAAQNQHSAGILSSIFRGKYKTTLDLSNGFWAHSITPESYWLTAFTWLGQQYCWTRLPQGFLNSPALFNADVVDLLKEVPNVQVYVDDIYISHDDPREHLEQLEKVFSLLLNAGYVVSLKKSEIAQHEVEFLGFNITKEGRGLTETFKQKLLNITPPRDLKQLQSILGKLNFARNFIPNFSELVKPLYNIIATAPGKYITWTTDNSQQLQNIISMLNSAENLEERNPEVRLIMKVNTSPSAGYIRFYNEFAKRPIMYLNYVYTKAEVKFTNTEKLLTTIHKGLIKALDLGMGQEILVYSPIVSMTKIQKTPLPERKALPIRWITWMSYLEDPRIQFHYDKTLPELQQVPTVTDDIIAKIKHPSEFSMVFYTDGSAIKHPNVNKSHNAGMGIAQVQFKPEFTVINTWSIPLGDHTAQLAEVAAVEFACKKALKIDGPVLIVTDSFYVAESVNKELPYWQSNGFFNNKKKPLKHVSKWKSIADCIQLKPDIIIIHEKGHQPTASTFHTEGNNLADKLATQGSYVVNAGKRTADGSEFEKRTADGSEFESPKKKAKVE

SEQ ID NO: 659 - protein, 2176 aa, synthetic construct
MPAAKRVKLDGGDKKYSIGLDIGTNSVGWAVITDEYKVPSKKFKVLGNTDRHSIKKNLIGALLFDSGETAEATRLKRTARRRYTRRKNRICYLQEIFSNEMAKVDDSFFHRLEESFLVEEDKKHERHPIFGNIVDEVAYHEKYPTIYHLRKKLVDSTDKADLRLIYLALAHMIKFRGHFLIEGDLNPDNSDVDKLFIQLVQTYNQLFEENPINASGVDAKAILSARLSKSRRLENLIAQLPGEKKNGLFGNLIALSLGLTPNFKSNFDLAEDAKLQLSKDTYDDDLDNLLAQIGDQYADLFLAAKNLSDAILLSDILRVNTEITKAPLSASMIKRYDEHHQDLTLLKALVRQQLPEKYKEIFFDQSKNGYAGYIDGGASQEEFYKFIKPILEKMDGTEELLVKLNREDLLRKQRTFDNGSIPHQIHLGELHAILRRQEDFYPFLKDNREKIEKILTFRIPYYVGPLARGNSRFAWMTRKSEETITPWNFEEVVDKGASAQSFIERMTNFDKNLPNEKVLPKHSLLYEYFTVYNELTKVKYVTEGMRKPAFLSGEQKKAIVDLLFKTNRKVTVKQLKEDYFKKIECFDSVEISGVEDRFNASLGTYHDLLKIIKDKDFLDNEENEDILEDIVLTLTLFEDREMIEERLKTYAHLFDDKVMKQLKRRRYTGWGRLSRKLINGIRDKQSGKTILDFLKSDGFANRNFMQLIHDDSLTFKEDIQKAQVSGQGDSLHEHIANLAGSPAIKKGILQTVKVVDELVKVMGRHKPENIVIEMARENQTTQKGQKNSRERMKRIEEGIKELGSQILKEHPVENTQLQNEKLYLYYLQNGRDMYVDQELDINRLSDYDVDHIVPQSFLKDDSIDNKVLTRSDKARGKSDNVPSEEVVKKMKNYWRQLLNAKLITQRKFDNLTKAERGGLSELDKAGFIKRQLVETRQITKHVAQILDSRMNTKYDENDKLIREVKVITLKSKLVSDFRKDFQFYKVREINNYHHAHDAYLNAVVGTALIKKYPKLESEFVYGDYKVYDVRKMIAKSEQEIGKATAKYFFYSNIMNFFKTEITLANGEIRKRPLIETNGETGEIVWDKGRDFATVRKVLSMPQVNIVKKTEVQTGGFSKESILPKRNSDKLIARKKDWDPKKYGGFDSPTVAYSVLVVAKVEKGKSKKLKSVKELLGITIMERSSFEKNPIDFLEAKGYKEVKKDLIIKLPKYSLFELENGRKRMLASAGELQKGNELALPSKYVNFLYLASHYEKLKGSPEDNEQKQLFVEQHKHYLDEIIEQISEFSKRVILADANLDKVLSAYNKHRDKPIREQAENIIHLFTLTNLGAPAAFKYFDTTIDRKRYTSTKEVLDATLIHQSITGLYETRIDLSQLGGDGGGGSGGGEAAAKGGMDPLQLLQPLEAEIKGTKLKAHWNSGATITCVPQAFLEEEVPIKNIWIKTIHGEKEQPVYYLTFKIQGRKVEAEVISSPYDYILVSPSDIPWLMKKPLQLTTLVPLQEYEERLLKQTMLTGSYKEKLQSLFLKYDALWQHWENQVGHRRIKPHHIATGTVNPRPQKQYPINPKAKASIQTVINDLLKQGVLIQQNSIMNTPVYPVPKPDGKWRMVLDYREVNKTIPLIAAQNQHSAGILSSIFRGKYKTTLDLSNGFWAHSITPESYWLTAFTWLGQQYCWTRLPQGFLNSPALFNADVVDLLKEVPNVQVYVDDIYISHDDPREHLEQLEKVFSLLLNAGYVVSLKKSEIAQHEVEFLGFNITKEGRGLTETFKQKLLNITPPRDLKQLQSILGKLNFARNFIPNFSELVKPLYNIIATAPGKYITWTTDNSQQLQNIISMLNSAENLEERNPEVRLIMKVNTSPSAGYIRFYNEFAKRPIMYLNYVYTKAEVKFTNTEKLLTTIHKGLIKALDLGMGQEILVYSPIVSMTKIQKTPLPERKALPIRWITWMSYLEDPRIQFHYDKTLPELQQVPTVTDDIIAKIKHPSEFSMVFYTDGSAIKHPNVNKSHNAGMGIAQVQFKPEFTVINTWSIPLGDHTAQLAEVAAVEFACKKALKIDGPVLIVTDSFYVAESVNKELPYWQSNGFFNNKKKPLKHVSKWKSIADCIQLKPDIIIIHEKGHQPTASTFHTEGNNLADKLATQGSYVVNAGKRTADGSEFEKRTADGSEFESPKKKAKVE

SEQ ID NO: 660 - protein, 2180 aa, synthetic construct
MPAAKRVKLDGGDKKYSIGLDIGTNSVGWAVITDEYKVPSKKFKVLGNTDRHSIKKNLIGALLFDSGETAEATRLKRTARRRYTRRKNRICYLQEIFSNEMAKVDDSFFHRLEESFLVEEDKKHERHPIFGNIVDEVAYHEKYPTIYHLRKKLVDSTDKADLRLIYLALAHMIKFRGHFLIEGDLNPDNSDVDKLFIQLVQTYNQLFEENPINASGVDAKAILSARLSKSRRLENLIAQLPGEKKNGLFGNLIALSLGLTPNFKSNFDLAEDAKLQLSKDTYDDDLDNLLAQIGDQYADLFLAAKNLSDAILLSDILRVNTEITKAPLSASMIKRYDEHHQDLTLLKALVRQQLPEKYKEIFFDQSKNGYAGYIDGGASQEEFYKFIKPILEKMDGTEELLVKLNREDLLRKQRTFDNGSIPHQIHLGELHAILRRQEDFYPFLKDNREKIEKILTFRIPYYVGPLARGNSRFAWMTRKSEETITPWNFEEVVDKGASAQSFIERMTNFDKNLPNEKVLPKHSLLYEYFTVYNELTKVKYVTEGMRKPAFLSGEQKKAIVDLLFKTNRKVTVKQLKEDYFKKIECFDSVEISGVEDRFNASLGTYHDLLKIIKDKDFLDNEENEDILEDIVLTLTLFEDREMIEERLKTYAHLFDDKVMKQLKRRRYTGWGRLSRKLINGIRDKQSGKTILDFLKSDGFANRNFMQLIHDDSLTFKEDIQKAQVSGQGDSLHEHIANLAGSPAIKKGILQTVKVVDELVKVMGRHKPENIVIEMARENQTTQKGQKNSRERMKRIEEGIKELGSQILKEHPVENTQLQNEKLYLYYLQNGRDMYVDQELDINRLSDYDVDHIVPQSFLKDDSIDNKVLTRSDKARGKSDNVPSEEVVKKMKNYWRQLLNAKLITQRKFDNLTKAERGGLSELDKAGFIKRQLVETRQITKHVAQILDSRMNTKYDENDKLIREVKVITLKSKLVSDFRKDFQFYKVREINNYHHAHDAYLNAVVGTALIKKYPKLESEFVYGDYKVYDVRKMIAKSEQEIGKATAKYFFYSNIMNFFKTEITLANGEIRKRPLIETNGETGEIVWDKGRDFATVRKVLSMPQVNIVKKTEVQTGGFSKESILPKRNSDKLIARKKDWDPKKYGGFDSPTVAYSVLVVAKVEKGKSKKLKSVKELLGITIMERSSFEKNPIDFLEAKGYKEVKKDLIIKLPKYSLFELENGRKRMLASAGELQKGNELALPSKYVNFLYLASHYEKLKGSPEDNEQKQLFVEQHKHYLDEIIEQISEFSKRVILADANLDKVLSAYNKHRDKPIREQAENIIHLFTLTNLGAPAAFKYFDTTIDRKRYTSTKEVLDATLIHQSITGLYETRIDLSQLGGDGGEAAAKGGGGSEAAAKGGMDPLQLLQPLEAEIKGTKLKAHWNSGATITCVPQAFLEEEVPIKNIWIKTIHGEKEQPVYYLTFKIQGRKVEAEVISSPYDYILVSPSDIPWLMKKPLQLTTLVPLQEYEERLLKQTMLTGSYKEKLQSLFLKYDALWQHWENQVGHRRIKPHHIATGTVNPRPQKQYPINPKAKASIQTVINDLLKQGVLIQQNSIMNTPVYPVPKPDGKWRMVLDYREVNKTIPLIAAQNQHSAGILSSIFRGKYKTTLDLSNGFWAHSITPESYWLTAFTWLGQQYCWTRLPQGFLNSPALFNADVVDLLKEVPNVQVYVDDIYISHDDPREHLEQLEKVFSLLLNAGYVVSLKKSEIAQHEVEFLGFNITKEGRGLTETFKQKLLNITPPRDLKQLQSILGKLNFARNFIPNFSELVKPLYNIIATAPGKYITWTTDNSQQLQNIISMLNSAENLEERNPEVRLIMKVNTSPSAGYIRFYNEFAKRPIMYLNYVYTKAEVKFTNTEKLLTTIHKGLIKALDLGMGQEILVYSPIVSMTKIQKTPLPERKALPIRWITWMSYLEDPRIQFHYDKTLPELQQVPTVTDDIIAKIKHPSEFSMVFYTDGSAIKHPNVNKSHNAGMGIAQVQFKPEFTVINTWSIPLGDHTAQLAEVAAVEFACKKALKIDGPVLIVTDSFYVAESVNKELPYWQSNGFFNNKKKPLKHVSKWKSIADCIQLKPDIIIIHEKGHQPTASTFHTEGNNLADKLATQGSYVVNAGKRTADGSEFEKRTADGSEFESPKKKAKVE

SEQ ID NO: 661 - protein, 2176 aa, synthetic construct
MPAAKRVKLDGGDKKYSIGLDIGTNSVGWAVITDEYKVPSKKFKVLGNTDRHSIKKNLIGALLFDSGETAEATRLKRTARRRYTRRKNRICYLQEIFSNEMAKVDDSFFHRLEESFLVEEDKKHERHPIFGNIVDEVAYHEKYPTIYHLRKKLVDSTDKADLRLIYLALAHMIKFRGHFLIEGDLNPDNSDVDKLFIQLVQTYNQLFEENPINASGVDAKAILSARLSKSRRLENLIAQLPGEKKNGLFGNLIALSLGLTPNFKSNFDLAEDAKLQLSKDTYDDDLDNLLAQIGDQYADLFLAAKNLSDAILLSDILRVNTEITKAPLSASMIKRYDEHHQDLTLLKALVRQQLPEKYKEIFFDQSKNGYAGYIDGGASQEEFYKFIKPILEKMDGTEELLVKLNREDLLRKQRTFDNGSIPHQIHLGELHAILRRQEDFYPFLKDNREKIEKILTFRIPYYVGPLARGNSRFAWMTRKSEETITPWNFEEVVDKGASAQSFIERMTNFDKNLPNEKVLPKHSLLYEYFTVYNELTKVKYVTEGMRKPAFLSGEQKKAIVDLLFKTNRKVTVKQLKEDYFKKIECFDSVEISGVEDRFNASLGTYHDLLKIIKDKDFLDNEENEDILEDIVLTLTLFEDREMIEERLKTYAHLFDDKVMKQLKRRRYTGWGRLSRKLINGIRDKQSGKTILDFLKSDGFANRNFMQLIHDDSLTFKEDIQKAQVSGQGDSLHEHIANLAGSPAIKKGILQTVKVVDELVKVMGRHKPENIVIEMARENQTTQKGQKNSRERMKRIEEGIKELGSQILKEHPVENTQLQNEKLYLYYLQNGRDMYVDQELDINRLSDYDVDHIVPQSFLKDDSIDNKVLTRSDKARGKSDNVPSEEVVKKMKNYWRQLLNAKLITQRKFDNLTKAERGGLSELDKAGFIKRQLVETRQITKHVAQILDSRMNTKYDENDKLIREVKVITLKSKLVSDFRKDFQFYKVREINNYHHAHDAYLNAVVGTALIKKYPKLESEFVYGDYKVYDVRKMIAKSEQEIGKATAKYFFYSNIMNFFKTEITLANGEIRKRPLIETNGETGEIVWDKGRDFATVRKVLSMPQVNIVKKTEVQTGGFSKESILPKRNSDKLIARKKDWDPKKYGGFDSPTVAYSVLVVAKVEKGKSKKLKSVKELLGITIMERSSFEKNPIDFLEAKGYKEVKKDLIIKLPKYSLFELENGRKRMLASAGELQKGNELALPSKYVNFLYLASHYEKLKGSPEDNEQKQLFVEQHKHYLDEIIEQISEFSKRVILADANLDKVLSAYNKHRDKPIREQAENIIHLFTLTNLGAPAAFKYFDTTIDRKRYTSTKEVLDATLIHQSITGLYETRIDLSQLGGDGGGGSEAAAKGGGGGMDPLQLLQPLEAEIKGTKLKAHWNSGATITCVPQAFLEEEVPIKNIWIKTIHGEKEQPVYYLTFKIQGRKVEAEVISSPYDYILVSPSDIPWLMKKPLQLTTLVPLQEYEERLLKQTMLTGSYKEKLQSLFLKYDALWQHWENQVGHRRIKPHHIATGTVNPRPQKQYPINPKAKASIQTVINDLLKQGVLIQQNSIMNTPVYPVPKPDGKWRMVLDYREVNKTIPLIAAQNQHSAGILSSIFRGKYKTTLDLSNGFWAHSITPESYWLTAFTWLGQQYCWTRLPQGFLNSPALFNADVVDLLKEVPNVQVYVDDIYISHDDPREHLEQLEKVFSLLLNAGYVVSLKKSEIAQHEVEFLGFNITKEGRGLTETFKQKLLNITPPRDLKQLQSILGKLNFARNFIPNFSELVKPLYNIIATAPGKYITWTTDNSQQLQNIISMLNSAENLEERNPEVRLIMKVNTSPSAGYIRFYNEFAKRPIMYLNYVYTKAEVKFTNTEKLLTTIHKGLIKALDLGMGQEILVYSPIVSMTKIQKTPLPERKALPIRWITWMSYLEDPRIQFHYDKTLPELQQVPTVTDDIIAKIKHPSEFSMVFYTDGSAIKHPNVNKSHNAGMGIAQVQFKPEFTVINTWSIPLGDHTAQLAEVAAVEFACKKALKIDGPVLIVTDSFYVAESVNKELPYWQSNGFFNNKKKPLKHVSKWKSIADCIQLKPDIIIIHEKGHQPTASTFHTEGNNLADKLATQGSYVVNAGKRTADGSEFEKRTADGSEFESPKKKAKVE

SEQ ID NO: 662 - protein, 2183 aa, synthetic construct
MPAAKRVKLDGGDKKYSIGLDIGTNSVGWAVITDEYKVPSKKFKVLGNTDRHSIKKNLIGALLFDSGETAEATRLKRTARRRYTRRKNRICYLQEIFSNEMAKVDDSFFHRLEESFLVEEDKKHERHPIFGNIVDEVAYHEKYPTIYHLRKKLVDSTDKADLRLIYLALAHMIKFRGHFLIEGDLNPDNSDVDKLFIQLVQTYNQLFEENPINASGVDAKAILSARLSKSRRLENLIAQLPGEKKNGLFGNLIALSLGLTPNFKSNFDLAEDAKLQLSKDTYDDDLDNLLAQIGDQYADLFLAAKNLSDAILLSDILRVNTEITKAPLSASMIKRYDEHHQDLTLLKALVRQQLPEKYKEIFFDQSKNGYAGYIDGGASQEEFYKFIKPILEKMDGTEELLVKLNREDLLRKQRTFDNGSIPHQIHLGELHAILRRQEDFYPFLKDNREKIEKILTFRIPYYVGPLARGNSRFAWMTRKSEETITPWNFEEVVDKGASAQSFIERMTNFDKNLPNEKVLPKHSLLYEYFTVYNELTKVKYVTEGMRKPAFLSGEQKKAIVDLLFKTNRKVTVKQLKEDYFKKIECFDSVEISGVEDRFNASLGTYHDLLKIIKDKDFLDNEENEDILEDIVLTLTLFEDREMIEERLKTYAHLFDDKVMKQLKRRRYTGWGRLSRKLINGIRDKQSGKTILDFLKSDGFANRNFMQLIHDDSLTFKEDIQKAQVSGQGDSLHEHIANLAGSPAIKKGILQTVKVVDELVKVMGRHKPENIVIEMARENQTTQKGQKNSRERMKRIEEGIKELGSQILKEHPVENTQLQNEKLYLYYLQNGRDMYVDQELDINRLSDYDVDHIVPQSFLKDDSIDNKVLTRSDKARGKSDNVPSEEVVKKMKNYWRQLLNAKLITQRKFDNLTKAERGGLSELDKAGFIKRQLVETRQITKHVAQILDSRMNTKYDENDKLIREVKVITLKSKLVSDFRKDFQFYKVREINNYHHAHDAYLNAVVGTALIKKYPKLESEFVYGDYKVYDVRKMIAKSEQEIGKATAKYFFYSNIMNFFKTEITLANGEIRKRPLIETNGETGEIVWDKGRDFATVRKVLSMPQVNIVKKTEVQTGGFSKESILPKRNSDKLIARKKDWDPKKYGGFDSPTVAYSVLVVAKVEKGKSKKLKSVKELLGITIMERSSFEKNPIDFLEAKGYKEVKKDLIIKLPKYSLFELENGRKRMLASAGELQKGNELALPSKYVNFLYLASHYEKLKGSPEDNEQKQLFVEQHKHYLDEIIEQISEFSKRVILADANLDKVLSAYNKHRDKPIREQAENIIHLFTLTNLGAPAAFKYFDTTIDRKRYTSTKEVLDATLIHQSITGLYETRIDLSQLGGDGGGSSGSSGSSGSSGSSGSSGGMDPLQLLQPLEAEIKGTKLKAHWNSGATITCVPQAFLEEEVPIKNIWIKTIHGEKEQPVYYLTFKIQGRKVEAEVISSPYDYILVSPSDIPWLMKKPLQLTTLVPLQEYEERLLKQTMLTGSYKEKLQSLFLKYDALWQHWENQVGHRRIKPHHIATGTVNPRPQKQYPINPKAKASIQTVINDLLKQGVLIQQNSIMNTPVYPVPKPDGKWRMVLDYREVNKTIPLIAAQNQHSAGILSSIFRGKYKTTLDLSNGFWAHSITPESYWLTAFTWLGQQYCWTRLPQGFLNSPALFNADVVDLLKEVPNVQVYVDDIYISHDDPREHLEQLEKVFSLLLNAGYVVSLKKSEIAQHEVEFLGFNITKEGRGLTETFKQKLLNITPPRDLKQLQSILGKLNFARNFIPNFSELVKPLYNIIATAPGKYITWTTDNSQQLQNIISMLNSAENLEERNPEVRLIMKVNTSPSAGYIRFYNEFAKRPIMYLNYVYTKAEVKFTNTEKLLTTIHKGLIKALDLGMGQEILVYSPIVSMTKIQKTPLPERKALPIRWITWMSYLEDPRIQFHYDKTLPELQQVPTVTDDIIAKIKHPSEFSMVFYTDGSAIKHPNVNKSHNAGMGIAQVQFKPEFTVINTWSIPLGDHTAQLAEVAAVEFACKKALKIDGPVLIVTDSFYVAESVNKELPYWQSNGFFNNKKKPLKHVSKWKSIADCIQLKPDIIIIHEKGHQPTASTFHTEGNNLADKLATQGSYVVNAGKRTADGSEFEKRTADGSEFESPKKKAKVE

SEQ ID NO: 663 - protein, 2176 aa, synthetic construct
MPAAKRVKLDGGDKKYSIGLDIGTNSVGWAVITDEYKVPSKKFKVLGNTDRHSIKKNLIGALLFDSGETAEATRLKRTARRRYTRRKNRICYLQEIFSNEMAKVDDSFFHRLEESFLVEEDKKHERHPIFGNIVDEVAYHEKYPTIYHLRKKLVDSTDKADLRLIYLALAHMIKFRGHFLIEGDLNPDNSDVDKLFIQLVQTYNQLFEENPINASGVDAKAILSARLSKSRRLENLIAQLPGEKKNGLFGNLIALSLGLTPNFKSNFDLAEDAKLQLSKDTYDDDLDNLLAQIGDQYADLFLAAKNLSDAILLSDILRVNTEITKAPLSASMIKRYDEHHQDLTLLKALVRQQLPEKYKEIFFDQSKNGYAGYIDGGASQEEFYKFIKPILEKMDGTEELLVKLNREDLLRKQRTFDNGSIPHQIHLGELHAILRRQEDFYPFLKDNREKIEKILTFRIPYYVGPLARGNSRFAWMTRKSEETITPWNFEEVVDKGASAQSFIERMTNFDKNLPNEKVLPKHSLLYEYFTVYNELTKVKYVTEGMRKPAFLSGEQKKAIVDLLFKTNRKVTVKQLKEDYFKKIECFDSVEISGVEDRFNASLGTYHDLLKIIKDKDFLDNEENEDILEDIVLTLTLFEDREMIEERLKTYAHLFDDKVMKQLKRRRYTGWGRLSRKLINGIRDKQSGKTILDFLKSDGFANRNFMQLIHDDSLTFKEDIQKAQVSGQGDSLHEHIANLAGSPAIKKGILQTVKVVDELVKVMGRHKPENIVIEMARENQTTQKGQKNSRERMKRIEEGIKELGSQILKEHPVENTQLQNEKLYLYYLQNGRDMYVDQELDINRLSDYDVDHIVPQSFLKDDSIDNKVLTRSDKARGKSDNVPSEEVVKKMKNYWRQLLNAKLITQRKFDNLTKAERGGLSELDKAGFIKRQLVETRQITKHVAQILDSRMNTKYDENDKLIREVKVITLKSKLVSDFRKDFQFYKVREINNYHHAHDAYLNAVVGTALIKKYPKLESEFVYGDYKVYDVRKMIAKSEQEIGKATAKYFFYSNIMNFFKTEITLANGEIRKRPLIETNGETGEIVWDKGRDFATVRKVLSMPQVNIVKKTEVQTGGFSKESILPKRNSDKLIARKKDWDPKKYGGFDSPTVAYSVLVVAKVEKGKSKKLKSVKELLGITIMERSSFEKNPIDFLEAKGYKEVKKDLIIKLPKYSLFELENGRKRMLASAGELQKGNELALPSKYVNFLYLASHYEKLKGSPEDNEQKQLFVEQHKHYLDEIIEQISEFSKRVILADANLDKVLSAYNKHRDKPIREQAENIIHLFTLTNLGAPAAFKYFDTTIDRKRYTSTKEVLDATLIHQSITGLYETRIDLSQLGGDGGGGGPAPEAAAKGGMDPLQLLQPLEAEIKGTKLKAHWNSGATITCVPQAFLEEEVPIKNIWIKTIHGEKEQPVYYLTFKIQGRKVEAEVISSPYDYILVSPSDIPWLMKKPLQLTTLVPLQEYEERLLKQTMLTGSYKEKLQSLFLKYDALWQHWENQVGHRRIKPHHIATGTVNPRPQKQYPINPKAKASIQTVINDLLKQGVLIQQNSIMNTPVYPVPKPDGKWRMVLDYREVNKTIPLIAAQNQHSAGILSSIFRGKYKTTLDLSNGFWAHSITPESYWLTAFTWLGQQYCWTRLPQGFLNSPALFNADVVDLLKEVPNVQVYVDDIYISHDDPREHLEQLEKVFSLLLNAGYVVSLKKSEIAQHEVEFLGFNITKEGRGLTETFKQKLLNITPPRDLKQLQSILGKLNFARNFIPNFSELVKPLYNIIATAPGKYITWTTDNSQQLQNIISMLNSAENLEERNPEVRLIMKVNTSPSAGYIRFYNEFAKRPIMYLNYVYTKAEVKFTNTEKLLTTIHKGLIKALDLGMGQEILVYSPIVSMTKIQKTPLPERKALPIRWITWMSYLEDPRIQFHYDKTLPELQQVPTVTDDIIAKIKHPSEFSMVFYTDGSAIKHPNVNKSHNAGMGIAQVQFKPEFTVINTWSIPLGDHTAQLAEVAAVEFACKKALKIDGPVLIVTDSFYVAESVNKELPYWQSNGFFNNKKKPLKHVSKWKSIADCIQLKPDIIIIHEKGHQPTASTFHTEGNNLADKLATQGSYVVNAGKRTADGSEFEKRTADGSEFESPKKKAKVE

SEQ ID NO: 664 - protein, 2176 aa, synthetic construct
MPAAKRVKLDGGDKKYSIGLDIGTNSVGWAVITDEYKVPSKKFKVLGNTDRHSIKKNLIGALLFDSGETAEATRLKRTARRRYTRRKNRICYLQEIFSNEMAKVDDSFFHRLEESFLVEEDKKHERHPIFGNIVDEVAYHEKYPTIYHLRKKLVDSTDKADLRLIYLALAHMIKFRGHFLIEGDLNPDNSDVDKLFIQLVQTYNQLFEENPINASGVDAKAILSARLSKSRRLENLIAQLPGEKKNGLFGNLIALSLGLTPNFKSNFDLAEDAKLQLSKDTYDDDLDNLLAQIGDQYADLFLAAKNLSDAILLSDILRVNTEITKAPLSASMIKRYDEHHQDLTLLKALVRQQLPEKYKEIFFDQSKNGYAGYIDGGASQEEFYKFIKPILEKMDGTEELLVKLNREDLLRKQRTFDNGSIPHQIHLGELHAILRRQEDFYPFLKDNREKIEKILTFRIPYYVGPLARGNSRFAWMTRKSEETITPWNFEEVVDKGASAQSFIERMTNFDKNLPNEKVLPKHSLLYEYFTVYNELTKVKYVTEGMRKPAFLSGEQKKAIVDLLFKTNRKVTVKQLKEDYFKKIECFDSVEISGVEDRFNASLGTYHDLLKIIKDKDFLDNEENEDILEDIVLTLTLFEDREMIEERLKTYAHLFDDKVMKQLKRRRYTGWGRLSRKLINGIRDKQSGKTILDFLKSDGFANRNFMQLIHDDSLTFKEDIQKAQVSGQGDSLHEHIANLAGSPAIKKGILQTVKVVDELVKVMGRHKPENIVIEMARENQTTQKGQKNSRERMKRIEEGIKELGSQILKEHPVENTQLQNEKLYLYYLQNGRDMYVDQELDINRLSDYDVDHIVPQSFLKDDSIDNKVLTRSDKARGKSDNVPSEEVVKKMKNYWRQLLNAKLITQRKFDNLTKAERGGLSELDKAGFIKRQLVETRQITKHVAQILDSRMNTKYDENDKLIREVKVITLKSKLVSDFRKDFQFYKVREINNYHHAHDAYLNAVVGTALIKKYPKLESEFVYGDYKVYDVRKMIAKSEQEIGKATAKYFFYSNIMNFFKTEITLANGEIRKRPLIETNGETGEIVWDKGRDFATVRKVLSMPQVNIVKKTEVQTGGFSKESILPKRNSDKLIARKKDWDPKKYGGFDSPTVAYSVLVVAKVEKGKSKKLKSVKELLGITIMERSSFEKNPIDFLEAKGYKEVKKDLIIKLPKYSLFELENGRKRMLASAGELQKGNELALPSKYVNFLYLASHYEKLKGSPEDNEQKQLFVEQHKHYLDEIIEQISEFSKRVILADANLDKVLSAYNKHRDKPIREQAENIIHLFTLTNLGAPAAFKYFDTTIDRKRYTSTKEVLDATLIHQSITGLYETRIDLSQLGGDGGEAAAKPAPGGGGGMDPLQLLQPLEAEIKGTKLKAHWNSGATITCVPQAFLEEEVPIKNIWIKTIHGEKEQPVYYLTFKIQGRKVEAEVISSPYDYILVSPSDIPWLMKKPLQLTTLVPLQEYEERLLKQTMLTGSYKEKLQSLFLKYDALWQHWENQVGHRRIKPHHIATGTVNPRPQKQYPINPKAKASIQTVINDLLKQGVLIQQNSIMNTPVYPVPKPDGKWRMVLDYREVNKTIPLIAAQNQHSAGILSSIFRGKYKTTLDLSNGFWAHSITPESYWLTAFTWLGQQYCWTRLPQGFLNSPALFNADVVDLLKEVPNVQVYVDDIYISHDDPREHLEQLEKVFSLLLNAGYVVSLKKSEIAQHEVEFLGFNITKEGRGLTETFKQKLLNITPPRDLKQLQSILGKLNFARNFIPNFSELVKPLYNIIATAPGKYITWTTDNSQQLQNIISMLNSAENLEERNPEVRLIMKVNTSPSAGYIRFYNEFAKRPIMYLNYVYTKAEVKFTNTEKLLTTIHKGLIKALDLGMGQEILVYSPIVSMTKIQKTPLPERKALPIRWITWMSYLEDPRIQFHYDKTLPELQQVPTVTDDIIAKIKHPSEFSMVFYTDGSAIKHPNVNKSHNAGMGIAQVQFKPEFTVINTWSIPLGDHTAQLAEVAAVEFACKKALKIDGPVLIVTDSFYVAESVNKELPYWQSNGFFNNKKKPLKHVSKWKSIADCIQLKPDIIIIHEKGHQPTASTFHTEGNNLADKLATQGSYVVNAGKRTADGSEFEKRTADGSEFESPKKKAKVE

SEQ ID NO: 665 - protein, 2176 aa, synthetic construct
MPAAKRVKLDGGDKKYSIGLDIGTNSVGWAVITDEYKVPSKKFKVLGNTDRHSIKKNLIGALLFDSGETAEATRLKRTARRRYTRRKNRICYLQEIFSNEMAKVDDSFFHRLEESFLVEEDKKHERHPIFGNIVDEVAYHEKYPTIYHLRKKLVDSTDKADLRLIYLALAHMIKFRGHFLIEGDLNPDNSDVDKLFIQLVQTYNQLFEENPINASGVDAKAILSARLSKSRRLENLIAQLPGEKKNGLFGNLIALSLGLTPNFKSNFDLAEDAKLQLSKDTYDDDLDNLLAQIGDQYADLFLAAKNLSDAILLSDILRVNTEITKAPLSASMIKRYDEHHQDLTLLKALVRQQLPEKYKEIFFDQSKNGYAGYIDGGASQEEFYKFIKPILEKMDGTEELLVKLNREDLLRKQRTFDNGSIPHQIHLGELHAILRRQEDFYPFLKDNREKIEKILTFRIPYYVGPLARGNSRFAWMTRKSEETITPWNFEEVVDKGASAQSFIERMTNFDKNLPNEKVLPKHSLLYEYFTVYNELTKVKYVTEGMRKPAFLSGEQKKAIVDLLFKTNRKVTVKQLKEDYFKKIECFDSVEISGVEDRFNASLGTYHDLLKIIKDKDFLDNEENEDILEDIVLTLTLFEDREMIEERLKTYAHLFDDKVMKQLKRRRYTGWGRLSRKLINGIRDKQSGKTILDFLKSDGFANRNFMQLIHDDSLTFKEDIQKAQVSGQGDSLHEHIANLAGSPAIKKGILQTVKVVDELVKVMGRHKPENIVIEMARENQTTQKGQKNSRERMKRIEEGIKELGSQILKEHPVENTQLQNEKLYLYYLQNGRDMYVDQELDINRLSDYDVDHIVPQSFLKDDSIDNKVLTRSDKARGKSDNVPSEEVVKKMKNYWRQLLNAKLITQRKFDNLTKAERGGLSELDKAGFIKRQLVETRQITKHVAQILDSRMNTKYDENDKLIREVKVITLKSKLVSDFRKDFQFYKVREINNYHHAHDAYLNAVVGTALIKKYPKLESEFVYGDYKVYDVRKMIAKSEQEIGKATAKYFFYSNIMNFFKTEITLANGEIRKRPLIETNGETGEIVWDKGRDFATVRKVLSMPQVNIVKKTEVQTGGFSKESILPKRNSDKLIARKKDWDPKKYGGFDSPTVAYSVLVVAKVEKGKSKKLKSVKELLGITIMERSSFEKNPIDFLEAKGYKEVKKDLIIKLPKYSLFELENGRKRMLASAGELQKGNELALPSKYVNFLYLASHYEKLKGSPEDNEQKQLFVEQHKHYLDEIIEQISEFSKRVILADANLDKVLSAYNKHRDKPIREQAENIIHLFTLTNLGAPAAFKYFDTTIDRKRYTSTKEVLDATLIHQSITGLYETRIDLSQLGGDGGEAAAKGGSGSSGGMDPLQLLQPLEAEIKGTKLKAHWNSGATITCVPQAFLEEEVPIKNIWIKTIHGEKEQPVYYLTFKIQGRKVEAEVISSPYDYILVSPSDIPWLMKKPLQLTTLVPLQEYEERLLKQTMLTGSYKEKLQSLFLKYDALWQHWENQVGHRRIKPHHIATGTVNPRPQKQYPINPKAKASIQTVINDLLKQGVLIQQNSIMNTPVYPVPKPDGKWRMVLDYREVNKTIPLIAAQNQHSAGILSSIFRGKYKTTLDLSNGFWAHSITPESYWLTAFTWLGQQYCWTRLPQGFLNSPALFNADVVDLLKEVPNVQVYVDDIYISHDDPREHLEQLEKVFSLLLNAGYVVSLKKSEIAQHEVEFLGFNITKEGRGLTETFKQKLLNITPPRDLKQLQSILGKLNFARNFIPNFSELVKPLYNIIATAPGKYITWTTDNSQQLQNIISMLNSAENLEERNPEVRLIMKVNTSPSAGYIRFYNEFAKRPIMYLNYVYTKAEVKFTNTEKLLTTIHKGLIKALDLGMGQEILVYSPIVSMTKIQKTPLPERKALPIRWITWMSYLEDPRIQFHYDKTLPELQQVPTVTDDIIAKIKHPSEFSMVFYTDGSAIKHPNVNKSHNAGMGIAQVQFKPEFTVINTWSIPLGDHTAQLAEVAAVEFACKKALKIDGPVLIVTDSFYVAESVNKELPYWQSNGFFNNKKKPLKHVSKWKSIADCIQLKPDIIIIHEKGHQPTASTFHTEGNNLADKLATQGSYVVNAGKRTADGSEFEKRTADGSEFESPKKKAKVE

SEQ ID NO: 666 - protein, 2174 aa, synthetic construct
MPAAKRVKLDGGDKKYSIGLDIGTNSVGWAVITDEYKVPSKKFKVLGNTDRHSIKKNLIGALLFDSGETAEATRLKRTARRRYTRRKNRICYLQEIFSNEMAKVDDSFFHRLEESFLVEEDKKHERHPIFGNIVDEVAYHEKYPTIYHLRKKLVDSTDKADLRLIYLALAHMIKFRGHFLIEGDLNPDNSDVDKLFIQLVQTYNQLFEENPINASGVDAKAILSARLSKSRRLENLIAQLPGEKKNGLFGNLIALSLGLTPNFKSNFDLAEDAKLQLSKDTYDDDLDNLLAQIGDQYADLFLAAKNLSDAILLSDILRVNTEITKAPLSASMIKRYDEHHQDLTLLKALVRQQLPEKYKEIFFDQSKNGYAGYIDGGASQEEFYKFIKPILEKMDGTEELLVKLNREDLLRKQRTFDNGSIPHQIHLGELHAILRRQEDFYPFLKDNREKIEKILTFRIPYYVGPLARGNSRFAWMTRKSEETITPWNFEEVVDKGASAQSFIERMTNFDKNLPNEKVLPKHSLLYEYFTVYNELTKVKYVTEGMRKPAFLSGEQKKAIVDLLFKTNRKVTVKQLKEDYFKKIECFDSVEISGVEDRFNASLGTYHDLLKIIKDKDFLDNEENEDILEDIVLTLTLFEDREMIEERLKTYAHLFDDKVMKQLKRRRYTGWGRLSRKLINGIRDKQSGKTILDFLKSDGFANRNFMQLIHDDSLTFKEDIQKAQVSGQGDSLHEHIANLAGSPAIKKGILQTVKVVDELVKVMGRHKPENIVIEMARENQTTQKGQKNSRERMKRIEEGIKELGSQILKEHPVENTQLQNEKLYLYYLQNGRDMYVDQELDINRLSDYDVDHIVPQSFLKDDSIDNKVLTRSDKARGKSDNVPSEEVVKKMKNYWRQLLNAKLITQRKFDNLTKAERGGLSELDKAGFIKRQLVETRQITKHVAQILDSRMNTKYDENDKLIREVKVITLKSKLVSDFRKDFQFYKVREINNYHHAHDAYLNAVVGTALIKKYPKLESEFVYGDYKVYDVRKMIAKSEQEIGKATAKYFFYSNIMNFFKTEITLANGEIRKRPLIETNGETGEIVWDKGRDFATVRKVLSMPQVNIVKKTEVQTGGFSKESILPKRNSDKLIARKKDWDPKKYGGFDSPTVAYSVLVVAKVEKGKSKKLKSVKELLGITIMERSSFEKNPIDFLEAKGYKEVKKDLIIKLPKYSLFELENGRKRMLASAGELQKGNELALPSKYVNFLYLASHYEKLKGSPEDNEQKQLFVEQHKHYLDEIIEQISEFSKRVILADANLDKVLSAYNKHRDKPIREQAENIIHLFTLTNLGAPAAFKYFDTTIDRKRYTSTKEVLDATLIHQSITGLYETRIDLSQLGGDGGPAPAPAPAPGGMDPLQLLQPLEAEIKGTKLKAHWNSGATITCVPQAFLEEEVPIKNIWIKTIHGEKEQPVYYLTFKIQGRKVEAEVISSPYDYILVSPSDIPWLMKKPLQLTTLVPLQEYEERLLKQTMLTGSYKEKLQSLFLKYDALWQHWENQVGHRRIKPHHIATGTVNPRPQKQYPINPKAKASIQTVINDLLKQGVLIQQNSIMNTPVYPVPKPDGKWRMVLDYREVNKTIPLIAAQNQHSAGILSSIFRGKYKTTLDLSNGFWAHSITPESYWLTAFTWLGQQYCWTRLPQGFLNSPALFNADVVDLLKEVPNVQVYVDDIYISHDDPREHLEQLEKVFSLLLNAGYVVSLKKSEIAQHEVEFLGFNITKEGRGLTETFKQKLLNITPPRDLKQLQSILGKLNFARNFIPNFSELVKPLYNIIATAPGKYITWTTDNSQQLQNIISMLNSAENLEERNPEVRLIMKVNTSPSAGYIRFYNEFAKRPIMYLNYVYTKAEVKFTNTEKLLTTIHKGLIKALDLGMGQEILVYSPIVSMTKIQKTPLPERKALPIRWITWMSYLEDPRIQFHYDKTLPELQQVPTVTDDIIAKIKHPSEFSMVFYTDGSAIKHPNVNKSHNAGMGIAQVQFKPEFTVINTWSIPLGDHTAQLAEVAAVEFACKKALKIDGPVLIVTDSFYVAESVNKELPYWQSNGFFNNKKKPLKHVSKWKSIADCIQLKPDIIIIHEKGHQPTASTFHTEGNNLADKLATQGSYVVNAGKRTADGSEFEKRTADGSEFESPKKKAKVE

SEQ ID NO: 667 - protein, 2176 aa, synthetic construct
MPAAKRVKLDGGDKKYSIGLDIGTNSVGWAVITDEYKVPSKKFKVLGNTDRHSIKKNLIGALLFDSGETAEATRLKRTARRRYTRRKNRICYLQEIFSNEMAKVDDSFFHRLEESFLVEEDKKHERHPIFGNIVDEVAYHEKYPTIYHLRKKLVDSTDKADLRLIYLALAHMIKFRGHFLIEGDLNPDNSDVDKLFIQLVQTYNQLFEENPINASGVDAKAILSARLSKSRRLENLIAQLPGEKKNGLFGNLIALSLGLTPNFKSNFDLAEDAKLQLSKDTYDDDLDNLLAQIGDQYADLFLAAKNLSDAILLSDILRVNTEITKAPLSASMIKRYDEHHQDLTLLKALVRQQLPEKYKEIFFDQSKNGYAGYIDGGASQEEFYKFIKPILEKMDGTEELLVKLNREDLLRKQRTFDNGSIPHQIHLGELHAILRRQEDFYPFLKDNREKIEKILTFRIPYYVGPLARGNSRFAWMTRKSEETITPWNFEEVVDKGASAQSFIERMTNFDKNLPNEKVLPKHSLLYEYFTVYNELTKVKYVTEGMRKPAFLSGEQKKAIVDLLFKTNRKVTVKQLKEDYFKKIECFDSVEISGVEDRFNASLGTYHDLLKIIKDKDFLDNEENEDILEDIVLTLTLFEDREMIEERLKTYAHLFDDKVMKQLKRRRYTGWGRLSRKLINGIRDKQSGKTILDFLKSDGFANRNFMQLIHDDSLTFKEDIQKAQVSGQGDSLHEHIANLAGSPAIKKGILQTVKVVDELVKVMGRHKPENIVIEMARENQTTQKGQKNSRERMKRIEEGIKELGSQILKEHPVENTQLQNEKLYLYYLQNGRDMYVDQELDINRLSDYDVDHIVPQSFLKDDSIDNKVLTRSDKARGKSDNVPSEEVVKKMKNYWRQLLNAKLITQRKFDNLTKAERGGLSELDKAGFIKRQLVETRQITKHVAQILDSRMNTKYDENDKLIREVKVITLKSKLVSDFRKDFQFYKVREINNYHHAHDAYLNAVVGTALIKKYPKLESEFVYGDYKVYDVRKMIAKSEQEIGKATAKYFFYSNIMNFFKTEITLANGEIRKRPLIETNGETGEIVWDKGRDFATVRKVLSMPQVNIVKKTEVQTGGFSKESILPKRNSDKLIARKKDWDPKKYGGFDSPTVAYSVLVVAKVEKGKSKKLKSVKELLGITIMERSSFEKNPIDFLEAKGYKEVKKDLIIKLPKYSLFELENGRKRMLASAGELQKGNELALPSKYVNFLYLASHYEKLKGSPEDNEQKQLFVEQHKHYLDEIIEQISEFSKRVILADANLDKVLSAYNKHRDKPIREQAENIIHLFTLTNLGAPAAFKYFDTTIDRKRYTSTKEVLDATLIHQSITGLYETRIDLSQLGGDGGGSSGGGEAAAKGGMDPLQLLQPLEAEIKGTKLKAHWNSGATITCVPQAFLEEEVPIKNIWIKTIHGEKEQPVYYLTFKIQGRKVEAEVISSPYDYILVSPSDIPWLMKKPLQLTTLVPLQEYEERLLKQTMLTGSYKEKLQSLFLKYDALWQHWENQVGHRRIKPHHIATGTVNPRPQKQYPINPKAKASIQTVINDLLKQGVLIQQNSIMNTPVYPVPKPDGKWRMVLDYREVNKTIPLIAAQNQHSAGILSSIFRGKYKTTLDLSNGFWAHSITPESYWLTAFTWLGQQYCWTRLPQGFLNSPALFNADVVDLLKEVPNVQVYVDDIYISHDDPREHLEQLEKVFSLLLNAGYVVSLKKSEIAQHEVEFLGFNITKEGRGLTETFKQKLLNITPPRDLKQLQSILGKLNFARNFIPNFSELVKPLYNIIATAPGKYITWTTDNSQQLQNIISMLNSAENLEERNPEVRLIMKVNTSPSAGYIRFYNEFAKRPIMYLNYVYTKAEVKFTNTEKLLTTIHKGLIKALDLGMGQEILVYSPIVSMTKIQKTPLPERKALPIRWITWMSYLEDPRIQFHYDKTLPELQQVPTVTDDIIAKIKHPSEFSMVFYTDGSAIKHPNVNKSHNAGMGIAQVQFKPEFTVINTWSIPLGDHTAQLAEVAAVEFACKKALKIDGPVLIVTDSFYVAESVNKELPYWQSNGFFNNKKKPLKHVSKWKSIADCIQLKPDIIIIHEKGHQPTASTFHTEGNNLADKLATQGSYVVNAGKRTADGSEFEKRTADGSEFESPKKKAKVE

SEQ ID NO: 668 - protein, 2176 aa, synthetic construct
MPAAKRVKLDGGDKKYSIGLDIGTNSVGWAVITDEYKVPSKKFKVLGNTDRHSIKKNLIGALLFDSGETAEATRLKRTARRRYTRRKNRICYLQEIFSNEMAKVDDSFFHRLEESFLVEEDKKHERHPIFGNIVDEVAYHEKYPTIYHLRKKLVDSTDKADLRLIYLALAHMIKFRGHFLIEGDLNPDNSDVDKLFIQLVQTYNQLFEENPINASGVDAKAILSARLSKSRRLENLIAQLPGEKKNGLFGNLIALSLGLTPNFKSNFDLAEDAKLQLSKDTYDDDLDNLLAQIGDQYADLFLAAKNLSDAILLSDILRVNTEITKAPLSASMIKRYDEHHQDLTLLKALVRQQLPEKYKEIFFDQSKNGYAGYIDGGASQEEFYKFIKPILEKMDGTEELLVKLNREDLLRKQRTFDNGSIPHQIHLGELHAILRRQEDFYPFLKDNREKIEKILTFRIPYYVGPLARGNSRFAWMTRKSEETITPWNFEEVVDKGASAQSFIERMTNFDKNLPNEKVLPKHSLLYEYFTVYNELTKVKYVTEGMRKPAFLSGEQKKAIVDLLFKTNRKVTVKQLKEDYFKKIECFDSVEISGVEDRFNASLGTYHDLLKIIKDKDFLDNEENEDILEDIVLTLTLFEDREMIEERLKTYAHLFDDKVMKQLKRRRYTGWGRLSRKLINGIRDKQSGKTILDFLKSDGFANRNFMQLIHDDSLTFKEDIQKAQVSGQGDSLHEHIANLAGSPAIKKGILQTVKVVDELVKVMGRHKPENIVIEMARENQTTQKGQKNSRERMKRIEEGIKELGSQILKEHPVENTQLQNEKLYLYYLQNGRDMYVDQELDINRLSDYDVDHIVPQSFLKDDSIDNKVLTRSDKARGKSDNVPSEEVVKKMKNYWRQLLNAKLITQRKFDNLTKAERGGLSELDKAGFIKRQLVETRQITKHVAQILDSRMNTKYDENDKLIREVKVITLKSKLVSDFRKDFQFYKVREINNYHHAHDAYLNAVVGTALIKKYPKLESEFVYGDYKVYDVRKMIAKSEQEIGKATAKYFFYSNIMNFFKTEITLANGEIRKRPLIETNGETGEIVWDKGRDFATVRKVLSMPQVNIVKKTEVQTGGFSKESILPKRNSDKLIARKKDWDPKKYGGFDSPTVAYSVLVVAKVEKGKSKKLKSVKELLGITIMERSSFEKNPIDFLEAKGYKEVKKDLIIKLPKYSLFELENGRKRMLASAGELQKGNELALPSKYVNFLYLASHYEKLKGSPEDNEQKQLFVEQHKHYLDEIIEQISEFSKRVILADANLDKVLSAYNKHRDKPIREQAENIIHLFTLTNLGAPAAFKYFDTTIDRKRYTSTKEVLDATLIHQSITGLYETRIDLSQLGGDGGGGSEAAAKPAPGGMDPLQLLQPLEAEIKGTKLKAHWNSGATITCVPQAFLEEEVPIKNIWIKTIHGEKEQPVYYLTFKIQGRKVEAEVISSPYDYILVSPSDIPWLMKKPLQLTTLVPLQEYEERLLKQTMLTGSYKEKLQSLFLKYDALWQHWENQVGHRRIKPHHIATGTVNPRPQKQYPINPKAKASIQTVINDLLKQGVLIQQNSIMNTPVYPVPKPDGKWRMVLDYREVNKTIPLIAAQNQHSAGILSSIFRGKYKTTLDLSNGFWAHSITPESYWLTAFTWLGQQYCWTRLPQGFLNSPALFNADVVDLLKEVPNVQVYVDDIYISHDDPREHLEQLEKVFSLLLNAGYVVSLKKSEIAQHEVEFLGFNITKEGRGLTETFKQKLLNITPPRDLKQLQSILGKLNFARNFIPNFSELVKPLYNIIATAPGKYITWTTDNSQQLQNIISMLNSAENLEERNPEVRLIMKVNTSPSAGYIRFYNEFAKRPIMYLNYVYTKAEVKFTNTEKLLTTIHKGLIKALDLGMGQEILVYSPIVSMTKIQKTPLPERKALPIRWITWMSYLEDPRIQFHYDKTLPELQQVPTVTDDIIAKIKHPSEFSMVFYTDGSAIKHPNVNKSHNAGMGIAQVQFKPEFTVINTWSIPLGDHTAQLAEVAAVEFACKKALKIDGPVLIVTDSFYVAESVNKELPYWQSNGFFNNKKKPLKHVSKWKSIADCIQLKPDIIIIHEKGHQPTASTFHTEGNNLADKLATQGSYVVNAGKRTADGSEFEKRTADGSEFESPKKKAKVE

SEQ ID NO: 669 - protein, 2174 aa, synthetic construct
MPAAKRVKLDGGDKKYSIGLDIGTNSVGWAVITDEYKVPSKKFKVLGNTDRHSIKKNLIGALLFDSGETAEATRLKRTARRRYTRRKNRICYLQEIFSNEMAKVDDSFFHRLEESFLVEEDKKHERHPIFGNIVDEVAYHEKYPTIYHLRKKLVDSTDKADLRLIYLALAHMIKFRGHFLIEGDLNPDNSDVDKLFIQLVQTYNQLFEENPINASGVDAKAILSARLSKSRRLENLIAQLPGEKKNGLFGNLIALSLGLTPNFKSNFDLAEDAKLQLSKDTYDDDLDNLLAQIGDQYADLFLAAKNLSDAILLSDILRVNTEITKAPLSASMIKRYDEHHQDLTLLKALVRQQLPEKYKEIFFDQSKNGYAGYIDGGASQEEFYKFIKPILEKMDGTEELLVKLNREDLLRKQRTFDNGSIPHQIHLGELHAILRRQEDFYPFLKDNREKIEKILTFRIPYYVGPLARGNSRFAWMTRKSEETITPWNFEEVVDKGASAQSFIERMTNFDKNLPNEKVLPKHSLLYEYFTVYNELTKVKYVTEGMRKPAFLSGEQKKAIVDLLFKTNRKVTVKQLKEDYFKKIECFDSVEISGVEDRFNASLGTYHDLLKIIKDKDFLDNEENEDILEDIVLTLTLFEDREMIEERLKTYAHLFDDKVMKQLKRRRYTGWGRLSRKLINGIRDKQSGKTILDFLKSDGFANRNFMQLIHDDSLTFKEDIQKAQVSGQGDSLHEHIANLAGSPAIKKGILQTVKVVDELVKVMGRHKPENIVIEMARENQTTQKGQKNSRERMKRIEEGIKELGSQILKEHPVENTQLQNEKLYLYYLQNGRDMYVDQELDINRLSDYDVDHIVPQSFLKDDSIDNKVLTRSDKARGKSDNVPSEEVVKKMKNYWRQLLNAKLITQRKFDNLTKAERGGLSELDKAGFIKRQLVETRQITKHVAQILDSRMNTKYDENDKLIREVKVITLKSKLVSDFRKDFQFYKVREINNYHHAHDAYLNAVVGTALIKKYPKLESEFVYGDYKVYDVRKMIAKSEQEIGKATAKYFFYSNIMNFFKTEITLANGEIRKRPLIETNGETGEIVWDKGRDFATVRKVLSMPQVNIVKKTEVQTGGFSKESILPKRNSDKLIARKKDWDPKKYGGFDSPTVAYSVLVVAKVEKGKSKKLKSVKELLGITIMERSSFEKNPIDFLEAKGYKEVKKDLIIKLPKYSLFELENGRKRMLASAGELQKGNELALPSKYVNFLYLASHYEKLKGSPEDNEQKQLFVEQHKHYLDEIIEQISEFSKRVILADANLDKVLSAYNKHRDKPIREQAENIIHLFTLTNLGAPAAFKYFDTTIDRKRYTSTKEVLDATLIHQSITGLYETRIDLSQLGGDGGGGGGSSPAPGGMDPLQLLQPLEAEIKGTKLKAHWNSGATITCVPQAFLEEEVPIKNIWIKTIHGEKEQPVYYLTFKIQGRKVEAEVISSPYDYILVSPSDIPWLMKKPLQLTTLVPLQEYEERLLKQTMLTGSYKEKLQSLFLKYDALWQHWENQVGHRRIKPHHIATGTVNPRPQKQYPINPKAKASIQTVINDLLKQGVLIQQNSIMNTPVYPVPKPDGKWRMVLDYREVNKTIPLIAAQNQHSAGILSSIFRGKYKTTLDLSNGFWAHSITPESYWLTAFTWLGQQYCWTRLPQGFLNSPALFNADVVDLLKEVPNVQVYVDDIYISHDDPREHLEQLEKVFSLLLNAGYVVSLKKSEIAQHEVEFLGFNITKEGRGLTETFKQKLLNITPPRDLKQLQSILGKLNFARNFIPNFSELVKPLYNIIATAPGKYITWTTDNSQQLQNIISMLNSAENLEERNPEVRLIMKVNTSPSAGYIRFYNEFAKRPIMYLNYVYTKAEVKFTNTEKLLTTIHKGLIKALDLGMGQEILVYSPIVSMTKIQKTPLPERKALPIRWITWMSYLEDPRIQFHYDKTLPELQQVPTVTDDIIAKIKHPSEFSMVFYTDGSAIKHPNVNKSHNAGMGIAQVQFKPEFTVINTWSIPLGDHTAQLAEVAAVEFACKKALKIDGPVLIVTDSFYVAESVNKELPYWQSNGFFNNKKKPLKHVSKWKSIADCIQLKPDIIIIHEKGHQPTASTFHTEGNNLADKLATQGSYVVNAGKRTADGSEFEKRTADGSEFESPKKKAKVE

SEQ ID NO: 670 - protein, 2176 aa, synthetic construct
MPAAKRVKLDGGDKKYSIGLDIGTNSVGWAVITDEYKVPSKKFKVLGNTDRHSIKKNLIGALLFDSGETAEATRLKRTARRRYTRRKNRICYLQEIFSNEMAKVDDSFFHRLEESFLVEEDKKHERHPIFGNIVDEVAYHEKYPTIYHLRKKLVDSTDKADLRLIYLALAHMIKFRGHFLIEGDLNPDNSDVDKLFIQLVQTYNQLFEENPINASGVDAKAILSARLSKSRRLENLIAQLPGEKKNGLFGNLIALSLGLTPNFKSNFDLAEDAKLQLSKDTYDDDLDNLLAQIGDQYADLFLAAKNLSDAILLSDILRVNTEITKAPLSASMIKRYDEHHQDLTLLKALVRQQLPEKYKEIFFDQSKNGYAGYIDGGASQEEFYKFIKPILEKMDGTEELLVKLNREDLLRKQRTFDNGSIPHQIHLGELHAILRRQEDFYPFLKDNREKIEKILTFRIPYYVGPLARGNSRFAWMTRKSEETITPWNFEEVVDKGASAQSFIERMTNFDKNLPNEKVLPKHSLLYEYFTVYNELTKVKYVTEGMRKPAFLSGEQKKAIVDLLFKTNRKVTVKQLKEDYFKKIECFDSVEISGVEDRFNASLGTYHDLLKIIKDKDFLDNEENEDILEDIVLTLTLFEDREMIEERLKTYAHLFDDKVMKQLKRRRYTGWGRLSRKLINGIRDKQSGKTILDFLKSDGFANRNFMQLIHDDSLTFKEDIQKAQVSGQGDSLHEHIANLAGSPAIKKGILQTVKVVDELVKVMGRHKPENIVIEMARENQTTQKGQKNSRERMKRIEEGIKELGSQILKEHPVENTQLQNEKLYLYYLQNGRDMYVDQELDINRLSDYDVDHIVPQSFLKDDSIDNKVLTRSDKARGKSDNVPSEEVVKKMKNYWRQLLNAKLITQRKFDNLTKAERGGLSELDKAGFIKRQLVETRQITKHVAQILDSRMNTKYDENDKLIREVKVITLKSKLVSDFRKDFQFYKVREINNYHHAHDAYLNAVVGTALIKKYPKLESEFVYGDYKVYDVRKMIAKSEQEIGKATAKYFFYSNIMNFFKTEITLANGEIRKRPLIETNGETGEIVWDKGRDFATVRKVLSMPQVNIVKKTEVQTGGFSKESILPKRNSDKLIARKKDWDPKKYGGFDSPTVAYSVLVVAKVEKGKSKKLKSVKELLGITIMERSSFEKNPIDFLEAKGYKEVKKDLIIKLPKYSLFELENGRKRMLASAGELQKGNELALPSKYVNFLYLASHYEKLKGSPEDNEQKQLFVEQHKHYLDEIIEQISEFSKRVILADANLDKVLSAYNKHRDKPIREQAENIIHLFTLTNLGAPAAFKYFDTTIDRKRYTSTKEVLDATLIHQSITGLYETRIDLSQLGGDGGGSSGGSEAAAKGGMDPLQLLQPLEAEIKGTKLKAHWNSGATITCVPQAFLEEEVPIKNIWIKTIHGEKEQPVYYLTFKIQGRKVEAEVISSPYDYILVSPSDIPWLMKKPLQLTTLVPLQEYEERLLKQTMLTGSYKEKLQSLFLKYDALWQHWENQVGHRRIKPHHIATGTVNPRPQKQYPINPKAKASIQTVINDLLKQGVLIQQNSIMNTPVYPVPKPDGKWRMVLDYREVNKTIPLIAAQNQHSAGILSSIFRGKYKTTLDLSNGFWAHSITPESYWLTAFTWLGQQYCWTRLPQGFLNSPALFNADVVDLLKEVPNVQVYVDDIYISHDDPREHLEQLEKVFSLLLNAGYVVSLKKSEIAQHEVEFLGFNITKEGRGLTETFKQKLLNITPPRDLKQLQSILGKLNFARNFIPNFSELVKPLYNIIATAPGKYITWTTDNSQQLQNIISMLNSAENLEERNPEVRLIMKVNTSPSAGYIRFYNEFAKRPIMYLNYVYTKAEVKFTNTEKLLTTIHKGLIKALDLGMGQEILVYSPIVSMTKIQKTPLPERKALPIRWITWMSYLEDPRIQFHYDKTLPELQQVPTVTDDIIAKIKHPSEFSMVFYTDGSAIKHPNVNKSHNAGMGIAQVQFKPEFTVINTWSIPLGDHTAQLAEVAAVEFACKKALKIDGPVLIVTDSFYVAESVNKELPYWQSNGFFNNKKKPLKHVSKWKSIADCIQLKPDIIIIHEKGHQPTASTFHTEGNNLADKLATQGSYVVNAGKRTADGSEFEKRTADGSEFESPKKKAKVE

SEQ ID NO: 671 - protein, 2176 aa, synthetic construct
MPAAKRVKLDGGDKKYSIGLDIGTNSVGWAVITDEYKVPSKKFKVLGNTDRHSIKKNLIGALLFDSGETAEATRLKRTARRRYTRRKNRICYLQEIFSNEMAKVDDSFFHRLEESFLVEEDKKHERHPIFGNIVDEVAYHEKYPTIYHLRKKLVDSTDKADLRLIYLALAHMIKFRGHFLIEGDLNPDNSDVDKLFIQLVQTYNQLFEENPINASGVDAKAILSARLSKSRRLENLIAQLPGEKKNGLFGNLIALSLGLTPNFKSNFDLAEDAKLQLSKDTYDDDLDNLLAQIGDQYADLFLAAKNLSDAILLSDILRVNTEITKAPLSASMIKRYDEHHQDLTLLKALVRQQLPEKYKEIFFDQSKNGYAGYIDGGASQEEFYKFIKPILEKMDGTEELLVKLNREDLLRKQRTFDNGSIPHQIHLGELHAILRRQEDFYPFLKDNREKIEKILTFRIPYYVGPLARGNSRFAWMTRKSEETITPWNFEEVVDKGASAQSFIERMTNFDKNLPNEKVLPKHSLLYEYFTVYNELTKVKYVTEGMRKPAFLSGEQKKAIVDLLFKTNRKVTVKQLKEDYFKKIECFDSVEISGVEDRFNASLGTYHDLLKIIKDKDFLDNEENEDILEDIVLTLTLFEDREMIEERLKTYAHLFDDKVMKQLKRRRYTGWGRLSRKLINGIRDKQSGKTILDFLKSDGFANRNFMQLIHDDSLTFKEDIQKAQVSGQGDSLHEHIANLAGSPAIKKGILQTVKVVDELVKVMGRHKPENIVIEMARENQTTQKGQKNSRERMKRIEEGIKELGSQILKEHPVENTQLQNEKLYLYYLQNGRDMYVDQELDINRLSDYDVDHIVPQSFLKDDSIDNKVLTRSDKARGKSDNVPSEEVVKKMKNYWRQLLNAKLITQRKFDNLTKAERGGLSELDKAGFIKRQLVETRQITKHVAQILDSRMNTKYDENDKLIREVKVITLKSKLVSDFRKDFQFYKVREINNYHHAHDAYLNAVVGTALIKKYPKLESEFVYGDYKVYDVRKMIAKSEQEIGKATAKYFFYSNIMNFFKTEITLANGEIRKRPLIETNGETGEIVWDKGRDFATVRKVLSMPQVNIVKKTEVQTGGFSKESILPKRNSDKLIARKKDWDPKKYGGFDSPTVAYSVLVVAKVEKGKSKKLKSVKELLGITIMERSSFEKNPIDFLEAKGYKEVKKDLIIKLPKYSLFELENGRKRMLASAGELQKGNELALPSKYVNFLYLASHYEKLKGSPEDNEQKQLFVEQHKHYLDEIIEQISEFSKRVILADANLDKVLSAYNKHRDKPIREQAENIIHLFTLTNLGAPAAFKYFDTTIDRKRYTSTKEVLDATLIHQSITGLYETRIDLSQLGGDGGEAAAKGSSGGGGGMDPLQLLQPLEAEIKGTKLKAHWNSGATITCVPQAFLEEEVPIKNIWIKTIHGEKEQPVYYLTFKIQGRKVEAEVISSPYDYILVSPSDIPWLMKKPLQLTTLVPLQEYEERLLKQTMLTGSYKEKLQSLFLKYDALWQHWENQVGHRRIKPHHIATGTVNPRPQKQYPINPKAKASIQTVINDLLKQGVLIQQNSIMNTPVYPVPKPDGKWRMVLDYREVNKTIPLIAAQNQHSAGILSSIFRGKYKTTLDLSNGFWAHSITPESYWLTAFTWLGQQYCWTRLPQGFLNSPALFNADVVDLLKEVPNVQVYVDDIYISHDDPREHLEQLEKVFSLLLNAGYVVSLKKSEIAQHEVEFLGFNITKEGRGLTETFKQKLLNITPPRDLKQLQSILGKLNFARNFIPNFSELVKPLYNIIATAPGKYITWTTDNSQQLQNIISMLNSAENLEERNPEVRLIMKVNTSPSAGYIRFYNEFAKRPIMYLNYVYTKAEVKFTNTEKLLTTIHKGLIKALDLGMGQEILVYSPIVSMTKIQKTPLPERKALPIRWITWMSYLEDPRIQFHYDKTLPELQQVPTVTDDIIAKIKHPSEFSMVFYTDGSAIKHPNVNKSHNAGMGIAQVQFKPEFTVINTWSIPLGDHTAQLAEVAAVEFACKKALKIDGPVLIVTDSFYVAESVNKELPYWQSNGFFNNKKKPLKHVSKWKSIADCIQLKPDIIIIHEKGHQPTASTFHTEGNNLADKLATQGSYVVNAGKRTADGSEFEKRTADGSEFESPKKKAKVE

SEQ ID NO: 672 - protein, 2171 aa, synthetic construct
MPAAKRVKLDGGDKKYSIGLDIGTNSVGWAVITDEYKVPSKKFKVLGNTDRHSIKKNLIGALLFDSGETAEATRLKRTARRRYTRRKNRICYLQEIFSNEMAKVDDSFFHRLEESFLVEEDKKHERHPIFGNIVDEVAYHEKYPTIYHLRKKLVDSTDKADLRLIYLALAHMIKFRGHFLIEGDLNPDNSDVDKLFIQLVQTYNQLFEENPINASGVDAKAILSARLSKSRRLENLIAQLPGEKKNGLFGNLIALSLGLTPNFKSNFDLAEDAKLQLSKDTYDDDLDNLLAQIGDQYADLFLAAKNLSDAILLSDILRVNTEITKAPLSASMIKRYDEHHQDLTLLKALVRQQLPEKYKEIFFDQSKNGYAGYIDGGASQEEFYKFIKPILEKMDGTEELLVKLNREDLLRKQRTFDNGSIPHQIHLGELHAILRRQEDFYPFLKDNREKIEKILTFRIPYYVGPLARGNSRFAWMTRKSEETITPWNFEEVVDKGASAQSFIERMTNFDKNLPNEKVLPKHSLLYEYFTVYNELTKVKYVTEGMRKPAFLSGEQKKAIVDLLFKTNRKVTVKQLKEDYFKKIECFDSVEISGVEDRFNASLGTYHDLLKIIKDKDFLDNEENEDILEDIVLTLTLFEDREMIEERLKTYAHLFDDKVMKQLKRRRYTGWGRLSRKLINGIRDKQSGKTILDFLKSDGFANRNFMQLIHDDSLTFKEDIQKAQVSGQGDSLHEHIANLAGSPAIKKGILQTVKVVDELVKVMGRHKPENIVIEMARENQTTQKGQKNSRERMKRIEEGIKELGSQILKEHPVENTQLQNEKLYLYYLQNGRDMYVDQELDINRLSDYDVDHIVPQSFLKDDSIDNKVLTRSDKARGKSDNVPSEEVVKKMKNYWRQLLNAKLITQRKFDNLTKAERGGLSELDKAGFIKRQLVETRQITKHVAQILDSRMNTKYDENDKLIREVKVITLKSKLVSDFRKDFQFYKVREINNYHHAHDAYLNAVVGTALIKKYPKLESEFVYGDYKVYDVRKMIAKSEQEIGKATAKYFFYSNIMNFFKTEITLANGEIRKRPLIETNGETGEIVWDKGRDFATVRKVLSMPQVNIVKKTEVQTGGFSKESILPKRNSDKLIARKKDWDPKKYGGFDSPTVAYSVLVVAKVEKGKSKKLKSVKELLGITIMERSSFEKNPIDFLEAKGYKEVKKDLIIKLPKYSLFELENGRKRMLASAGELQKGNELALPSKYVNFLYLASHYEKLKGSPEDNEQKQLFVEQHKHYLDEIIEQISEFSKRVILADANLDKVLSAYNKHRDKPIREQAENIIHLFTLTNLGAPAAFKYFDTTIDRKRYTSTKEVLDATLIHQSITGLYETRIDLSQLGGDGGGGSPAPGGMDPLQLLQPLEAEIKGTKLKAHWNSGATITCVPQAFLEEEVPIKNIWIKTIHGEKEQPVYYLTFKIQGRKVEAEVISSPYDYILVSPSDIPWLMKKPLQLTTLVPLQEYEERLLKQTMLTGSYKEKLQSLFLKYDALWQHWENQVGHRRIKPHHIATGTVNPRPQKQYPINPKAKASIQTVINDLLKQGVLIQQNSIMNTPVYPVPKPDGKWRMVLDYREVNKTIPLIAAQNQHSAGILSSIFRGKYKTTLDLSNGFWAHSITPESYWLTAFTWLGQQYCWTRLPQGFLNSPALFNADVVDLLKEVPNVQVYVDDIYISHDDPREHLEQLEKVFSLLLNAGYVVSLKKSEIAQHEVEFLGFNITKEGRGLTETFKQKLLNITPPRDLKQLQSILGKLNFARNFIPNFSELVKPLYNIIATAPGKYITWTTDNSQQLQNIISMLNSAENLEERNPEVRLIMKVNTSPSAGYIRFYNEFAKRPIMYLNYVYTKAEVKFTNTEKLLTTIHKGLIKALDLGMGQEILVYSPIVSMTKIQKTPLPERKALPIRWITWMSYLEDPRIQFHYDKTLPELQQVPTVTDDIIAKIKHPSEFSMVFYTDGSAIKHPNVNKSHNAGMGIAQVQFKPEFTVINTWSIPLGDHTAQLAEVAAVEFACKKALKIDGPVLIVTDSFYVAESVNKELPYWQSNGFFNNKKKPLKHVSKWKSIADCIQLKPDIIIIHEKGHQPTASTFHTEGNNLADKLATQGSYVVNAGKRTADGSEFEKRTADGSEFESPKKKAKVE

SEQ ID NO: 673 - protein, 2185 aa, synthetic construct
MPAAKRVKLDGGDKKYSIGLDIGTNSVGWAVITDEYKVPSKKFKVLGNTDRHSIKKNLIGALLFDSGETAEATRLKRTARRRYTRRKNRICYLQEIFSNEMAKVDDSFFHRLEESFLVEEDKKHERHPIFGNIVDEVAYHEKYPTIYHLRKKLVDSTDKADLRLIYLALAHMIKFRGHFLIEGDLNPDNSDVDKLFIQLVQTYNQLFEENPINASGVDAKAILSARLSKSRRLENLIAQLPGEKKNGLFGNLIALSLGLTPNFKSNFDLAEDAKLQLSKDTYDDDLDNLLAQIGDQYADLFLAAKNLSDAILLSDILRVNTEITKAPLSASMIKRYDEHHQDLTLLKALVRQQLPEKYKEIFFDQSKNGYAGYIDGGASQEEFYKFIKPILEKMDGTEELLVKLNREDLLRKQRTFDNGSIPHQIHLGELHAILRRQEDFYPFLKDNREKIEKILTFRIPYYVGPLARGNSRFAWMTRKSEETITPWNFEEVVDKGASAQSFIERMTNFDKNLPNEKVLPKHSLLYEYFTVYNELTKVKYVTEGMRKPAFLSGEQKKAIVDLLFKTNRKVTVKQLKEDYFKKIECFDSVEISGVEDRFNASLGTYHDLLKIIKDKDFLDNEENEDILEDIVLTLTLFEDREMIEERLKTYAHLFDDKVMKQLKRRRYTGWGRLSRKLINGIRDKQSGKTILDFLKSDGFANRNFMQLIHDDSLTFKEDIQKAQVSGQGDSLHEHIANLAGSPAIKKGILQTVKVVDELVKVMGRHKPENIVIEMARENQTTQKGQKNSRERMKRIEEGIKELGSQILKEHPVENTQLQNEKLYLYYLQNGRDMYVDQELDINRLSDYDVDHIVPQSFLKDDSIDNKVLTRSDKARGKSDNVPSEEVVKKMKNYWRQLLNAKLITQRKFDNLTKAERGGLSELDKAGFIKRQLVETRQITKHVAQILDSRMNTKYDENDKLIREVKVITLKSKLVSDFRKDFQFYKVREINNYHHAHDAYLNAVVGTALIKKYPKLESEFVYGDYKVYDVRKMIAKSEQEIGKATAKYFFYSNIMNFFKTEITLANGEIRKRPLIETNGETGEIVWDKGRDFATVRKVLSMPQVNIVKKTEVQTGGFSKESILPKRNSDKLIARKKDWDPKKYGGFDSPTVAYSVLVVAKVEKGKSKKLKSVKELLGITIMERSSFEKNPIDFLEAKGYKEVKKDLIIKLPKYSLFELENGRKRMLASAGELQKGNELALPSKYVNFLYLASHYEKLKGSPEDNEQKQLFVEQHKHYLDEIIEQISEFSKRVILADANLDKVLSAYNKHRDKPIREQAENIIHLFTLTNLGAPAAFKYFDTTIDRKRYTSTKEVLDATLIHQSITGLYETRIDLSQLGGDGGGGGGSGGGGSGGGGSGGGGSGGMDPLQLLQPLEAEIKGTKLKAHWNSGATITCVPQAFLEEEVPIKNIWIKTIHGEKEQPVYYLTFKIQGRKVEAEVISSPYDYILVSPSDIPWLMKKPLQLTTLVPLQEYEERLLKQTMLTGSYKEKLQSLFLKYDALWQHWENQVGHRRIKPHHIATGTVNPRPQKQYPINPKAKASIQTVINDLLKQGVLIQQNSIMNTPVYPVPKPDGKWRMVLDYREVNKTIPLIAAQNQHSAGILSSIFRGKYKTTLDLSNGFWAHSITPESYWLTAFTWLGQQYCWTRLPQGFLNSPALFNADVVDLLKEVPNVQVYVDDIYISHDDPREHLEQLEKVFSLLLNAGYVVSLKKSEIAQHEVEFLGFNITKEGRGLTETFKQKLLNITPPRDLKQLQSILGKLNFARNFIPNFSELVKPLYNIIATAPGKYITWTTDNSQQLQNIISMLNSAENLEERNPEVRLIMKVNTSPSAGYIRFYNEFAKRPIMYLNYVYTKAEVKFTNTEKLLTTIHKGLIKALDLGMGQEILVYSPIVSMTKIQKTPLPERKALPIRWITWMSYLEDPRIQFHYDKTLPELQQVPTVTDDIIAKIKHPSEFSMVFYTDGSAIKHPNVNKSHNAGMGIAQVQFKPEFTVINTWSIPLGDHTAQLAEVAAVEFACKKALKIDGPVLIVTDSFYVAESVNKELPYWQSNGFFNNKKKPLKHVSKWKSIADCIQLKPDIIIIHEKGHQPTASTFHTEGNNLADKLATQGSYVVNAGKRTADGSEFEKRTADGSEFESPKKKAKVE

SEQ ID NO: 674 - protein, 2176 aa, synthetic construct
MPAAKRVKLDGGDKKYSIGLDIGTNSVGWAVITDEYKVPSKKFKVLGNTDRHSIKKNLIGALLFDSGETAEATRLKRTARRRYTRRKNRICYLQEIFSNEMAKVDDSFFHRLEESFLVEEDKKHERHPIFGNIVDEVAYHEKYPTIYHLRKKLVDSTDKADLRLIYLALAHMIKFRGHFLIEGDLNPDNSDVDKLFIQLVQTYNQLFEENPINASGVDAKAILSARLSKSRRLENLIAQLPGEKKNGLFGNLIALSLGLTPNFKSNFDLAEDAKLQLSKDTYDDDLDNLLAQIGDQYADLFLAAKNLSDAILLSDILRVNTEITKAPLSASMIKRYDEHHQDLTLLKALVRQQLPEKYKEIFFDQSKNGYAGYIDGGASQEEFYKFIKPILEKMDGTEELLVKLNREDLLRKQRTFDNGSIPHQIHLGELHAILRRQEDFYPFLKDNREKIEKILTFRIPYYVGPLARGNSRFAWMTRKSEETITPWNFEEVVDKGASAQSFIERMTNFDKNLPNEKVLPKHSLLYEYFTVYNELTKVKYVTEGMRKPAFLSGEQKKAIVDLLFKTNRKVTVKQLKEDYFKKIECFDSVEISGVEDRFNASLGTYHDLLKIIKDKDFLDNEENEDILEDIVLTLTLFEDREMIEERLKTYAHLFDDKVMKQLKRRRYTGWGRLSRKLINGIRDKQSGKTILDFLKSDGFANRNFMQLIHDDSLTFKEDIQKAQVSGQGDSLHEHIANLAGSPAIKKGILQTVKVVDELVKVMGRHKPENIVIEMARENQTTQKGQKNSRERMKRIEEGIKELGSQILKEHPVENTQLQNEKLYLYYLQNGRDMYVDQELDINRLSDYDVDHIVPQSFLKDDSIDNKVLTRSDKARGKSDNVPSEEVVKKMKNYWRQLLNAKLITQRKFDNLTKAERGGLSELDKAGFIKRQLVETRQITKHVAQILDSRMNTKYDENDKLIREVKVITLKSKLVSDFRKDFQFYKVREINNYHHAHDAYLNAVVGTALIKKYPKLESEFVYGDYKVYDVRKMIAKSEQEIGKATAKYFFYSNIMNFFKTEITLANGEIRKRPLIETNGETGEIVWDKGRDFATVRKVLSMPQVNIVKKTEVQTGGFSKESILPKRNSDKLIARKKDWDPKKYGGFDSPTVAYSVLVVAKVEKGKSKKLKSVKELLGITIMERSSFEKNPIDFLEAKGYKEVKKDLIIKLPKYSLFELENGRKRMLASAGELQKGNELALPSKYVNFLYLASHYEKLKGSPEDNEQKQLFVEQHKHYLDEIIEQISEFSKRVILADANLDKVLSAYNKHRDKPIREQAENIIHLFTLTNLGAPAAFKYFDTTIDRKRYTSTKEVLDATLIHQSITGLYETRIDLSQLGGDGGGSSEAAAKGGGGGMDPLQLLQPLEAEIKGTKLKAHWNSGATITCVPQAFLEEEVPIKNIWIKTIHGEKEQPVYYLTFKIQGRKVEAEVISSPYDYILVSPSDIPWLMKKPLQLTTLVPLQEYEERLLKQTMLTGSYKEKLQSLFLKYDALWQHWENQVGHRRIKPHHIATGTVNPRPQKQYPINPKAKASIQTVINDLLKQGVLIQQNSIMNTPVYPVPKPDGKWRMVLDYREVNKTIPLIAAQNQHSAGILSSIFRGKYKTTLDLSNGFWAHSITPESYWLTAFTWLGQQYCWTRLPQGFLNSPALFNADVVDLLKEVPNVQVYVDDIYISHDDPREHLEQLEKVFSLLLNAGYVVSLKKSEIAQHEVEFLGFNITKEGRGLTETFKQKLLNITPPRDLKQLQSILGKLNFARNFIPNFSELVKPLYNIIATAPGKYITWTTDNSQQLQNIISMLNSAENLEERNPEVRLIMKVNTSPSAGYIRFYNEFAKRPIMYLNYVYTKAEVKFTNTEKLLTTIHKGLIKALDLGMGQEILVYSPIVSMTKIQKTPLPERKALPIRWITWMSYLEDPRIQFHYDKTLPELQQVPTVTDDIIAKIKHPSEFSMVFYTDGSAIKHPNVNKSHNAGMGIAQVQFKPEFTVINTWSIPLGDHTAQLAEVAAVEFACKKALKIDGPVLIVTDSFYVAESVNKELPYWQSNGFFNNKKKPLKHVSKWKSIADCIQLKPDIIIIHEKGHQPTASTFHTEGNNLADKLATQGSYVVNAGKRTADGSEFEKRTADGSEFESPKKKAKVE

SEQ ID NO: 675 - protein, 2176 aa, synthetic construct
MPAAKRVKLDGGDKKYSIGLDIGTNSVGWAVITDEYKVPSKKFKVLGNTDRHSIKKNLIGALLFDSGETAEATRLKRTARRRYTRRKNRICYLQEIFSNEMAKVDDSFFHRLEESFLVEEDKKHERHPIFGNIVDEVAYHEKYPTIYHLRKKLVDSTDKADLRLIYLALAHMIKFRGHFLIEGDLNPDNSDVDKLFIQLVQTYNQLFEENPINASGVDAKAILSARLSKSRRLENLIAQLPGEKKNGLFGNLIALSLGLTPNFKSNFDLAEDAKLQLSKDTYDDDLDNLLAQIGDQYADLFLAAKNLSDAILLSDILRVNTEITKAPLSASMIKRYDEHHQDLTLLKALVRQQLPEKYKEIFFDQSKNGYAGYIDGGASQEEFYKFIKPILEKMDGTEELLVKLNREDLLRKQRTFDNGSIPHQIHLGELHAILRRQEDFYPFLKDNREKIEKILTFRIPYYVGPLARGNSRFAWMTRKSEETITPWNFEEVVDKGASAQSFIERMTNFDKNLPNEKVLPKHSLLYEYFTVYNELTKVKYVTEGMRKPAFLSGEQKKAIVDLLFKTNRKVTVKQLKEDYFKKIECFDSVEISGVEDRFNASLGTYHDLLKIIKDKDFLDNEENEDILEDIVLTLTLFEDREMIEERLKTYAHLFDDKVMKQLKRRRYTGWGRLSRKLINGIRDKQSGKTILDFLKSDGFANRNFMQLIHDDSLTFKEDIQKAQVSGQGDSLHEHIANLAGSPAIKKGILQTVKVVDELVKVMGRHKPENIVIEMARENQTTQKGQKNSRERMKRIEEGIKELGSQILKEHPVENTQLQNEKLYLYYLQNGRDMYVDQELDINRLSDYDVDHIVPQSFLKDDSIDNKVLTRSDKARGKSDNVPSEEVVKKMKNYWRQLLNAKLITQRKFDNLTKAERGGLSELDKAGFIKRQLVETRQITKHVAQILDSRMNTKYDENDKLIREVKVITLKSKLVSDFRKDFQFYKVREINNYHHAHDAYLNAVVGTALIKKYPKLESEFVYGDYKVYDVRKMIAKSEQEIGKATAKYFFYSNIMNFFKTEITLANGEIRKRPLIETNGETGEIVWDKGRDFATVRKVLSMPQVNIVKKTEVQTGGFSKESILPKRNSDKLIARKKDWDPKKYGGFDSPTVAYSVLVVAKVEKGKSKKLKSVKELLGITIMERSSFEKNPIDFLEAKGYKEVKKDLIIKLPKYSLFELENGRKRMLASAGELQKGNELALPSKYVNFLYLASHYEKLKGSPEDNEQKQLFVEQHKHYLDEIIEQISEFSKRVILADANLDKVLSAYNKHRDKPIREQAENIIHLFTLTNLGAPAAFKYFDTTIDRKRYTSTKEVLDATLIHQSITGLYETRIDLSQLGGDGGGSSPAPEAAAKGGMDPLQLLQPLEAEIKGTKLKAHWNSGATITCVPQAFLEEEVPIKNIWIKTIHGEKEQPVYYLTFKIQGRKVEAEVISSPYDYILVSPSDIPWLMKKPLQLTTLVPLQEYEERLLKQTMLTGSYKEKLQSLFLKYDALWQHWENQVGHRRIKPHHIATGTVNPRPQKQYPINPKAKASIQTVINDLLKQGVLIQQNSIMNTPVYPVPKPDGKWRMVLDYREVNKTIPLIAAQNQHSAGILSSIFRGKYKTTLDLSNGFWAHSITPESYWLTAFTWLGQQYCWTRLPQGFLNSPALFNADVVDLLKEVPNVQVYVDDIYISHDDPREHLEQLEKVFSLLLNAGYVVSLKKSEIAQHEVEFLGFNITKEGRGLTETFKQKLLNITPPRDLKQLQSILGKLNFARNFIPNFSELVKPLYNIIATAPGKYITWTTDNSQQLQNIISMLNSAENLEERNPEVRLIMKVNTSPSAGYIRFYNEFAKRPIMYLNYVYTKAEVKFTNTEKLLTTIHKGLIKALDLGMGQEILVYSPIVSMTKIQKTPLPERKALPIRWITWMSYLEDPRIQFHYDKTLPELQQVPTVTDDIIAKIKHPSEFSMVFYTDGSAIKHPNVNKSHNAGMGIAQVQFKPEFTVINTWSIPLGDHTAQLAEVAAVEFACKKALKIDGPVLIVTDSFYVAESVNKELPYWQSNGFFNNKKKPLKHVSKWKSIADCIQLKPDIIIIHEKGHQPTASTFHTEGNNLADKLATQGSYVVNAGKRTADGSEFEKRTADGSEFESPKKKAKVE

SEQ ID NO: 676 - protein, 2171 aa, synthetic construct
MPAAKRVKLDGGDKKYSIGLDIGTNSVGWAVITDEYKVPSKKFKVLGNTDRHSIKKNLIGALLFDSGETAEATRLKRTARRRYTRRKNRICYLQEIFSNEMAKVDDSFFHRLEESFLVEEDKKHERHPIFGNIVDEVAYHEKYPTIYHLRKKLVDSTDKADLRLIYLALAHMIKFRGHFLIEGDLNPDNSDVDKLFIQLVQTYNQLFEENPINASGVDAKAILSARLSKSRRLENLIAQLPGEKKNGLFGNLIALSLGLTPNFKSNFDLAEDAKLQLSKDTYDDDLDNLLAQIGDQYADLFLAAKNLSDAILLSDILRVNTEITKAPLSASMIKRYDEHHQDLTLLKALVRQQLPEKYKEIFFDQSKNGYAGYIDGGASQEEFYKFIKPILEKMDGTEELLVKLNREDLLRKQRTFDNGSIPHQIHLGELHAILRRQEDFYPFLKDNREKIEKILTFRIPYYVGPLARGNSRFAWMTRKSEETITPWNFEEVVDKGASAQSFIERMTNFDKNLPNEKVLPKHSLLYEYFTVYNELTKVKYVTEGMRKPAFLSGEQKKAIVDLLFKTNRKVTVKQLKEDYFKKIECFDSVEISGVEDRFNASLGTYHDLLKIIKDKDFLDNEENEDILEDIVLTLTLFEDREMIEERLKTYAHLFDDKVMKQLKRRRYTGWGRLSRKLINGIRDKQSGKTILDFLKSDGFANRNFMQLIHDDSLTFKEDIQKAQVSGQGDSLHEHIANLAGSPAIKKGILQTVKVVDELVKVMGRHKPENIVIEMARENQTTQKGQKNSRERMKRIEEGIKELGSQILKEHPVENTQLQNEKLYLYYLQNGRDMYVDQELDINRLSDYDVDHIVPQSFLKDDSIDNKVLTRSDKARGKSDNVPSEEVVKKMKNYWRQLLNAKLITQRKFDNLTKAERGGLSELDKAGFIKRQLVETRQITKHVAQILDSRMNTKYDENDKLIREVKVITLKSKLVSDFRKDFQFYKVREINNYHHAHDAYLNAVVGTALIKKYPKLESEFVYGDYKVYDVRKMIAKSEQEIGKATAKYFFYSNIMNFFKTEITLANGEIRKRPLIETNGETGEIVWDKGRDFATVRKVLSMPQVNIVKKTEVQTGGFSKESILPKRNSDKLIARKKDWDPKKYGGFDSPTVAYSVLVVAKVEKGKSKKLKSVKELLGITIMERSSFEKNPIDFLEAKGYKEVKKDLIIKLPKYSLFELENGRKRMLASAGELQKGNELALPSKYVNFLYLASHYEKLKGSPEDNEQKQLFVEQHKHYLDEIIEQISEFSKRVILADANLDKVLSAYNKHRDKPIREQAENIIHLFTLTNLGAPAAFKYFDTTIDRKRYTSTKEVLDATLIHQSITGLYETRIDLSQLGGDGGPAPGGGGGMDPLQLLQPLEAEIKGTKLKAHWNSGATITCVPQAFLEEEVPIKNIWIKTIHGEKEQPVYYLTFKIQGRKVEAEVISSPYDYILVSPSDIPWLMKKPLQLTTLVPLQEYEERLLKQTMLTGSYKEKLQSLFLKYDALWQHWENQVGHRRIKPHHIATGTVNPRPQKQYPINPKAKASIQTVINDLLKQGVLIQQNSIMNTPVYPVPKPDGKWRMVLDYREVNKTIPLIAAQNQHSAGILSSIFRGKYKTTLDLSNGFWAHSITPESYWLTAFTWLGQQYCWTRLPQGFLNSPALFNADVVDLLKEVPNVQVYVDDIYISHDDPREHLEQLEKVFSLLLNAGYVVSLKKSEIAQHEVEFLGFNITKEGRGLTETFKQKLLNITPPRDLKQLQSILGKLNFARNFIPNFSELVKPLYNIIATAPGKYITWTTDNSQQLQNIISMLNSAENLEERNPEVRLIMKVNTSPSAGYIRFYNEFAKRPIMYLNYVYTKAEVKFTNTEKLLTTIHKGLIKALDLGMGQEILVYSPIVSMTKIQKTPLPERKALPIRWITWMSYLEDPRIQFHYDKTLPELQQVPTVTDDIIAKIKHPSEFSMVFYTDGSAIKHPNVNKSHNAGMGIAQVQFKPEFTVINTWSIPLGDHTAQLAEVAAVEFACKKALKIDGPVLIVTDSFYVAESVNKELPYWQSNGFFNNKKKPLKHVSKWKSIADCIQLKPDIIIIHEKGHQPTASTFHTEGNNLADKLATQGSYVVNAGKRTADGSEFEKRTADGSEFESPKKKAKVE

SEQ ID NO: 677 - protein, 2180 aa, synthetic construct
MPAAKRVKLDGGDKKYSIGLDIGTNSVGWAVITDEYKVPSKKFKVLGNTDRHSIKKNLIGALLFDSGETAEATRLKRTARRRYTRRKNRICYLQEIFSNEMAKVDDSFFHRLEESFLVEEDKKHERHPIFGNIVDEVAYHEKYPTIYHLRKKLVDSTDKADLRLIYLALAHMIKFRGHFLIEGDLNPDNSDVDKLFIQLVQTYNQLFEENPINASGVDAKAILSARLSKSRRLENLIAQLPGEKKNGLFGNLIALSLGLTPNFKSNFDLAEDAKLQLSKDTYDDDLDNLLAQIGDQYADLFLAAKNLSDAILLSDILRVNTEITKAPLSASMIKRYDEHHQDLTLLKALVRQQLPEKYKEIFFDQSKNGYAGYIDGGASQEEFYKFIKPILEKMDGTEELLVKLNREDLLRKQRTFDNGSIPHQIHLGELHAILRRQEDFYPFLKDNREKIEKILTFRIPYYVGPLARGNSRFAWMTRKSEETITPWNFEEVVDKGASAQSFIERMTNFDKNLPNEKVLPKHSLLYEYFTVYNELTKVKYVTEGMRKPAFLSGEQKKAIVDLLFKTNRKVTVKQLKEDYFKKIECFDSVEISGVEDRFNASLGTYHDLLKIIKDKDFLDNEENEDILEDIVLTLTLFEDREMIEERLKTYAHLFDDKVMKQLKRRRYTGWGRLSRKLINGIRDKQSGKTILDFLKSDGFANRNFMQLIHDDSLTFKEDIQKAQVSGQGDSLHEHIANLAGSPAIKKGILQTVKVVDELVKVMGRHKPENIVIEMARENQTTQKGQKNSRERMKRIEEGIKELGSQILKEHPVENTQLQNEKLYLYYLQNGRDMYVDQELDINRLSDYDVDHIVPQSFLKDDSIDNKVLTRSDKARGKSDNVPSEEVVKKMKNYWRQLLNAKLITQRKFDNLTKAERGGLSELDKAGFIKRQLVETRQITKHVAQILDSRMNTKYDENDKLIREVKVITLKSKLVSDFRKDFQFYKVREINNYHHAHDAYLNAVVGTALIKKYPKLESEFVYGDYKVYDVRKMIAKSEQEIGKATAKYFFYSNIMNFFKTEITLANGEIRKRPLIETNGETGEIVWDKGRDFATVRKVLSMPQVNIVKKTEVQTGGFSKESILPKRNSDKLIARKKDWDPKKYGGFDSPTVAYSVLVVAKVEKGKSKKLKSVKELLGITIMERSSFEKNPIDFLEAKGYKEVKKDLIIKLPKYSLFELENGRKRMLASAGELQKGNELALPSKYVNFLYLASHYEKLKGSPEDNEQKQLFVEQHKHYLDEIIEQISEFSKRVILADANLDKVLSAYNKHRDKPIREQAENIIHLFTLTNLGAPAAFKYFDTTIDRKRYTSTKEVLDATLIHQSITGLYETRIDLSQLGGDGGGSSGSSGSSGSSGSSGGMDPLQLLQPLEAEIKGTKLKAHWNSGATITCVPQAFLEEEVPIKNIWIKTIHGEKEQPVYYLTFKIQGRKVEAEVISSPYDYILVSPSDIPWLMKKPLQLTTLVPLQEYEERLLKQTMLTGSYKEKLQSLFLKYDALWQHWENQVGHRRIKPHHIATGTVNPRPQKQYPINPKAKASIQTVINDLLKQGVLIQQNSIMNTPVYPVPKPDGKWRMVLDYREVNKTIPLIAAQNQHSAGILSSIFRGKYKTTLDLSNGFWAHSITPESYWLTAFTWLGQQYCWTRLPQGFLNSPALFNADVVDLLKEVPNVQVYVDDIYISHDDPREHLEQLEKVFSLLLNAGYVVSLKKSEIAQHEVEFLGFNITKEGRGLTETFKQKLLNITPPRDLKQLQSILGKLNFARNFIPNFSELVKPLYNIIATAPGKYITWTTDNSQQLQNIISMLNSAENLEERNPEVRLIMKVNTSPSAGYIRFYNEFAKRPIMYLNYVYTKAEVKFTNTEKLLTTIHKGLIKALDLGMGQEILVYSPIVSMTKIQKTPLPERKALPIRWITWMSYLEDPRIQFHYDKTLPELQQVPTVTDDIIAKIKHPSEFSMVFYTDGSAIKHPNVNKSHNAGMGIAQVQFKPEFTVINTWSIPLGDHTAQLAEVAAVEFACKKALKIDGPVLIVTDSFYVAESVNKELPYWQSNGFFNNKKKPLKHVSKWKSIADCIQLKPDIIIIHEKGHQPTASTFHTEGNNLADKLATQGSYVVNAGKRTADGSEFEKRTADGSEFESPKKKAKVE

SEQ ID NO: 678 - protein, 2174 aa, synthetic construct
MPAAKRVKLDGGDKKYSIGLDIGTNSVGWAVITDEYKVPSKKFKVLGNTDRHSIKKNLIGALLFDSGETAEATRLKRTARRRYTRRKNRICYLQEIFSNEMAKVDDSFFHRLEESFLVEEDKKHERHPIFGNIVDEVAYHEKYPTIYHLRKKLVDSTDKADLRLIYLALAHMIKFRGHFLIEGDLNPDNSDVDKLFIQLVQTYNQLFEENPINASGVDAKAILSARLSKSRRLENLIAQLPGEKKNGLFGNLIALSLGLTPNFKSNFDLAEDAKLQLSKDTYDDDLDNLLAQIGDQYADLFLAAKNLSDAILLSDILRVNTEITKAPLSASMIKRYDEHHQDLTLLKALVRQQLPEKYKEIFFDQSKNGYAGYIDGGASQEEFYKFIKPILEKMDGTEELLVKLNREDLLRKQRTFDNGSIPHQIHLGELHAILRRQEDFYPFLKDNREKIEKILTFRIPYYVGPLARGNSRFAWMTRKSEETITPWNFEEVVDKGASAQSFIERMTNFDKNLPNEKVLPKHSLLYEYFTVYNELTKVKYVTEGMRKPAFLSGEQKKAIVDLLFKTNRKVTVKQLKEDYFKKIECFDSVEISGVEDRFNASLGTYHDLLKIIKDKDFLDNEENEDILEDIVLTLTLFEDREMIEERLKTYAHLFDDKVMKQLKRRRYTGWGRLSRKLINGIRDKQSGKTILDFLKSDGFANRNFMQLIHDDSLTFKEDIQKAQVSGQGDSLHEHIANLAGSPAIKKGILQTVKVVDELVKVMGRHKPENIVIEMARENQTTQKGQKNSRERMKRIEEGIKELGSQILKEHPVENTQLQNEKLYLYYLQNGRDMYVDQELDINRLSDYDVDHIVPQSFLKDDSIDNKVLTRSDKARGKSDNVPSEEVVKKMKNYWRQLLNAKLITQRKFDNLTKAERGGLSELDKAGFIKRQLVETRQITKHVAQILDSRMNTKYDENDKLIREVKVITLKSKLVSDFRKDFQFYKVREINNYHHAHDAYLNAVVGTALIKKYPKLESEFVYGDYKVYDVRKMIAKSEQEIGKATAKYFFYSNIMNFFKTEITLANGEIRKRPLIETNGETGEIVWDKGRDFATVRKVLSMPQVNIVKKTEVQTGGFSKESILPKRNSDKLIARKKDWDPKKYGGFDSPTVAYSVLVVAKVEKGKSKKLKSVKELLGITIMERSSFEKNPIDFLEAKGYKEVKKDLIIKLPKYSLFELENGRKRMLASAGELQKGNELALPSKYVNFLYLASHYEKLKGSPEDNEQKQLFVEQHKHYLDEIIEQISEFSKRVILADANLDKVLSAYNKHRDKPIREQAENIIHLFTLTNLGAPAAFKYFDTTIDRKRYTSTKEVLDATLIHQSITGLYETRIDLSQLGGDGGGGGPAPGGSGGMDPLQLLQPLEAEIKGTKLKAHWNSGATITCVPQAFLEEEVPIKNIWIKTIHGEKEQPVYYLTFKIQGRKVEAEVISSPYDYILVSPSDIPWLMKKPLQLTTLVPLQEYEERLLKQTMLTGSYKEKLQSLFLKYDALWQHWENQVGHRRIKPHHIATGTVNPRPQKQYPINPKAKASIQTVINDLLKQGVLIQQNSIMNTPVYPVPKPDGKWRMVLDYREVNKTIPLIAAQNQHSAGILSSIFRGKYKTTLDLSNGFWAHSITPESYWLTAFTWLGQQYCWTRLPQGFLNSPALFNADVVDLLKEVPNVQVYVDDIYISHDDPREHLEQLEKVFSLLLNAGYVVSLKKSEIAQHEVEFLGFNITKEGRGLTETFKQKLLNITPPRDLKQLQSILGKLNFARNFIPNFSELVKPLYNIIATAPGKYITWTTDNSQQLQNIISMLNSAENLEERNPEVRLIMKVNTSPSAGYIRFYNEFAKRPIMYLNYVYTKAEVKFTNTEKLLTTIHKGLIKALDLGMGQEILVYSPIVSMTKIQKTPLPERKALPIRWITWMSYLEDPRIQFHYDKTLPELQQVPTVTDDIIAKIKHPSEFSMVFYTDGSAIKHPNVNKSHNAGMGIAQVQFKPEFTVINTWSIPLGDHTAQLAEVAAVEFACKKALKIDGPVLIVTDSFYVAESVNKELPYWQSNGFFNNKKKPLKHVSKWKSIADCIQLKPDIIIIHEKGHQPTASTFHTEGNNLADKLATQGSYVVNAGKRTADGSEFEKRTADGSEFESPKKKAKVE

SEQ ID NO: 679 - protein, 2176 aa, synthetic construct
MPAAKRVKLDGGDKKYSIGLDIGTNSVGWAVITDEYKVPSKKFKVLGNTDRHSIKKNLIGALLFDSGETAEATRLKRTARRRYTRRKNRICYLQEIFSNEMAKVDDSFFHRLEESFLVEEDKKHERHPIFGNIVDEVAYHEKYPTIYHLRKKLVDSTDKADLRLIYLALAHMIKFRGHFLIEGDLNPDNSDVDKLFIQLVQTYNQLFEENPINASGVDAKAILSARLSKSRRLENLIAQLPGEKKNGLFGNLIALSLGLTPNFKSNFDLAEDAKLQLSKDTYDDDLDNLLAQIGDQYADLFLAAKNLSDAILLSDILRVNTEITKAPLSASMIKRYDEHHQDLTLLKALVRQQLPEKYKEIFFDQSKNGYAGYIDGGASQEEFYKFIKPILEKMDGTEELLVKLNREDLLRKQRTFDNGSIPHQIHLGELHAILRRQEDFYPFLKDNREKIEKILTFRIPYYVGPLARGNSRFAWMTRKSEETITPWNFEEVVDKGASAQSFIERMTNFDKNLPNEKVLPKHSLLYEYFTVYNELTKVKYVTEGMRKPAFLSGEQKKAIVDLLFKTNRKVTVKQLKEDYFKKIECFDSVEISGVEDRFNASLGTYHDLLKIIKDKDFLDNEENEDILEDIVLTLTLFEDREMIEERLKTYAHLFDDKVMKQLKRRRYTGWGRLSRKLINGIRDKQSGKTILDFLKSDGFANRNFMQLIHDDSLTFKEDIQKAQVSGQGDSLHEHIANLAGSPAIKKGILQTVKVVDELVKVMGRHKPENIVIEMARENQTTQKGQKNSRERMKRIEEGIKELGSQILKEHPVENTQLQNEKLYLYYLQNGRDMYVDQELDINRLSDYDVDHIVPQSFLKDDSIDNKVLTRSDKARGKSDNVPSEEVVKKMKNYWRQLLNAKLITQRKFDNLTKAERGGLSELDKAGFIKRQLVETRQITKHVAQILDSRMNTKYDENDKLIREVKVITLKSKLVSDFRKDFQFYKVREINNYHHAHDAYLNAVVGTALIKKYPKLESEFVYGDYKVYDVRKMIAKSEQEIGKATAKYFFYSNIMNFFKTEITLANGEIRKRPLIETNGETGEIVWDKGRDFATVRKVLSMPQVNIVKKTEVQTGGFSKESILPKRNSDKLIARKKDWDPKKYGGFDSPTVAYSVLVVAKVEKGKSKKLKSVKELLGITIMERSSFEKNPIDFLEAKGYKEVKKDLIIKLPKYSLFELENGRKRMLASAGELQKGNELALPSKYVNFLYLASHYEKLKGSPEDNEQKQLFVEQHKHYLDEIIEQISEFSKRVILADANLDKVLSAYNKHRDKPIREQAENIIHLFTLTNLGAPAAFKYFDTTIDRKRYTSTKEVLDATLIHQSITGLYETRIDLSQLGGDGGGGSGSSEAAAKGGMDPLQLLQPLEAEIKGTKLKAHWNSGATITCVPQAFLEEEVPIKNIWIKTIHGEKEQPVYYLTFKIQGRKVEAEVISSPYDYILVSPSDIPWLMKKPLQLTTLVPLQEYEERLLKQTMLTGSYKEKLQSLFLKYDALWQHWENQVGHRRIKPHHIATGTVNPRPQKQYPINPKAKASIQTVINDLLKQGVLIQQNSIMNTPVYPVPKPDGKWRMVLDYREVNKTIPLIAAQNQHSAGILSSIFRGKYKTTLDLSNGFWAHSITPESYWLTAFTWLGQQYCWTRLPQGFLNSPALFNADVVDLLKEVPNVQVYVDDIYISHDDPREHLEQLEKVFSLLLNAGYVVSLKKSEIAQHEVEFLGFNITKEGRGLTETFKQKLLNITPPRDLKQLQSILGKLNFARNFIPNFSELVKPLYNIIATAPGKYITWTTDNSQQLQNIISMLNSAENLEERNPEVRLIMKVNTSPSAGYIRFYNEFAKRPIMYLNYVYTKAEVKFTNTEKLLTTIHKGLIKALDLGMGQEILVYSPIVSMTKIQKTPLPERKALPIRWITWMSYLEDPRIQFHYDKTLPELQQVPTVTDDIIAKIKHPSEFSMVFYTDGSAIKHPNVNKSHNAGMGIAQVQFKPEFTVINTWSIPLGDHTAQLAEVAAVEFACKKALKIDGPVLIVTDSFYVAESVNKELPYWQSNGFFNNKKKPLKHVSKWKSIADCIQLKPDIIIIHEKGHQPTASTFHTEGNNLADKLATQGSYVVNAGKRTADGSEFEKRTADGSEFESPKKKAKVE

SEQ ID NO: 680 - protein, 2176 aa, synthetic construct
MPAAKRVKLDGGDKKYSIGLDIGTNSVGWAVITDEYKVPSKKFKVLGNTDRHSIKKNLIGALLFDSGETAEATRLKRTARRRYTRRKNRICYLQEIFSNEMAKVDDSFFHRLEESFLVEEDKKHERHPIFGNIVDEVAYHEKYPTIYHLRKKLVDSTDKADLRLIYLALAHMIKFRGHFLIEGDLNPDNSDVDKLFIQLVQTYNQLFEENPINASGVDAKAILSARLSKSRRLENLIAQLPGEKKNGLFGNLIALSLGLTPNFKSNFDLAEDAKLQLSKDTYDDDLDNLLAQIGDQYADLFLAAKNLSDAILLSDILRVNTEITKAPLSASMIKRYDEHHQDLTLLKALVRQQLPEKYKEIFFDQSKNGYAGYIDGGASQEEFYKFIKPILEKMDGTEELLVKLNREDLLRKQRTFDNGSIPHQIHLGELHAILRRQEDFYPFLKDNREKIEKILTFRIPYYVGPLARGNSRFAWMTRKSEETITPWNFEEVVDKGASAQSFIERMTNFDKNLPNEKVLPKHSLLYEYFTVYNELTKVKYVTEGMRKPAFLSGEQKKAIVDLLFKTNRKVTVKQLKEDYFKKIECFDSVEISGVEDRFNASLGTYHDLLKIIKDKDFLDNEENEDILEDIVLTLTLFEDREMIEERLKTYAHLFDDKVMKQLKRRRYTGWGRLSRKLINGIRDKQSGKTILDFLKSDGFANRNFMQLIHDDSLTFKEDIQKAQVSGQGDSLHEHIANLAGSPAIKKGILQTVKVVDELVKVMGRHKPENIVIEMARENQTTQKGQKNSRERMKRIEEGIKELGSQILKEHPVENTQLQNEKLYLYYLQNGRDMYVDQELDINRLSDYDVDHIVPQSFLKDDSIDNKVLTRSDKARGKSDNVPSEEVVKKMKNYWRQLLNAKLITQRKFDNLTKAERGGLSELDKAGFIKRQLVETRQITKHVAQILDSRMNTKYDENDKLIREVKVITLKSKLVSDFRKDFQFYKVREINNYHHAHDAYLNAVVGTALIKKYPKLESEFVYGDYKVYDVRKMIAKSEQEIGKATAKYFFYSNIMNFFKTEITLANGEIRKRPLIETNGETGEIVWDKGRDFATVRKVLSMPQVNIVKKTEVQTGGFSKESILPKRNSDKLIARKKDWDPKKYGGFDSPTVAYSVLVVAKVEKGKSKKLKSVKELLGITIMERSSFEKNPIDFLEAKGYKEVKKDLIIKLPKYSLFELENGRKRMLASAGELQKGNELALPSKYVNFLYLASHYEKLKGSPEDNEQKQLFVEQHKHYLDEIIEQISEFSKRVILADANLDKVLSAYNKHRDKPIREQAENIIHLFTLTNLGAPAAFKYFDTTIDRKRYTSTKEVLDATLIHQSITGLYETRIDLSQLGGDGGEAAAKGGSPAPGGMDPLQLLQPLEAEIKGTKLKAHWNSGATITCVPQAFLEEEVPIKNIWIKTIHGEKEQPVYYLTFKIQGRKVEAEVISSPYDYILVSPSDIPWLMKKPLQLTTLVPLQEYEERLLKQTMLTGSYKEKLQSLFLKYDALWQHWENQVGHRRIKPHHIATGTVNPRPQKQYPINPKAKASIQTVINDLLKQGVLIQQNSIMNTPVYPVPKPDGKWRMVLDYREVNKTIPLIAAQNQHSAGILSSIFRGKYKTTLDLSNGFWAHSITPESYWLTAFTWLGQQYCWTRLPQGFLNSPALFNADVVDLLKEVPNVQVYVDDIYISHDDPREHLEQLEKVFSLLLNAGYVVSLKKSEIAQHEVEFLGFNITKEGRGLTETFKQKLLNITPPRDLKQLQSILGKLNFARNFIPNFSELVKPLYNIIATAPGKYITWTTDNSQQLQNIISMLNSAENLEERNPEVRLIMKVNTSPSAGYIRFYNEFAKRPIMYLNYVYTKAEVKFTNTEKLLTTIHKGLIKALDLGMGQEILVYSPIVSMTKIQKTPLPERKALPIRWITWMSYLEDPRIQFHYDKTLPELQQVPTVTDDIIAKIKHPSEFSMVFYTDGSAIKHPNVNKSHNAGMGIAQVQFKPEFTVINTWSIPLGDHTAQLAEVAAVEFACKKALKIDGPVLIVTDSFYVAESVNKELPYWQSNGFFNNKKKPLKHVSKWKSIADCIQLKPDIIIIHEKGHQPTASTFHTEGNNLADKLATQGSYVVNAGKRTADGSEFEKRTADGSEFESPKKKAKVE

SEQ ID NO: 681 - protein, 2175 aa, synthetic construct
MPAAKRVKLDGGDKKYSIGLDIGTNSVGWAVITDEYKVPSKKFKVLGNTDRHSIKKNLIGALLFDSGETAEATRLKRTARRRYTRRKNRICYLQEIFSNEMAKVDDSFFHRLEESFLVEEDKKHERHPIFGNIVDEVAYHEKYPTIYHLRKKLVDSTDKADLRLIYLALAHMIKFRGHFLIEGDLNPDNSDVDKLFIQLVQTYNQLFEENPINASGVDAKAILSARLSKSRRLENLIAQLPGEKKNGLFGNLIALSLGLTPNFKSNFDLAEDAKLQLSKDTYDDDLDNLLAQIGDQYADLFLAAKNLSDAILLSDILRVNTEITKAPLSASMIKRYDEHHQDLTLLKALVRQQLPEKYKEIFFDQSKNGYAGYIDGGASQEEFYKFIKPILEKMDGTEELLVKLNREDLLRKQRTFDNGSIPHQIHLGELHAILRRQEDFYPFLKDNREKIEKILTFRIPYYVGPLARGNSRFAWMTRKSEETITPWNFEEVVDKGASAQSFIERMTNFDKNLPNEKVLPKHSLLYEYFTVYNELTKVKYVTEGMRKPAFLSGEQKKAIVDLLFKTNRKVTVKQLKEDYFKKIECFDSVEISGVEDRFNASLGTYHDLLKIIKDKDFLDNEENEDILEDIVLTLTLFEDREMIEERLKTYAHLFDDKVMKQLKRRRYTGWGRLSRKLINGIRDKQSGKTILDFLKSDGFANRNFMQLIHDDSLTFKEDIQKAQVSGQGDSLHEHIANLAGSPAIKKGILQTVKVVDELVKVMGRHKPENIVIEMARENQTTQKGQKNSRERMKRIEEGIKELGSQILKEHPVENTQLQNEKLYLYYLQNGRDMYVDQELDINRLSDYDVDHIVPQSFLKDDSIDNKVLTRSDKARGKSDNVPSEEVVKKMKNYWRQLLNAKLITQRKFDNLTKAERGGLSELDKAGFIKRQLVETRQITKHVAQILDSRMNTKYDENDKLIREVKVITLKSKLVSDFRKDFQFYKVREINNYHHAHDAYLNAVVGTALIKKYPKLESEFVYGDYKVYDVRKMIAKSEQEIGKATAKYFFYSNIMNFFKTEITLANGEIRKRPLIETNGETGEIVWDKGRDFATVRKVLSMPQVNIVKKTEVQTGGFSKESILPKRNSDKLIARKKDWDPKKYGGFDSPTVAYSVLVVAKVEKGKSKKLKSVKELLGITIMERSSFEKNPIDFLEAKGYKEVKKDLIIKLPKYSLFELENGRKRMLASAGELQKGNELALPSKYVNFLYLASHYEKLKGSPEDNEQKQLFVEQHKHYLDEIIEQISEFSKRVILADANLDKVLSAYNKHRDKPIREQAENIIHLFTLTNLGAPAAFKYFDTTIDRKRYTSTKEVLDATLIHQSITGLYETRIDLSQLGGDGGGGGGSGGGGSGGMDPLQLLQPLEAEIKGTKLKAHWNSGATITCVPQAFLEEEVPIKNIWIKTIHGEKEQPVYYLTFKIQGRKVEAEVISSPYDYILVSPSDIPWLMKKPLQLTTLVPLQEYEERLLKQTMLTGSYKEKLQSLFLKYDALWQHWENQVGHRRIKPHHIATGTVNPRPQKQYPINPKAKASIQTVINDLLKQGVLIQQNSIMNTPVYPVPKPDGKWRMVLDYREVNKTIPLIAAQNQHSAGILSSIFRGKYKTTLDLSNGFWAHSITPESYWLTAFTWLGQQYCWTRLPQGFLNSPALFNADVVDLLKEVPNVQVYVDDIYISHDDPREHLEQLEKVFSLLLNAGYVVSLKKSEIAQHEVEFLGFNITKEGRGLTETFKQKLLNITPPRDLKQLQSILGKLNFARNFIPNFSELVKPLYNIIATAPGKYITWTTDNSQQLQNIISMLNSAENLEERNPEVRLIMKVNTSPSAGYIRFYNEFAKRPIMYLNYVYTKAEVKFTNTEKLLTTIHKGLIKALDLGMGQEILVYSPIVSMTKIQKTPLPERKALPIRWITWMSYLEDPRIQFHYDKTLPELQQVPTVTDDIIAKIKHPSEFSMVFYTDGSAIKHPNVNKSHNAGMGIAQVQFKPEFTVINTWSIPLGDHTAQLAEVAAVEFACKKALKIDGPVLIVTDSFYVAESVNKELPYWQSNGFFNNKKKPLKHVSKWKSIADCIQLKPDIIIIHEKGHQPTASTFHTEGNNLADKLATQGSYVVNAGKRTADGSEFEKRTADGSEFESPKKKAKVE

SEQ ID NO: 682 - protein, 2171 aa, synthetic construct
MPAAKRVKLDGGDKKYSIGLDIGTNSVGWAVITDEYKVPSKKFKVLGNTDRHSIKKNLIGALLFDSGETAEATRLKRTARRRYTRRKNRICYLQEIFSNEMAKVDDSFFHRLEESFLVEEDKKHERHPIFGNIVDEVAYHEKYPTIYHLRKKLVDSTDKADLRLIYLALAHMIKFRGHFLIEGDLNPDNSDVDKLFIQLVQTYNQLFEENPINASGVDAKAILSARLSKSRRLENLIAQLPGEKKNGLFGNLIALSLGLTPNFKSNFDLAEDAKLQLSKDTYDDDLDNLLAQIGDQYADLFLAAKNLSDAILLSDILRVNTEITKAPLSASMIKRYDEHHQDLTLLKALVRQQLPEKYKEIFFDQSKNGYAGYIDGGASQEEFYKFIKPILEKMDGTEELLVKLNREDLLRKQRTFDNGSIPHQIHLGELHAILRRQEDFYPFLKDNREKIEKILTFRIPYYVGPLARGNSRFAWMTRKSEETITPWNFEEVVDKGASAQSFIERMTNFDKNLPNEKVLPKHSLLYEYFTVYNELTKVKYVTEGMRKPAFLSGEQKKAIVDLLFKTNRKVTVKQLKEDYFKKIECFDSVEISGVEDRFNASLGTYHDLLKIIKDKDFLDNEENEDILEDIVLTLTLFEDREMIEERLKTYAHLFDDKVMKQLKRRRYTGWGRLSRKLINGIRDKQSGKTILDFLKSDGFANRNFMQLIHDDSLTFKEDIQKAQVSGQGDSLHEHIANLAGSPAIKKGILQTVKVVDELVKVMGRHKPENIVIEMARENQTTQKGQKNSRERMKRIEEGIKELGSQILKEHPVENTQLQNEKLYLYYLQNGRDMYVDQELDINRLSDYDVDHIVPQSFLKDDSIDNKVLTRSDKARGKSDNVPSEEVVKKMKNYWRQLLNAKLITQRKFDNLTKAERGGLSELDKAGFIKRQLVETRQITKHVAQILDSRMNTKYDENDKLIREVKVITLKSKLVSDFRKDFQFYKVREINNYHHAHDAYLNAVVGTALIKKYPKLESEFVYGDYKVYDVRKMIAKSEQEIGKATAKYFFYSNIMNFFKTEITLANGEIRKRPLIETNGETGEIVWDKGRDFATVRKVLSMPQVNIVKKTEVQTGGFSKESILPKRNSDKLIARKKDWDPKKYGGFDSPTVAYSVLVVAKVEKGKSKKLKSVKELLGITIMERSSFEKNPIDFLEAKGYKEVKKDLIIKLPKYSLFELENGRKRMLASAGELQKGNELALPSKYVNFLYLASHYEKLKGSPEDNEQKQLFVEQHKHYLDEIIEQISEFSKRVILADANLDKVLSAYNKHRDKPIREQAENIIHLFTLTNLGAPAAFKYFDTTIDRKRYTSTKEVLDATLIHQSITGLYETRIDLSQLGGDGGGGSGGSGGMDPLQLLQPLEAEIKGTKLKAHWNSGATITCVPQAFLEEEVPIKNIWIKTIHGEKEQPVYYLTFKIQGRKVEAEVISSPYDYILVSPSDIPWLMKKPLQLTTLVPLQEYEERLLKQTMLTGSYKEKLQSLFLKYDALWQHWENQVGHRRIKPHHIATGTVNPRPQKQYPINPKAKASIQTVINDLLKQGVLIQQNSIMNTPVYPVPKPDGKWRMVLDYREVNKTIPLIAAQNQHSAGILSSIFRGKYKTTLDLSNGFWAHSITPESYWLTAFTWLGQQYCWTRLPQGFLNSPALFNADVVDLLKEVPNVQVYVDDIYISHDDPREHLEQLEKVFSLLLNAGYVVSLKKSEIAQHEVEFLGFNITKEGRGLTETFKQKLLNITPPRDLKQLQSILGKLNFARNFIPNFSELVKPLYNIIATAPGKYITWTTDNSQQLQNIISMLNSAENLEERNPEVRLIMKVNTSPSAGYIRFYNEFAKRPIMYLNYVYTKAEVKFTNTEKLLTTIHKGLIKALDLGMGQEILVYSPIVSMTKIQKTPLPERKALPIRWITWMSYLEDPRIQFHYDKTLPELQQVPTVTDDIIAKIKHPSEFSMVFYTDGSAIKHPNVNKSHNAGMGIAQVQFKPEFTVINTWSIPLGDHTAQLAEVAAVEFACKKALKIDGPVLIVTDSFYVAESVNKELPYWQSNGFFNNKKKPLKHVSKWKSIADCIQLKPDIIIIHEKGHQPTASTFHTEGNNLADKLATQGSYVVNAGKRTADGSEFEKRTADGSEFESPKKKAKVE

SEQ ID NO: 683 - protein, 2174 aa, synthetic construct
MPAAKRVKLDGGDKKYSIGLDIGTNSVGWAVITDEYKVPSKKFKVLGNTDRHSIKKNLIGALLFDSGETAEATRLKRTARRRYTRRKNRICYLQEIFSNEMAKVDDSFFHRLEESFLVEEDKKHERHPIFGNIVDEVAYHEKYPTIYHLRKKLVDSTDKADLRLIYLALAHMIKFRGHFLIEGDLNPDNSDVDKLFIQLVQTYNQLFEENPINASGVDAKAILSARLSKSRRLENLIAQLPGEKKNGLFGNLIALSLGLTPNFKSNFDLAEDAKLQLSKDTYDDDLDNLLAQIGDQYADLFLAAKNLSDAILLSDILRVNTEITKAPLSASMIKRYDEHHQDLTLLKALVRQQLPEKYKEIFFDQSKNGYAGYIDGGASQEEFYKFIKPILEKMDGTEELLVKLNREDLLRKQRTFDNGSIPHQIHLGELHAILRRQEDFYPFLKDNREKIEKILTFRIPYYVGPLARGNSRFAWMTRKSEETITPWNFEEVVDKGASAQSFIERMTNFDKNLPNEKVLPKHSLLYEYFTVYNELTKVKYVTEGMRKPAFLSGEQKKAIVDLLFKTNRKVTVKQLKEDYFKKIECFDSVEISGVEDRFNASLGTYHDLLKIIKDKDFLDNEENEDILEDIVLTLTLFEDREMIEERLKTYAHLFDDKVMKQLKRRRYTGWGRLSRKLINGIRDKQSGKTILDFLKSDGFANRNFMQLIHDDSLTFKEDIQKAQVSGQGDSLHEHIANLAGSPAIKKGILQTVKVVDELVKVMGRHKPENIVIEMARENQTTQKGQKNSRERMKRIEEGIKELGSQILKEHPVENTQLQNEKLYLYYLQNGRDMYVDQELDINRLSDYDVDHIVPQSFLKDDSIDNKVLTRSDKARGKSDNVPSEEVVKKMKNYWRQLLNAKLITQRKFDNLTKAERGGLSELDKAGFIKRQLVETRQITKHVAQILDSRMNTKYDENDKLIREVKVITLKSKLVSDFRKDFQFYKVREINNYHHAHDAYLNAVVGTALIKKYPKLESEFVYGDYKVYDVRKMIAKSEQEIGKATAKYFFYSNIMNFFKTEITLANGEIRKRPLIETNGETGEIVWDKGRDFATVRKVLSMPQVNIVKKTEVQTGGFSKESILPKRNSDKLIARKKDWDPKKYGGFDSPTVAYSVLVVAKVEKGKSKKLKSVKELLGITIMERSSFEKNPIDFLEAKGYKEVKKDLIIKLPKYSLFELENGRKRMLASAGELQKGNELALPSKYVNFLYLASHYEKLKGSPEDNEQKQLFVEQHKHYLDEIIEQISEFSKRVILADANLDKVLSAYNKHRDKPIREQAENIIHLFTLTNLGAPAAFKYFDTTIDRKRYTSTKEVLDATLIHQSITGLYETRIDLSQLGGDGGGSSGGSPAPGGMDPLQLLQPLEAEIKGTKLKAHWNSGATITCVPQAFLEEEVPIKNIWIKTIHGEKEQPVYYLTFKIQGRKVEAEVISSPYDYILVSPSDIPWLMKKPLQLTTLVPLQEYEERLLKQTMLTGSYKEKLQSLFLKYDALWQHWENQVGHRRIKPHHIATGTVNPRPQKQYPINPKAKASIQTVINDLLKQGVLIQQNSIMNTPVYPVPKPDGKWRMVLDYREVNKTIPLIAAQNQHSAGILSSIFRGKYKTTLDLSNGFWAHSITPESYWLTAFTWLGQQYCWTRLPQGFLNSPALFNADVVDLLKEVPNVQVYVDDIYISHDDPREHLEQLEKVFSLLLNAGYVVSLKKSEIAQHEVEFLGFNITKEGRGLTETFKQKLLNITPPRDLKQLQSILGKLNFARNFIPNFSELVKPLYNIIATAPGKYITWTTDNSQQLQNIISMLNSAENLEERNPEVRLIMKVNTSPSAGYIRFYNEFAKRPIMYLNYVYTKAEVKFTNTEKLLTTIHKGLIKALDLGMGQEILVYSPIVSMTKIQKTPLPERKALPIRWITWMSYLEDPRIQFHYDKTLPELQQVPTVTDDIIAKIKHPSEFSMVFYTDGSAIKHPNVNKSHNAGMGIAQVQFKPEFTVINTWSIPLGDHTAQLAEVAAVEFACKKALKIDGPVLIVTDSFYVAESVNKELPYWQSNGFFNNKKKPLKHVSKWKSIADCIQLKPDIIIIHEKGHQPTASTFHTEGNNLADKLATQGSYVVNAGKRTADGSEFEKRTADGSEFESPKKKAKVE

SEQ ID NO: 684 - protein, 2176 aa, synthetic construct
MPAAKRVKLDGGDKKYSIGLDIGTNSVGWAVITDEYKVPSKKFKVLGNTDRHSIKKNLIGALLFDSGETAEATRLKRTARRRYTRRKNRICYLQEIFSNEMAKVDDSFFHRLEESFLVEEDKKHERHPIFGNIVDEVAYHEKYPTIYHLRKKLVDSTDKADLRLIYLALAHMIKFRGHFLIEGDLNPDNSDVDKLFIQLVQTYNQLFEENPINASGVDAKAILSARLSKSRRLENLIAQLPGEKKNGLFGNLIALSLGLTPNFKSNFDLAEDAKLQLSKDTYDDDLDNLLAQIGDQYADLFLAAKNLSDAILLSDILRVNTEITKAPLSASMIKRYDEHHQDLTLLKALVRQQLPEKYKEIFFDQSKNGYAGYIDGGASQEEFYKFIKPILEKMDGTEELLVKLNREDLLRKQRTFDNGSIPHQIHLGELHAILRRQEDFYPFLKDNREKIEKILTFRIPYYVGPLARGNSRFAWMTRKSEETITPWNFEEVVDKGASAQSFIERMTNFDKNLPNEKVLPKHSLLYEYFTVYNELTKVKYVTEGMRKPAFLSGEQKKAIVDLLFKTNRKVTVKQLKEDYFKKIECFDSVEISGVEDRFNASLGTYHDLLKIIKDKDFLDNEENEDILEDIVLTLTLFEDREMIEERLKTYAHLFDDKVMKQLKRRRYTGWGRLSRKLINGIRDKQSGKTILDFLKSDGFANRNFMQLIHDDSLTFKEDIQKAQVSGQGDSLHEHIANLAGSPAIKKGILQTVKVVDELVKVMGRHKPENIVIEMARENQTTQKGQKNSRERMKRIEEGIKELGSQILKEHPVENTQLQNEKLYLYYLQNGRDMYVDQELDINRLSDYDVDHIVPQSFLKDDSIDNKVLTRSDKARGKSDNVPSEEVVKKMKNYWRQLLNAKLITQRKFDNLTKAERGGLSELDKAGFIKRQLVETRQITKHVAQILDSRMNTKYDENDKLIREVKVITLKSKLVSDFRKDFQFYKVREINNYHHAHDAYLNAVVGTALIKKYPKLESEFVYGDYKVYDVRKMIAKSEQEIGKATAKYFFYSNIMNFFKTEITLANGEIRKRPLIETNGETGEIVWDKGRDFATVRKVLSMPQVNIVKKTEVQTGGFSKESILPKRNSDKLIARKKDWDPKKYGGFDSPTVAYSVLVVAKVEKGKSKKLKSVKELLGITIMERSSFEKNPIDFLEAKGYKEVKKDLIIKLPKYSLFELENGRKRMLASAGELQKGNELALPSKYVNFLYLASHYEKLKGSPEDNEQKQLFVEQHKHYLDEIIEQISEFSKRVILADANLDKVLSAYNKHRDKPIREQAENIIHLFTLTNLGAPAAFKYFDTTIDRKRYTSTKEVLDATLIHQSITGLYETRIDLSQLGGDGGGGSEAAAKGSSGGMDPLQLLQPLEAEIKGTKLKAHWNSGATITCVPQAFLEEEVPIKNIWIKTIHGEKEQPVYYLTFKIQGRKVEAEVISSPYDYILVSPSDIPWLMKKPLQLTTLVPLQEYEERLLKQTMLTGSYKEKLQSLFLKYDALWQHWENQVGHRRIKPHHIATGTVNPRPQKQYPINPKAKASIQTVINDLLKQGVLIQQNSIMNTPVYPVPKPDGKWRMVLDYREVNKTIPLIAAQNQHSAGILSSIFRGKYKTTLDLSNGFWAHSITPESYWLTAFTWLGQQYCWTRLPQGFLNSPALFNADVVDLLKEVPNVQVYVDDIYISHDDPREHLEQLEKVFSLLLNAGYVVSLKKSEIAQHEVEFLGFNITKEGRGLTETFKQKLLNITPPRDLKQLQSILGKLNFARNFIPNFSELVKPLYNIIATAPGKYITWTTDNSQQLQNIISMLNSAENLEERNPEVRLIMKVNTSPSAGYIRFYNEFAKRPIMYLNYVYTKAEVKFTNTEKLLTTIHKGLIKALDLGMGQEILVYSPIVSMTKIQKTPLPERKALPIRWITWMSYLEDPRIQFHYDKTLPELQQVPTVTDDIIAKIKHPSEFSMVFYTDGSAIKHPNVNKSHNAGMGIAQVQFKPEFTVINTWSIPLGDHTAQLAEVAAVEFACKKALKIDGPVLIVTDSFYVAESVNKELPYWQSNGFFNNKKKPLKHVSKWKSIADCIQLKPDIIIIHEKGHQPTASTFHTEGNNLADKLATQGSYVVNAGKRTADGSEFEKRTADGSEFESPKKKAKVE

SEQ ID NO: 685 - protein, 2176 aa, synthetic construct
MPAAKRVKLDGGDKKYSIGLDIGTNSVGWAVITDEYKVPSKKFKVLGNTDRHSIKKNLIGALLFDSGETAEATRLKRTARRRYTRRKNRICYLQEIFSNEMAKVDDSFFHRLEESFLVEEDKKHERHPIFGNIVDEVAYHEKYPTIYHLRKKLVDSTDKADLRLIYLALAHMIKFRGHFLIEGDLNPDNSDVDKLFIQLVQTYNQLFEENPINASGVDAKAILSARLSKSRRLENLIAQLPGEKKNGLFGNLIALSLGLTPNFKSNFDLAEDAKLQLSKDTYDDDLDNLLAQIGDQYADLFLAAKNLSDAILLSDILRVNTEITKAPLSASMIKRYDEHHQDLTLLKALVRQQLPEKYKEIFFDQSKNGYAGYIDGGASQEEFYKFIKPILEKMDGTEELLVKLNREDLLRKQRTFDNGSIPHQIHLGELHAILRRQEDFYPFLKDNREKIEKILTFRIPYYVGPLARGNSRFAWMTRKSEETITPWNFEEVVDKGASAQSFIERMTNFDKNLPNEKVLPKHSLLYEYFTVYNELTKVKYVTEGMRKPAFLSGEQKKAIVDLLFKTNRKVTVKQLKEDYFKKIECFDSVEISGVEDRFNASLGTYHDLLKIIKDKDFLDNEENEDILEDIVLTLTLFEDREMIEERLKTYAHLFDDKVMKQLKRRRYTGWGRLSRKLINGIRDKQSGKTILDFLKSDGFANRNFMQLIHDDSLTFKEDIQKAQVSGQGDSLHEHIANLAGSPAIKKGILQTVKVVDELVKVMGRHKPENIVIEMARENQTTQKGQKNSRERMKRIEEGIKELGSQILKEHPVENTQLQNEKLYLYYLQNGRDMYVDQELDINRLSDYDVDHIVPQSFLKDDSIDNKVLTRSDKARGKSDNVPSEEVVKKMKNYWRQLLNAKLITQRKFDNLTKAERGGLSELDKAGFIKRQLVETRQITKHVAQILDSRMNTKYDENDKLIREVKVITLKSKLVSDFRKDFQFYKVREINNYHHAHDAYLNAVVGTALIKKYPKLESEFVYGDYKVYDVRKMIAKSEQEIGKATAKYFFYSNIMNFFKTEITLANGEIRKRPLIETNGETGEIVWDKGRDFATVRKVLSMPQVNIVKKTEVQTGGFSKESILPKRNSDKLIARKKDWDPKKYGGFDSPTVAYSVLVVAKVEKGKSKKLKSVKELLGITIMERSSFEKNPIDFLEAKGYKEVKKDLIIKLPKYSLFELENGRKRMLASAGELQKGNELALPSKYVNFLYLASHYEKLKGSPEDNEQKQLFVEQHKHYLDEIIEQISEFSKRVILADANLDKVLSAYNKHRDKPIREQAENIIHLFTLTNLGAPAAFKYFDTTIDRKRYTSTKEVLDATLIHQSITGLYETRIDLSQLGGDGGGGGEAAAKGSSGGMDPLQLLQPLEAEIKGTKLKAHWNSGATITCVPQAFLEEEVPIKNIWIKTIHGEKEQPVYYLTFKIQGRKVEAEVISSPYDYILVSPSDIPWLMKKPLQLTTLVPLQEYEERLLKQTMLTGSYKEKLQSLFLKYDALWQHWENQVGHRRIKPHHIATGTVNPRPQKQYPINPKAKASIQTVINDLLKQGVLIQQNSIMNTPVYPVPKPDGKWRMVLDYREVNKTIPLIAAQNQHSAGILSSIFRGKYKTTLDLSNGFWAHSITPESYWLTAFTWLGQQYCWTRLPQGFLNSPALFNADVVDLLKEVPNVQVYVDDIYISHDDPREHLEQLEKVFSLLLNAGYVVSLKKSEIAQHEVEFLGFNITKEGRGLTETFKQKLLNITPPRDLKQLQSILGKLNFARNFIPNFSELVKPLYNIIATAPGKYITWTTDNSQQLQNIISMLNSAENLEERNPEVRLIMKVNTSPSAGYIRFYNEFAKRPIMYLNYVYTKAEVKFTNTEKLLTTIHKGLIKALDLGMGQEILVYSPIVSMTKIQKTPLPERKALPIRWITWMSYLEDPRIQFHYDKTLPELQQVPTVTDDIIAKIKHPSEFSMVFYTDGSAIKHPNVNKSHNAGMGIAQVQFKPEFTVINTWSIPLGDHTAQLAEVAAVEFACKKALKIDGPVLIVTDSFYVAESVNKELPYWQSNGFFNNKKKPLKHVSKWKSIADCIQLKPDIIIIHEKGHQPTASTFHTEGNNLADKLATQGSYVVNAGKRTADGSEFEKRTADGSEFESPKKKAKVE

SEQ ID NO: 686 - protein, 2176 aa, synthetic construct
MPAAKRVKLDGGDKKYSIGLDIGTNSVGWAVITDEYKVPSKKFKVLGNTDRHSIKKNLIGALLFDSGETAEATRLKRTARRRYTRRKNRICYLQEIFSNEMAKVDDSFFHRLEESFLVEEDKKHERHPIFGNIVDEVAYHEKYPTIYHLRKKLVDSTDKADLRLIYLALAHMIKFRGHFLIEGDLNPDNSDVDKLFIQLVQTYNQLFEENPINASGVDAKAILSARLSKSRRLENLIAQLPGEKKNGLFGNLIALSLGLTPNFKSNFDLAEDAKLQLSKDTYDDDLDNLLAQIGDQYADLFLAAKNLSDAILLSDILRVNTEITKAPLSASMIKRYDEHHQDLTLLKALVRQQLPEKYKEIFFDQSKNGYAGYIDGGASQEEFYKFIKPILEKMDGTEELLVKLNREDLLRKQRTFDNGSIPHQIHLGELHAILRRQEDFYPFLKDNREKIEKILTFRIPYYVGPLARGNSRFAWMTRKSEETITPWNFEEVVDKGASAQSFIERMTNFDKNLPNEKVLPKHSLLYEYFTVYNELTKVKYVTEGMRKPAFLSGEQKKAIVDLLFKTNRKVTVKQLKEDYFKKIECFDSVEISGVEDRFNASLGTYHDLLKIIKDKDFLDNEENEDILEDIVLTLTLFEDREMIEERLKTYAHLFDDKVMKQLKRRRYTGWGRLSRKLINGIRDKQSGKTILDFLKSDGFANRNFMQLIHDDSLTFKEDIQKAQVSGQGDSLHEHIANLAGSPAIKKGILQTVKVVDELVKVMGRHKPENIVIEMARENQTTQKGQKNSRERMKRIEEGIKELGSQILKEHPVENTQLQNEKLYLYYLQNGRDMYVDQELDINRLSDYDVDHIVPQSFLKDDSIDNKVLTRSDKARGKSDNVPSEEVVKKMKNYWRQLLNAKLITQRKFDNLTKAERGGLSELDKAGFIKRQLVETRQITKHVAQILDSRMNTKYDENDKLIREVKVITLKSKLVSDFRKDFQFYKVREINNYHHAHDAYLNAVVGTALIKKYPKLESEFVYGDYKVYDVRKMIAKSEQEIGKATAKYFFYSNIMNFFKTEITLANGEIRKRPLIETNGETGEIVWDKGRDFATVRKVLSMPQVNIVKKTEVQTGGFSKESILPKRNSDKLIARKKDWDPKKYGGFDSPTVAYSVLVVAKVEKGKSKKLKSVKELLGITIMERSSFEKNPIDFLEAKGYKEVKKDLIIKLPKYSLFELENGRKRMLASAGELQKGNELALPSKYVNFLYLASHYEKLKGSPEDNEQKQLFVEQHKHYLDEIIEQISEFSKRVILADANLDKVLSAYNKHRDKPIREQAENIIHLFTLTNLGAPAAFKYFDTTIDRKRYTSTKEVLDATLIHQSITGLYETRIDLSQLGGDGGEAAAKPAPGSSGGMDPLQLLQPLEAEIKGTKLKAHWNSGATITCVPQAFLEEEVPIKNIWIKTIHGEKEQPVYYLTFKIQGRKVEAEVISSPYDYILVSPSDIPWLMKKPLQLTTLVPLQEYEERLLKQTMLTGSYKEKLQSLFLKYDALWQHWENQVGHRRIKPHHIATGTVNPRPQKQYPINPKAKASIQTVINDLLKQGVLIQQNSIMNTPVYPVPKPDGKWRMVLDYREVNKTIPLIAAQNQHSAGILSSIFRGKYKTTLDLSNGFWAHSITPESYWLTAFTWLGQQYCWTRLPQGFLNSPALFNADVVDLLKEVPNVQVYVDDIYISHDDPREHLEQLEKVFSLLLNAGYVVSLKKSEIAQHEVEFLGFNITKEGRGLTETFKQKLLNITPPRDLKQLQSILGKLNFARNFIPNFSELVKPLYNIIATAPGKYITWTTDNSQQLQNIISMLNSAENLEERNPEVRLIMKVNTSPSAGYIRFYNEFAKRPIMYLNYVYTKAEVKFTNTEKLLTTIHKGLIKALDLGMGQEILVYSPIVSMTKIQKTPLPERKALPIRWITWMSYLEDPRIQFHYDKTLPELQQVPTVTDDIIAKIKHPSEFSMVFYTDGSAIKHPNVNKSHNAGMGIAQVQFKPEFTVINTWSIPLGDHTAQLAEVAAVEFACKKALKIDGPVLIVTDSFYVAESVNKELPYWQSNGFFNNKKKPLKHVSKWKSIADCIQLKPDIIIIHEKGHQPTASTFHTEGNNLADKLATQGSYVVNAGKRTADGSEFEKRTADGSEFESPKKKAKVE

SEQ ID NO: 687 - protein, 2174 aa, synthetic construct
MPAAKRVKLDGGDKKYSIGLDIGTNSVGWAVITDEYKVPSKKFKVLGNTDRHSIKKNLIGALLFDSGETAEATRLKRTARRRYTRRKNRICYLQEIFSNEMAKVDDSFFHRLEESFLVEEDKKHERHPIFGNIVDEVAYHEKYPTIYHLRKKLVDSTDKADLRLIYLALAHMIKFRGHFLIEGDLNPDNSDVDKLFIQLVQTYNQLFEENPINASGVDAKAILSARLSKSRRLENLIAQLPGEKKNGLFGNLIALSLGLTPNFKSNFDLAEDAKLQLSKDTYDDDLDNLLAQIGDQYADLFLAAKNLSDAILLSDILRVNTEITKAPLSASMIKRYDEHHQDLTLLKALVRQQLPEKYKEIFFDQSKNGYAGYIDGGASQEEFYKFIKPILEKMDGTEELLVKLNREDLLRKQRTFDNGSIPHQIHLGELHAILRRQEDFYPFLKDNREKIEKILTFRIPYYVGPLARGNSRFAWMTRKSEETITPWNFEEVVDKGASAQSFIERMTNFDKNLPNEKVLPKHSLLYEYFTVYNELTKVKYVTEGMRKPAFLSGEQKKAIVDLLFKTNRKVTVKQLKEDYFKKIECFDSVEISGVEDRFNASLGTYHDLLKIIKDKDFLDNEENEDILEDIVLTLTLFEDREMIEERLKTYAHLFDDKVMKQLKRRRYTGWGRLSRKLINGIRDKQSGKTILDFLKSDGFANRNFMQLIHDDSLTFKEDIQKAQVSGQGDSLHEHIANLAGSPAIKKGILQTVKVVDELVKVMGRHKPENIVIEMARENQTTQKGQKNSRERMKRIEEGIKELGSQILKEHPVENTQLQNEKLYLYYLQNGRDMYVDQELDINRLSDYDVDHIVPQSFLKDDSIDNKVLTRSDKARGKSDNVPSEEVVKKMKNYWRQLLNAKLITQRKFDNLTKAERGGLSELDKAGFIKRQLVETRQITKHVAQILDSRMNTKYDENDKLIREVKVITLKSKLVSDFRKDFQFYKVREINNYHHAHDAYLNAVVGTALIKKYPKLESEFVYGDYKVYDVRKMIAKSEQEIGKATAKYFFYSNIMNFFKTEITLANGEIRKRPLIETNGETGEIVWDKGRDFATVRKVLSMPQVNIVKKTEVQTGGFSKESILPKRNSDKLIARKKDWDPKKYGGFDSPTVAYSVLVVAKVEKGKSKKLKSVKELLGITIMERSSFEKNPIDFLEAKGYKEVKKDLIIKLPKYSLFELENGRKRMLASAGELQKGNELALPSKYVNFLYLASHYEKLKGSPEDNEQKQLFVEQHKHYLDEIIEQISEFSKRVILADANLDKVLSAYNKHRDKPIREQAENIIHLFTLTNLGAPAAFKYFDTTIDRKRYTSTKEVLDATLIHQSITGLYETRIDLSQLGGDGGGGGPAPGSSGGMDPLQLLQPLEAEIKGTKLKAHWNSGATITCVPQAFLEEEVPIKNIWIKTIHGEKEQPVYYLTFKIQGRKVEAEVISSPYDYILVSPSDIPWLMKKPLQLTTLVPLQEYEERLLKQTMLTGSYKEKLQSLFLKYDALWQHWENQVGHRRIKPHHIATGTVNPRPQKQYPINPKAKASIQTVINDLLKQGVLIQQNSIMNTPVYPVPKPDGKWRMVLDYREVNKTIPLIAAQNQHSAGILSSIFRGKYKTTLDLSNGFWAHSITPESYWLTAFTWLGQQYCWTRLPQGFLNSPALFNADVVDLLKEVPNVQVYVDDIYISHDDPREHLEQLEKVFSLLLNAGYVVSLKKSEIAQHEVEFLGFNITKEGRGLTETFKQKLLNITPPRDLKQLQSILGKLNFARNFIPNFSELVKPLYNIIATAPGKYITWTTDNSQQLQNIISMLNSAENLEERNPEVRLIMKVNTSPSAGYIRFYNEFAKRPIMYLNYVYTKAEVKFTNTEKLLTTIHKGLIKALDLGMGQEILVYSPIVSMTKIQKTPLPERKALPIRWITWMSYLEDPRIQFHYDKTLPELQQVPTVTDDIIAKIKHPSEFSMVFYTDGSAIKHPNVNKSHNAGMGIAQVQFKPEFTVINTWSIPLGDHTAQLAEVAAVEFACKKALKIDGPVLIVTDSFYVAESVNKELPYWQSNGFFNNKKKPLKHVSKWKSIADCIQLKPDIIIIHEKGHQPTASTFHTEGNNLADKLATQGSYVVNAGKRTADGSEFEKRTADGSEFESPKKKAKVE

SEQ ID NO: 688 - protein, 2173 aa, synthetic construct
MPAAKRVKLDGGDKKYSIGLDIGTNSVGWAVITDEYKVPSKKFKVLGNTDRHSIKKNLIGALLFDSGETAEATRLKRTARRRYTRRKNRICYLQEIFSNEMAKVDDSFFHRLEESFLVEEDKKHERHPIFGNIVDEVAYHEKYPTIYHLRKKLVDSTDKADLRLIYLALAHMIKFRGHFLIEGDLNPDNSDVDKLFIQLVQTYNQLFEENPINASGVDAKAILSARLSKSRRLENLIAQLPGEKKNGLFGNLIALSLGLTPNFKSNFDLAEDAKLQLSKDTYDDDLDNLLAQIGDQYADLFLAAKNLSDAILLSDILRVNTEITKAPLSASMIKRYDEHHQDLTLLKALVRQQLPEKYKEIFFDQSKNGYAGYIDGGASQEEFYKFIKPILEKMDGTEELLVKLNREDLLRKQRTFDNGSIPHQIHLGELHAILRRQEDFYPFLKDNREKIEKILTFRIPYYVGPLARGNSRFAWMTRKSEETITPWNFEEVVDKGASAQSFIERMTNFDKNLPNEKVLPKHSLLYEYFTVYNELTKVKYVTEGMRKPAFLSGEQKKAIVDLLFKTNRKVTVKQLKEDYFKKIECFDSVEISGVEDRFNASLGTYHDLLKIIKDKDFLDNEENEDILEDIVLTLTLFEDREMIEERLKTYAHLFDDKVMKQLKRRRYTGWGRLSRKLINGIRDKQSGKTILDFLKSDGFANRNFMQLIHDDSLTFKEDIQKAQVSGQGDSLHEHIANLAGSPAIKKGILQTVKVVDELVKVMGRHKPENIVIEMARENQTTQKGQKNSRERMKRIEEGIKELGSQILKEHPVENTQLQNEKLYLYYLQNGRDMYVDQELDINRLSDYDVDHIVPQSFLKDDSIDNKVLTRSDKARGKSDNVPSEEVVKKMKNYWRQLLNAKLITQRKFDNLTKAERGGLSELDKAGFIKRQLVETRQITKHVAQILDSRMNTKYDENDKLIREVKVITLKSKLVSDFRKDFQFYKVREINNYHHAHDAYLNAVVGTALIKKYPKLESEFVYGDYKVYDVRKMIAKSEQEIGKATAKYFFYSNIMNFFKTEITLANGEIRKRPLIETNGETGEIVWDKGRDFATVRKVLSMPQVNIVKKTEVQTGGFSKESILPKRNSDKLIARKKDWDPKKYGGFDSPTVAYSVLVVAKVEKGKSKKLKSVKELLGITIMERSSFEKNPIDFLEAKGYKEVKKDLIIKLPKYSLFELENGRKRMLASAGELQKGNELALPSKYVNFLYLASHYEKLKGSPEDNEQKQLFVEQHKHYLDEIIEQISEFSKRVILADANLDKVLSAYNKHRDKPIREQAENIIHLFTLTNLGAPAAFKYFDTTIDRKRYTSTKEVLDATLIHQSITGLYETRIDLSQLGGDGGEAAAKGSSGGMDPLQLLQPLEAEIKGTKLKAHWNSGATITCVPQAFLEEEVPIKNIWIKTIHGEKEQPVYYLTFKIQGRKVEAEVISSPYDYILVSPSDIPWLMKKPLQLTTLVPLQEYEERLLKQTMLTGSYKEKLQSLFLKYDALWQHWENQVGHRRIKPHHIATGTVNPRPQKQYPINPKAKASIQTVINDLLKQGVLIQQNSIMNTPVYPVPKPDGKWRMVLDYREVNKTIPLIAAQNQHSAGILSSIFRGKYKTTLDLSNGFWAHSITPESYWLTAFTWLGQQYCWTRLPQGFLNSPALFNADVVDLLKEVPNVQVYVDDIYISHDDPREHLEQLEKVFSLLLNAGYVVSLKKSEIAQHEVEFLGFNITKEGRGLTETFKQKLLNITPPRDLKQLQSILGKLNFARNFIPNFSELVKPLYNIIATAPGKYITWTTDNSQQLQNIISMLNSAENLEERNPEVRLIMKVNTSPSAGYIRFYNEFAKRPIMYLNYVYTKAEVKFTNTEKLLTTIHKGLIKALDLGMGQEILVYSPIVSMTKIQKTPLPERKALPIRWITWMSYLEDPRIQFHYDKTLPELQQVPTVTDDIIAKIKHPSEFSMVFYTDGSAIKHPNVNKSHNAGMGIAQVQFKPEFTVINTWSIPLGDHTAQLAEVAAVEFACKKALKIDGPVLIVTDSFYVAESVNKELPYWQSNGFFNNKKKPLKHVSKWKSIADCIQLKPDIIIIHEKGHQPTASTFHTEGNNLADKLATQGSYVVNAGKRTADGSEFEKRTADGSEFESPKKKAKVE

SEQ ID NO: 689 - protein, 2176 aa, synthetic construct
MPAAKRVKLDGGDKKYSIGLDIGTNSVGWAVITDEYKVPSKKFKVLGNTDRHSIKKNLIGALLFDSGETAEATRLKRTARRRYTRRKNRICYLQEIFSNEMAKVDDSFFHRLEESFLVEEDKKHERHPIFGNIVDEVAYHEKYPTIYHLRKKLVDSTDKADLRLIYLALAHMIKFRGHFLIEGDLNPDNSDVDKLFIQLVQTYNQLFEENPINASGVDAKAILSARLSKSRRLENLIAQLPGEKKNGLFGNLIALSLGLTPNFKSNFDLAEDAKLQLSKDTYDDDLDNLLAQIGDQYADLFLAAKNLSDAILLSDILRVNTEITKAPLSASMIKRYDEHHQDLTLLKALVRQQLPEKYKEIFFDQSKNGYAGYIDGGASQEEFYKFIKPILEKMDGTEELLVKLNREDLLRKQRTFDNGSIPHQIHLGELHAILRRQEDFYPFLKDNREKIEKILTFRIPYYVGPLARGNSRFAWMTRKSEETITPWNFEEVVDKGASAQSFIERMTNFDKNLPNEKVLPKHSLLYEYFTVYNELTKVKYVTEGMRKPAFLSGEQKKAIVDLLFKTNRKVTVKQLKEDYFKKIECFDSVEISGVEDRFNASLGTYHDLLKIIKDKDFLDNEENEDILEDIVLTLTLFEDREMIEERLKTYAHLFDDKVMKQLKRRRYTGWGRLSRKLINGIRDKQSGKTILDFLKSDGFANRNFMQLIHDDSLTFKEDIQKAQVSGQGDSLHEHIANLAGSPAIKKGILQTVKVVDELVKVMGRHKPENIVIEMARENQTTQKGQKNSRERMKRIEEGIKELGSQILKEHPVENTQLQNEKLYLYYLQNGRDMYVDQELDINRLSDYDVDHIVPQSFLKDDSIDNKVLTRSDKARGKSDNVPSEEVVKKMKNYWRQLLNAKLITQRKFDNLTKAERGGLSELDKAGFIKRQLVETRQITKHVAQILDSRMNTKYDENDKLIREVKVITLKSKLVSDFRKDFQFYKVREINNYHHAHDAYLNAVVGTALIKKYPKLESEFVYGDYKVYDVRKMIAKSEQEIGKATAKYFFYSNIMNFFKTEITLANGEIRKRPLIETNGETGEIVWDKGRDFATVRKVLSMPQVNIVKKTEVQTGGFSKESILPKRNSDKLIARKKDWDPKKYGGFDSPTVAYSVLVVAKVEKGKSKKLKSVKELLGITIMERSSFEKNPIDFLEAKGYKEVKKDLIIKLPKYSLFELENGRKRMLASAGELQKGNELALPSKYVNFLYLASHYEKLKGSPEDNEQKQLFVEQHKHYLDEIIEQISEFSKRVILADANLDKVLSAYNKHRDKPIREQAENIIHLFTLTNLGAPAAFKYFDTTIDRKRYTSTKEVLDATLIHQSITGLYETRIDLSQLGGDGGEAAAKPAPGGSGGMNPLQLLQPLPAEVKGTKLLAHWNSGATITCIPESFLEDEQPIKQTLIKTIHGEKQQNVYYLTFKVKGRKVEAEVIASPYEYILLSPTDVPWLTQQPLQLTILVPLQEYQDRILNKTALPEEQKQQLKALFTKYDNLWQHWENQVGHRKIRPHNIATGDYPPRPQKQYPINPKAKPSIQIVIDDLLKQGVLTPQNSTMNTPVYPVPKPDGRWRMVLDYREVNKTIPLTAAQNQHSAGILATIVRQKYKTTLDLANGFWAHPITPDSYWLTAFTWQGKQYCWTRLPQGFLNSPALFTADAVDLLKEVPNVQVYVDDIYLSHDNPHEHIQQLEKVFQILLQAGYVVSLKKSEIGQRTVEFLGFNITKEGRGLTDTFKTKLLNVTPPKDLKQLQSILGLLNFARNFIPNFAELVQTLYNLIASSKGKYIEWTEDNTKQLNKVIEALNTASNLEERLPDQRLVIKVNTSPSAGYVRYYNESGKKPIMYLNYVFSKAELKFSMLEKLLTTMHKALIKAMDLAMGQEILVYSPIVSMTKIQKTPLPERKALPIRWITWMTYLEDPRIQFHYDKTLPELKHIPDVYTSSIPPLKHPSQYEGVFCTDGSAIKSPDPTKSNNAGMGIVHAIYNPEYKILNQWSIPLGHHTAQMAEIAAVEFACKKALKVPGPVLVITDSFYVAESANKELPYWKSNGFVNNKKEPLKHISKWKSIAECLSIKPDITIQHEKGHQPINTSIHTEGNALADKLATQGSYVVNAGKRTADGSEFEKRTADGSEFESPKKKAKVE

SEQ ID NO: 690 - protein, 2176 aa, synthetic construct
MPAAKRVKLDGGDKKYSIGLDIGTNSVGWAVITDEYKVPSKKFKVLGNTDRHSIKKNLIGALLFDSGETAEATRLKRTARRRYTRRKNRICYLQEIFSNEMAKVDDSFFHRLEESFLVEEDKKHERHPIFGNIVDEVAYHEKYPTIYHLRKKLVDSTDKADLRLIYLALAHMIKFRGHFLIEGDLNPDNSDVDKLFIQLVQTYNQLFEENPINASGVDAKAILSARLSKSRRLENLIAQLPGEKKNGLFGNLIALSLGLTPNFKSNFDLAEDAKLQLSKDTYDDDLDNLLAQIGDQYADLFLAAKNLSDAILLSDILRVNTEITKAPLSASMIKRYDEHHQDLTLLKALVRQQLPEKYKEIFFDQSKNGYAGYIDGGASQEEFYKFIKPILEKMDGTEELLVKLNREDLLRKQRTFDNGSIPHQIHLGELHAILRRQEDFYPFLKDNREKIEKILTFRIPYYVGPLARGNSRFAWMTRKSEETITPWNFEEVVDKGASAQSFIERMTNFDKNLPNEKVLPKHSLLYEYFTVYNELTKVKYVTEGMRKPAFLSGEQKKAIVDLLFKTNRKVTVKQLKEDYFKKIECFDSVEISGVEDRFNASLGTYHDLLKIIKDKDFLDNEENEDILEDIVLTLTLFEDREMIEERLKTYAHLFDDKVMKQLKRRRYTGWGRLSRKLINGIRDKQSGKTILDFLKSDGFANRNFMQLIHDDSLTFKEDIQKAQVSGQGDSLHEHIANLAGSPAIKKGILQTVKVVDELVKVMGRHKPENIVIEMARENQTTQKGQKNSRERMKRIEEGIKELGSQILKEHPVENTQLQNEKLYLYYLQNGRDMYVDQELDINRLSDYDVDHIVPQSFLKDDSIDNKVLTRSDKARGKSDNVPSEEVVKKMKNYWRQLLNAKLITQRKFDNLTKAERGGLSELDKAGFIKRQLVETRQITKHVAQILDSRMNTKYDENDKLIREVKVITLKSKLVSDFRKDFQFYKVREINNYHHAHDAYLNAVVGTALIKKYPKLESEFVYGDYKVYDVRKMIAKSEQEIGKATAKYFFYSNIMNFFKTEITLANGEIRKRPLIETNGETGEIVWDKGRDFATVRKVLSMPQVNIVKKTEVQTGGFSKESILPKRNSDKLIARKKDWDPKKYGGFDSPTVAYSVLVVAKVEKGKSKKLKSVKELLGITIMERSSFEKNPIDFLEAKGYKEVKKDLIIKLPKYSLFELENGRKRMLASAGELQKGNELALPSKYVNFLYLASHYEKLKGSPEDNEQKQLFVEQHKHYLDEIIEQISEFSKRVILADANLDKVLSAYNKHRDKPIREQAENIIHLFTLTNLGAPAAFKYFDTTIDRKRYTSTKEVLDATLIHQSITGLYETRIDLSQLGGDGGGGSEAAAKPAPGGMNPLQLLQPLPAEVKGTKLLAHWNSGATITCIPESFLEDEQPIKQTLIKTIHGEKQQNVYYLTFKVKGRKVEAEVIASPYEYILLSPTDVPWLTQQPLQLTILVPLQEYQDRILNKTALPEEQKQQLKALFTKYDNLWQHWENQVGHRKIRPHNIATGDYPPRPQKQYPINPKAKPSIQIVIDDLLKQGVLTPQNSTMNTPVYPVPKPDGRWRMVLDYREVNKTIPLTAAQNQHSAGILATIVRQKYKTTLDLANGFWAHPITPDSYWLTAFTWQGKQYCWTRLPQGFLNSPALFTADAVDLLKEVPNVQVYVDDIYLSHDNPHEHIQQLEKVFQILLQAGYVVSLKKSEIGQRTVEFLGFNITKEGRGLTDTFKTKLLNVTPPKDLKQLQSILGLLNFARNFIPNFAELVQTLYNLIASSKGKYIEWTEDNTKQLNKVIEALNTASNLEERLPDQRLVIKVNTSPSAGYVRYYNESGKKPIMYLNYVFSKAELKFSMLEKLLTTMHKALIKAMDLAMGQEILVYSPIVSMTKIQKTPLPERKALPIRWITWMTYLEDPRIQFHYDKTLPELKHIPDVYTSSIPPLKHPSQYEGVFCTDGSAIKSPDPTKSNNAGMGIVHAIYNPEYKILNQWSIPLGHHTAQMAEIAAVEFACKKALKVPGPVLVITDSFYVAESANKELPYWKSNGFVNNKKEPLKHISKWKSIAECLSIKPDITIQHEKGHQPINTSIHTEGNALADKLATQGSYVVNAGKRTADGSEFEKRTADGSEFESPKKKAKVE

SEQ ID NO: 691 - protein, 2173 aa, synthetic construct
MPAAKRVKLDGGDKKYSIGLDIGTNSVGWAVITDEYKVPSKKFKVLGNTDRHSIKKNLIGALLFDSGETAEATRLKRTARRRYTRRKNRICYLQEIFSNEMAKVDDSFFHRLEESFLVEEDKKHERHPIFGNIVDEVAYHEKYPTIYHLRKKLVDSTDKADLRLIYLALAHMIKFRGHFLIEGDLNPDNSDVDKLFIQLVQTYNQLFEENPINASGVDAKAILSARLSKSRRLENLIAQLPGEKKNGLFGNLIALSLGLTPNFKSNFDLAEDAKLQLSKDTYDDDLDNLLAQIGDQYADLFLAAKNLSDAILLSDILRVNTEITKAPLSASMIKRYDEHHQDLTLLKALVRQQLPEKYKEIFFDQSKNGYAGYIDGGASQEEFYKFIKPILEKMDGTEELLVKLNREDLLRKQRTFDNGSIPHQIHLGELHAILRRQEDFYPFLKDNREKIEKILTFRIPYYVGPLARGNSRFAWMTRKSEETITPWNFEEVVDKGASAQSFIERMTNFDKNLPNEKVLPKHSLLYEYFTVYNELTKVKYVTEGMRKPAFLSGEQKKAIVDLLFKTNRKVTVKQLKEDYFKKIECFDSVEISGVEDRFNASLGTYHDLLKIIKDKDFLDNEENEDILEDIVLTLTLFEDREMIEERLKTYAHLFDDKVMKQLKRRRYTGWGRLSRKLINGIRDKQSGKTILDFLKSDGFANRNFMQLIHDDSLTFKEDIQKAQVSGQGDSLHEHIANLAGSPAIKKGILQTVKVVDELVKVMGRHKPENIVIEMARENQTTQKGQKNSRERMKRIEEGIKELGSQILKEHPVENTQLQNEKLYLYYLQNGRDMYVDQELDINRLSDYDVDHIVPQSFLKDDSIDNKVLTRSDKARGKSDNVPSEEVVKKMKNYWRQLLNAKLITQRKFDNLTKAERGGLSELDKAGFIKRQLVETRQITKHVAQILDSRMNTKYDENDKLIREVKVITLKSKLVSDFRKDFQFYKVREINNYHHAHDAYLNAVVGTALIKKYPKLESEFVYGDYKVYDVRKMIAKSEQEIGKATAKYFFYSNIMNFFKTEITLANGEIRKRPLIETNGETGEIVWDKGRDFATVRKVLSMPQVNIVKKTEVQTGGFSKESILPKRNSDKLIARKKDWDPKKYGGFDSPTVAYSVLVVAKVEKGKSKKLKSVKELLGITIMERSSFEKNPIDFLEAKGYKEVKKDLIIKLPKYSLFELENGRKRMLASAGELQKGNELALPSKYVNFLYLASHYEKLKGSPEDNEQKQLFVEQHKHYLDEIIEQISEFSKRVILADANLDKVLSAYNKHRDKPIREQAENIIHLFTLTNLGAPAAFKYFDTTIDRKRYTSTKEVLDATLIHQSITGLYETRIDLSQLGGDGGGSSEAAAKGGMNPLQLLQPLPAEVKGTKLLAHWNSGATITCIPESFLEDEQPIKQTLIKTIHGEKQQNVYYLTFKVKGRKVEAEVIASPYEYILLSPTDVPWLTQQPLQLTILVPLQEYQDRILNKTALPEEQKQQLKALFTKYDNLWQHWENQVGHRKIRPHNIATGDYPPRPQKQYPINPKAKPSIQIVIDDLLKQGVLTPQNSTMNTPVYPVPKPDGRWRMVLDYREVNKTIPLTAAQNQHSAGILATIVRQKYKTTLDLANGFWAHPITPDSYWLTAFTWQGKQYCWTRLPQGFLNSPALFTADAVDLLKEVPNVQVYVDDIYLSHDNPHEHIQQLEKVFQILLQAGYVVSLKKSEIGQRTVEFLGFNITKEGRGLTDTFKTKLLNVTPPKDLKQLQSILGLLNFARNFIPNFAELVQTLYNLIASSKGKYIEWTEDNTKQLNKVIEALNTASNLEERLPDQRLVIKVNTSPSAGYVRYYNESGKKPIMYLNYVFSKAELKFSMLEKLLTTMHKALIKAMDLAMGQEILVYSPIVSMTKIQKTPLPERKALPIRWITWMTYLEDPRIQFHYDKTLPELKHIPDVYTSSIPPLKHPSQYEGVFCTDGSAIKSPDPTKSNNAGMGIVHAIYNPEYKILNQWSIPLGHHTAQMAEIAAVEFACKKALKVPGPVLVITDSFYVAESANKELPYWKSNGFVNNKKEPLKHISKWKSIAECLSIKPDITIQHEKGHQPINTSIHTEGNALADKLATQGSYVVNAGKRTADGSEFEKRTADGSEFESPKKKAKVE

SEQ ID NO: 692 - protein, 2180 aa, synthetic construct
MPAAKRVKLDGGDKKYSIGLDIGTNSVGWAVITDEYKVPSKKFKVLGNTDRHSIKKNLIGALLFDSGETAEATRLKRTARRRYTRRKNRICYLQEIFSNEMAKVDDSFFHRLEESFLVEEDKKHERHPIFGNIVDEVAYHEKYPTIYHLRKKLVDSTDKADLRLIYLALAHMIKFRGHFLIEGDLNPDNSDVDKLFIQLVQTYNQLFEENPINASGVDAKAILSARLSKSRRLENLIAQLPGEKKNGLFGNLIALSLGLTPNFKSNFDLAEDAKLQLSKDTYDDDLDNLLAQIGDQYADLFLAAKNLSDAILLSDILRVNTEITKAPLSASMIKRYDEHHQDLTLLKALVRQQLPEKYKEIFFDQSKNGYAGYIDGGASQEEFYKFIKPILEKMDGTEELLVKLNREDLLRKQRTFDNGSIPHQIHLGELHAILRRQEDFYPFLKDNREKIEKILTFRIPYYVGPLARGNSRFAWMTRKSEETITPWNFEEVVDKGASAQSFIERMTNFDKNLPNEKVLPKHSLLYEYFTVYNELTKVKYVTEGMRKPAFLSGEQKKAIVDLLFKTNRKVTVKQLKEDYFKKIECFDSVEISGVEDRFNASLGTYHDLLKIIKDKDFLDNEENEDILEDIVLTLTLFEDREMIEERLKTYAHLFDDKVMKQLKRRRYTGWGRLSRKLINGIRDKQSGKTILDFLKSDGFANRNFMQLIHDDSLTFKEDIQKAQVSGQGDSLHEHIANLAGSPAIKKGILQTVKVVDELVKVMGRHKPENIVIEMARENQTTQKGQKNSRERMKRIEEGIKELGSQILKEHPVENTQLQNEKLYLYYLQNGRDMYVDQELDINRLSDYDVDHIVPQSFLKDDSIDNKVLTRSDKARGKSDNVPSEEVVKKMKNYWRQLLNAKLITQRKFDNLTKAERGGLSELDKAGFIKRQLVETRQITKHVAQILDSRMNTKYDENDKLIREVKVITLKSKLVSDFRKDFQFYKVREINNYHHAHDAYLNAVVGTALIKKYPKLESEFVYGDYKVYDVRKMIAKSEQEIGKATAKYFFYSNIMNFFKTEITLANGEIRKRPLIETNGETGEIVWDKGRDFATVRKVLSMPQVNIVKKTEVQTGGFSKESILPKRNSDKLIARKKDWDPKKYGGFDSPTVAYSVLVVAKVEKGKSKKLKSVKELLGITIMERSSFEKNPIDFLEAKGYKEVKKDLIIKLPKYSLFELENGRKRMLASAGELQKGNELALPSKYVNFLYLASHYEKLKGSPEDNEQKQLFVEQHKHYLDEIIEQISEFSKRVILADANLDKVLSAYNKHRDKPIREQAENIIHLFTLTNLGAPAAFKYFDTTIDRKRYTSTKEVLDATLIHQSITGLYETRIDLSQLGGDGGEAAAKGGGGSEAAAKGGMNPLQLLQPLPAEVKGTKLLAHWNSGATITCIPESFLEDEQPIKQTLIKTIHGEKQQNVYYLTFKVKGRKVEAEVIASPYEYILLSPTDVPWLTQQPLQLTILVPLQEYQDRILNKTALPEEQKQQLKALFTKYDNLWQHWENQVGHRKIRPHNIATGDYPPRPQKQYPINPKAKPSIQIVIDDLLKQGVLTPQNSTMNTPVYPVPKPDGRWRMVLDYREVNKTIPLTAAQNQHSAGILATIVRQKYKTTLDLANGFWAHPITPDSYWLTAFTWQGKQYCWTRLPQGFLNSPALFTADAVDLLKEVPNVQVYVDDIYLSHDNPHEHIQQLEKVFQILLQAGYVVSLKKSEIGQRTVEFLGFNITKEGRGLTDTFKTKLLNVTPPKDLKQLQSILGLLNFARNFIPNFAELVQTLYNLIASSKGKYIEWTEDNTKQLNKVIEALNTASNLEERLPDQRLVIKVNTSPSAGYVRYYNESGKKPIMYLNYVFSKAELKFSMLEKLLTTMHKALIKAMDLAMGQEILVYSPIVSMTKIQKTPLPERKALPIRWITWMTYLEDPRIQFHYDKTLPELKHIPDVYTSSIPPLKHPSQYEGVFCTDGSAIKSPDPTKSNNAGMGIVHAIYNPEYKILNQWSIPLGHHTAQMAEIAAVEFACKKALKVPGPVLVITDSFYVAESANKELPYWKSNGFVNNKKEPLKHISKWKSIAECLSIKPDITIQHEKGHQPINTSIHTEGNALADKLATQGSYVVNAGKRTADGSEFEKRTADGSEFESPKKKAKVE

SEQ ID NO: 693 - protein, 2170 aa, synthetic construct
MPAAKRVKLDGGDKKYSIGLDIGTNSVGWAVITDEYKVPSKKFKVLGNTDRHSIKKNLIGALLFDSGETAEATRLKRTARRRYTRRKNRICYLQEIFSNEMAKVDDSFFHRLEESFLVEEDKKHERHPIFGNIVDEVAYHEKYPTIYHLRKKLVDSTDKADLRLIYLALAHMIKFRGHFLIEGDLNPDNSDVDKLFIQLVQTYNQLFEENPINASGVDAKAILSARLSKSRRLENLIAQLPGEKKNGLFGNLIALSLGLTPNFKSNFDLAEDAKLQLSKDTYDDDLDNLLAQIGDQYADLFLAAKNLSDAILLSDILRVNTEITKAPLSASMIKRYDEHHQDLTLLKALVRQQLPEKYKEIFFDQSKNGYAGYIDGGASQEEFYKFIKPILEKMDGTEELLVKLNREDLLRKQRTFDNGSIPHQIHLGELHAILRRQEDFYPFLKDNREKIEKILTFRIPYYVGPLARGNSRFAWMTRKSEETITPWNFEEVVDKGASAQSFIERMTNFDKNLPNEKVLPKHSLLYEYFTVYNELTKVKYVTEGMRKPAFLSGEQKKAIVDLLFKTNRKVTVKQLKEDYFKKIECFDSVEISGVEDRFNASLGTYHDLLKIIKDKDFLDNEENEDILEDIVLTLTLFEDREMIEERLKTYAHLFDDKVMKQLKRRRYTGWGRLSRKLINGIRDKQSGKTILDFLKSDGFANRNFMQLIHDDSLTFKEDIQKAQVSGQGDSLHEHIANLAGSPAIKKGILQTVKVVDELVKVMGRHKPENIVIEMARENQTTQKGQKNSRERMKRIEEGIKELGSQILKEHPVENTQLQNEKLYLYYLQNGRDMYVDQELDINRLSDYDVDHIVPQSFLKDDSIDNKVLTRSDKARGKSDNVPSEEVVKKMKNYWRQLLNAKLITQRKFDNLTKAERGGLSELDKAGFIKRQLVETRQITKHVAQILDSRMNTKYDENDKLIREVKVITLKSKLVSDFRKDFQFYKVREINNYHHAHDAYLNAVVGTALIKKYPKLESEFVYGDYKVYDVRKMIAKSEQEIGKATAKYFFYSNIMNFFKTEITLANGEIRKRPLIETNGETGEIVWDKGRDFATVRKVLSMPQVNIVKKTEVQTGGFSKESILPKRNSDKLIARKKDWDPKKYGGFDSPTVAYSVLVVAKVEKGKSKKLKSVKELLGITIMERSSFEKNPIDFLEAKGYKEVKKDLIIKLPKYSLFELENGRKRMLASAGELQKGNELALPSKYVNFLYLASHYEKLKGSPEDNEQKQLFVEQHKHYLDEIIEQISEFSKRVILADANLDKVLSAYNKHRDKPIREQAENIIHLFTLTNLGAPAAFKYFDTTIDRKRYTSTKEVLDATLIHQSITGLYETRIDLSQLGGDGGPAPAPGGMNPLQLLQPLPAEVKGTKLLAHWNSGATITCIPESFLEDEQPIKQTLIKTIHGEKQQNVYYLTFKVKGRKVEAEVIASPYEYILLSPTDVPWLTQQPLQLTILVPLQEYQDRILNKTALPEEQKQQLKALFTKYDNLWQHWENQVGHRKIRPHNIATGDYPPRPQKQYPINPKAKPSIQIVIDDLLKQGVLTPQNSTMNTPVYPVPKPDGRWRMVLDYREVNKTIPLTAAQNQHSAGILATIVRQKYKTTLDLANGFWAHPITPDSYWLTAFTWQGKQYCWTRLPQGFLNSPALFTADAVDLLKEVPNVQVYVDDIYLSHDNPHEHIQQLEKVFQILLQAGYVVSLKKSEIGQRTVEFLGFNITKEGRGLTDTFKTKLLNVTPPKDLKQLQSILGLLNFARNFIPNFAELVQTLYNLIASSKGKYIEWTEDNTKQLNKVIEALNTASNLEERLPDQRLVIKVNTSPSAGYVRYYNESGKKPIMYLNYVFSKAELKFSMLEKLLTTMHKALIKAMDLAMGQEILVYSPIVSMTKIQKTPLPERKALPIRWITWMTYLEDPRIQFHYDKTLPELKHIPDVYTSSIPPLKHPSQYEGVFCTDGSAIKSPDPTKSNNAGMGIVHAIYNPEYKILNQWSIPLGHHTAQMAEIAAVEFACKKALKVPGPVLVITDSFYVAESANKELPYWKSNGFVNNKKEPLKHISKWKSIAECLSIKPDITIQHEKGHQPINTSIHTEGNALADKLATQGSYVVNAGKRTADGSEFEKRTADGSEFESPKKKAKVE

SEQ ID NO: 694 - protein, 2185 aa, synthetic construct
MPAAKRVKLDGGDKKYSIGLDIGTNSVGWAVITDEYKVPSKKFKVLGNTDRHSIKKNLIGALLFDSGETAEATRLKRTARRRYTRRKNRICYLQEIFSNEMAKVDDSFFHRLEESFLVEEDKKHERHPIFGNIVDEVAYHEKYPTIYHLRKKLVDSTDKADLRLIYLALAHMIKFRGHFLIEGDLNPDNSDVDKLFIQLVQTYNQLFEENPINASGVDAKAILSARLSKSRRLENLIAQLPGEKKNGLFGNLIALSLGLTPNFKSNFDLAEDAKLQLSKDTYDDDLDNLLAQIGDQYADLFLAAKNLSDAILLSDILRVNTEITKAPLSASMIKRYDEHHQDLTLLKALVRQQLPEKYKEIFFDQSKNGYAGYIDGGASQEEFYKFIKPILEKMDGTEELLVKLNREDLLRKQRTFDNGSIPHQIHLGELHAILRRQEDFYPFLKDNREKIEKILTFRIPYYVGPLARGNSRFAWMTRKSEETITPWNFEEVVDKGASAQSFIERMTNFDKNLPNEKVLPKHSLLYEYFTVYNELTKVKYVTEGMRKPAFLSGEQKKAIVDLLFKTNRKVTVKQLKEDYFKKIECFDSVEISGVEDRFNASLGTYHDLLKIIKDKDFLDNEENEDILEDIVLTLTLFEDREMIEERLKTYAHLFDDKVMKQLKRRRYTGWGRLSRKLINGIRDKQSGKTILDFLKSDGFANRNFMQLIHDDSLTFKEDIQKAQVSGQGDSLHEHIANLAGSPAIKKGILQTVKVVDELVKVMGRHKPENIVIEMARENQTTQKGQKNSRERMKRIEEGIKELGSQILKEHPVENTQLQNEKLYLYYLQNGRDMYVDQELDINRLSDYDVDHIVPQSFLKDDSIDNKVLTRSDKARGKSDNVPSEEVVKKMKNYWRQLLNAKLITQRKFDNLTKAERGGLSELDKAGFIKRQLVETRQITKHVAQILDSRMNTKYDENDKLIREVKVITLKSKLVSDFRKDFQFYKVREINNYHHAHDAYLNAVVGTALIKKYPKLESEFVYGDYKVYDVRKMIAKSEQEIGKATAKYFFYSNIMNFFKTEITLANGEIRKRPLIETNGETGEIVWDKGRDFATVRKVLSMPQVNIVKKTEVQTGGFSKESILPKRNSDKLIARKKDWDPKKYGGFDSPTVAYSVLVVAKVEKGKSKKLKSVKELLGITIMERSSFEKNPIDFLEAKGYKEVKKDLIIKLPKYSLFELENGRKRMLASAGELQKGNELALPSKYVNFLYLASHYEKLKGSPEDNEQKQLFVEQHKHYLDEIIEQISEFSKRVILADANLDKVLSAYNKHRDKPIREQAENIIHLFTLTNLGAPAAFKYFDTTIDRKRYTSTKEVLDATLIHQSITGLYETRIDLSQLGGDGGEAAAKEAAAKEAAAKEAAAKGGMNPLQLLQPLPAEVKGTKLLAHWNSGATITCIPESFLEDEQPIKQTLIKTIHGEKQQNVYYLTFKVKGRKVEAEVIASPYEYILLSPTDVPWLTQQPLQLTILVPLQEYQDRILNKTALPEEQKQQLKALFTKYDNLWQHWENQVGHRKIRPHNIATGDYPPRPQKQYPINPKAKPSIQIVIDDLLKQGVLTPQNSTMNTPVYPVPKPDGRWRMVLDYREVNKTIPLTAAQNQHSAGILATIVRQKYKTTLDLANGFWAHPITPDSYWLTAFTWQGKQYCWTRLPQGFLNSPALFTADAVDLLKEVPNVQVYVDDIYLSHDNPHEHIQQLEKVFQILLQAGYVVSLKKSEIGQRTVEFLGFNITKEGRGLTDTFKTKLLNVTPPKDLKQLQSILGLLNFARNFIPNFAELVQTLYNLIASSKGKYIEWTEDNTKQLNKVIEALNTASNLEERLPDQRLVIKVNTSPSAGYVRYYNESGKKPIMYLNYVFSKAELKFSMLEKLLTTMHKALIKAMDLAMGQEILVYSPIVSMTKIQKTPLPERKALPIRWITWMTYLEDPRIQFHYDKTLPELKHIPDVYTSSIPPLKHPSQYEGVFCTDGSAIKSPDPTKSNNAGMGIVHAIYNPEYKILNQWSIPLGHHTAQMAEIAAVEFACKKALKVPGPVLVITDSFYVAESANKELPYWKSNGFVNNKKEPLKHISKWKSIAECLSIKPDITIQHEKGHQPINTSIHTEGNALADKLATQGSYVVNAGKRTADGSEFEKRTADGSEFESPKKKAKVE

SEQ ID NO: 695 - protein, 2081 aa, synthetic construct
MPAAKRVKLDGGDKKYSIGLDIGTNSVGWAVITDEYKVPSKKFKVLGNTDRHSIKKNLIGALLFDSGETAEATRLKRTARRRYTRRKNRICYLQEIFSNEMAKVDDSFFHRLEESFLVEEDKKHERHPIFGNIVDEVAYHEKYPTIYHLRKKLVDSTDKADLRLIYLALAHMIKFRGHFLIEGDLNPDNSDVDKLFIQLVQTYNQLFEENPINASGVDAKAILSARLSKSRRLENLIAQLPGEKKNGLFGNLIALSLGLTPNFKSNFDLAEDAKLQLSKDTYDDDLDNLLAQIGDQYADLFLAAKNLSDAILLSDILRVNTEITKAPLSASMIKRYDEHHQDLTLLKALVRQQLPEKYKEIFFDQSKNGYAGYIDGGASQEEFYKFIKPILEKMDGTEELLVKLNREDLLRKQRTFDNGSIPHQIHLGELHAILRRQEDFYPFLKDNREKIEKILTFRIPYYVGPLARGNSRFAWMTRKSEETITPWNFEEVVDKGASAQSFIERMTNFDKNLPNEKVLPKHSLLYEYFTVYNELTKVKYVTEGMRKPAFLSGEQKKAIVDLLFKTNRKVTVKQLKEDYFKKIECFDSVEISGVEDRFNASLGTYHDLLKIIKDKDFLDNEENEDILEDIVLTLTLFEDREMIEERLKTYAHLFDDKVMKQLKRRRYTGWGRLSRKLINGIRDKQSGKTILDFLKSDGFANRNFMQLIHDDSLTFKEDIQKAQVSGQGDSLHEHIANLAGSPAIKKGILQTVKVVDELVKVMGRHKPENIVIEMARENQTTQKGQKNSRERMKRIEEGIKELGSQILKEHPVENTQLQNEKLYLYYLQNGRDMYVDQELDINRLSDYDVDHIVPQSFLKDDSIDNKVLTRSDKARGKSDNVPSEEVVKKMKNYWRQLLNAKLITQRKFDNLTKAERGGLSELDKAGFIKRQLVETRQITKHVAQILDSRMNTKYDENDKLIREVKVITLKSKLVSDFRKDFQFYKVREINNYHHAHDAYLNAVVGTALIKKYPKLESEFVYGDYKVYDVRKMIAKSEQEIGKATAKYFFYSNIMNFFKTEITLANGEIRKRPLIETNGETGEIVWDKGRDFATVRKVLSMPQVNIVKKTEVQTGGFSKESILPKRNSDKLIARKKDWDPKKYGGFDSPTVAYSVLVVAKVEKGKSKKLKSVKELLGITIMERSSFEKNPIDFLEAKGYKEVKKDLIIKLPKYSLFELENGRKRMLASAGELQKGNELALPSKYVNFLYLASHYEKLKGSPEDNEQKQLFVEQHKHYLDEIIEQISEFSKRVILADANLDKVLSAYNKHRDKPIREQAENIIHLFTLTNLGAPAAFKYFDTTIDRKRYTSTKEVLDATLIHQSITGLYETRIDLSQLGGDGGPAPAPGGVPWLTQQPLQLTILVPLQEYQDRILNKTALPEEQKQQLKALFTKYDNLWQHWENQVGHRKIRPHNIATGDYPPRPQKQYPINPKAKPSIQIVIDDLLKQGVLTPQNSTMNTPVYPVPKPDGRWRMVLDYREVNKTIPLTAAQNQHSAGILATIVRQKYKTTLDLANGFWAHPITPDSYWLTAFTWQGKQYCWTRLPQGFLNSPALFTADAVDLLKEVPNVQVYVDDIYLSHDNPHEHIQQLEKVFQILLQAGYVVSLKKSEIGQRTVEFLGFNITKEGRGLTDTFKTKLLNVTPPKDLKQLQSILGLLNFARNFIPNFAELVQTLYNLIASSKGKYIEWTEDNTKQLNKVIEALNTASNLEERLPDQRLVIKVNTSPSAGYVRYYNESGKKPIMYLNYVFSKAELKFSMLEKLLTTMHKALIKAMDLAMGQEILVYSPIVSMTKIQKTPLPERKALPIRWITWMTYLEDPRIQFHYDKTLPELKHIPDVYTSSIPPLKHPSQYEGVFCTDGSAIKSPDPTKSNNAGMGIVHAIYNPEYKILNQWSIPLGHHTAQMAEIAAVEFACKKALKVPGPVLVITDSFYVAESANKELPYWKSNGFVNNKKEPLKHISKWKSIAECLSIKPDITIQHEKGHQPINTSIHTEGNALADKLATQGSYVVNAGKRTADGSEFEKRTADGSEFESPKKKAKVE

SEQ ID NO: 696 - protein, 2087 aa, synthetic construct
MPAAKRVKLDGGDKKYSIGLDIGTNSVGWAVITDEYKVPSKKFKVLGNTDRHSIKKNLIGALLFDSGETAEATRLKRTARRRYTRRKNRICYLQEIFSNEMAKVDDSFFHRLEESFLVEEDKKHERHPIFGNIVDEVAYHEKYPTIYHLRKKLVDSTDKADLRLIYLALAHMIKFRGHFLIEGDLNPDNSDVDKLFIQLVQTYNQLFEENPINASGVDAKAILSARLSKSRRLENLIAQLPGEKKNGLFGNLIALSLGLTPNFKSNFDLAEDAKLQLSKDTYDDDLDNLLAQIGDQYADLFLAAKNLSDAILLSDILRVNTEITKAPLSASMIKRYDEHHQDLTLLKALVRQQLPEKYKEIFFDQSKNGYAGYIDGGASQEEFYKFIKPILEKMDGTEELLVKLNREDLLRKQRTFDNGSIPHQIHLGELHAILRRQEDFYPFLKDNREKIEKILTFRIPYYVGPLARGNSRFAWMTRKSEETITPWNFEEVVDKGASAQSFIERMTNFDKNLPNEKVLPKHSLLYEYFTVYNELTKVKYVTEGMRKPAFLSGEQKKAIVDLLFKTNRKVTVKQLKEDYFKKIECFDSVEISGVEDRFNASLGTYHDLLKIIKDKDFLDNEENEDILEDIVLTLTLFEDREMIEERLKTYAHLFDDKVMKQLKRRRYTGWGRLSRKLINGIRDKQSGKTILDFLKSDGFANRNFMQLIHDDSLTFKEDIQKAQVSGQGDSLHEHIANLAGSPAIKKGILQTVKVVDELVKVMGRHKPENIVIEMARENQTTQKGQKNSRERMKRIEEGIKELGSQILKEHPVENTQLQNEKLYLYYLQNGRDMYVDQELDINRLSDYDVDHIVPQSFLKDDSIDNKVLTRSDKARGKSDNVPSEEVVKKMKNYWRQLLNAKLITQRKFDNLTKAERGGLSELDKAGFIKRQLVETRQITKHVAQILDSRMNTKYDENDKLIREVKVITLKSKLVSDFRKDFQFYKVREINNYHHAHDAYLNAVVGTALIKKYPKLESEFVYGDYKVYDVRKMIAKSEQEIGKATAKYFFYSNIMNFFKTEITLANGEIRKRPLIETNGETGEIVWDKGRDFATVRKVLSMPQVNIVKKTEVQTGGFSKESILPKRNSDKLIARKKDWDPKKYGGFDSPTVAYSVLVVAKVEKGKSKKLKSVKELLGITIMERSSFEKNPIDFLEAKGYKEVKKDLIIKLPKYSLFELENGRKRMLASAGELQKGNELALPSKYVNFLYLASHYEKLKGSPEDNEQKQLFVEQHKHYLDEIIEQISEFSKRVILADANLDKVLSAYNKHRDKPIREQAENIIHLFTLTNLGAPAAFKYFDTTIDRKRYTSTKEVLDATLIHQSITGLYETRIDLSQLGGDGGPAPGGGEAAAKGGVPWLTQQPLQLTILVPLQEYQDRILNKTALPEEQKQQLKALFTKYDNLWQHWENQVGHRKIRPHNIATGDYPPRPQKQYPINPKAKPSIQIVIDDLLKQGVLTPQNSTMNTPVYPVPKPDGRWRMVLDYREVNKTIPLTAAQNQHSAGILATIVRQKYKTTLDLANGFWAHPITPDSYWLTAFTWQGKQYCWTRLPQGFLNSPALFTADAVDLLKEVPNVQVYVDDIYLSHDNPHEHIQQLEKVFQILLQAGYVVSLKKSEIGQRTVEFLGFNITKEGRGLTDTFKTKLLNVTPPKDLKQLQSILGLLNFARNFIPNFAELVQTLYNLIASSKGKYIEWTEDNTKQLNKVIEALNTASNLEERLPDQRLVIKVNTSPSAGYVRYYNESGKKPIMYLNYVFSKAELKFSMLEKLLTTMHKALIKAMDLAMGQEILVYSPIVSMTKIQKTPLPERKALPIRWITWMTYLEDPRIQFHYDKTLPELKHIPDVYTSSIPPLKHPSQYEGVFCTDGSAIKSPDPTKSNNAGMGIVHAIYNPEYKILNQWSIPLGHHTAQMAEIAAVEFACKKALKVPGPVLVITDSFYVAESANKELPYWKSNGFVNNKKEPLKHISKWKSIAECLSIKPDITIQHEKGHQPINTSIHTEGNALADKLATQGSYVVNAGKRTADGSEFEKRTADGSEFESPKKKAKVE

SEQ ID NO: 697 - protein, 2087 aa, synthetic construct
MPAAKRVKLDGGDKKYSIGLDIGTNSVGWAVITDEYKVPSKKFKVLGNTDRHSIKKNLIGALLFDSGETAEATRLKRTARRRYTRRKNRICYLQEIFSNEMAKVDDSFFHRLEESFLVEEDKKHERHPIFGNIVDEVAYHEKYPTIYHLRKKLVDSTDKADLRLIYLALAHMIKFRGHFLIEGDLNPDNSDVDKLFIQLVQTYNQLFEENPINASGVDAKAILSARLSKSRRLENLIAQLPGEKKNGLFGNLIALSLGLTPNFKSNFDLAEDAKLQLSKDTYDDDLDNLLAQIGDQYADLFLAAKNLSDAILLSDILRVNTEITKAPLSASMIKRYDEHHQDLTLLKALVRQQLPEKYKEIFFDQSKNGYAGYIDGGASQEEFYKFIKPILEKMDGTEELLVKLNREDLLRKQRTFDNGSIPHQIHLGELHAILRRQEDFYPFLKDNREKIEKILTFRIPYYVGPLARGNSRFAWMTRKSEETITPWNFEEVVDKGASAQSFIERMTNFDKNLPNEKVLPKHSLLYEYFTVYNELTKVKYVTEGMRKPAFLSGEQKKAIVDLLFKTNRKVTVKQLKEDYFKKIECFDSVEISGVEDRFNASLGTYHDLLKIIKDKDFLDNEENEDILEDIVLTLTLFEDREMIEERLKTYAHLFDDKVMKQLKRRRYTGWGRLSRKLINGIRDKQSGKTILDFLKSDGFANRNFMQLIHDDSLTFKEDIQKAQVSGQGDSLHEHIANLAGSPAIKKGILQTVKVVDELVKVMGRHKPENIVIEMARENQTTQKGQKNSRERMKRIEEGIKELGSQILKEHPVENTQLQNEKLYLYYLQNGRDMYVDQELDINRLSDYDVDHIVPQSFLKDDSIDNKVLTRSDKARGKSDNVPSEEVVKKMKNYWRQLLNAKLITQRKFDNLTKAERGGLSELDKAGFIKRQLVETRQITKHVAQILDSRMNTKYDENDKLIREVKVITLKSKLVSDFRKDFQFYKVREINNYHHAHDAYLNAVVGTALIKKYPKLESEFVYGDYKVYDVRKMIAKSEQEIGKATAKYFFYSNIMNFFKTEITLANGEIRKRPLIETNGETGEIVWDKGRDFATVRKVLSMPQVNIVKKTEVQTGGFSKESILPKRNSDKLIARKKDWDPKKYGGFDSPTVAYSVLVVAKVEKGKSKKLKSVKELLGITIMERSSFEKNPIDFLEAKGYKEVKKDLIIKLPKYSLFELENGRKRMLASAGELQKGNELALPSKYVNFLYLASHYEKLKGSPEDNEQKQLFVEQHKHYLDEIIEQISEFSKRVILADANLDKVLSAYNKHRDKPIREQAENIIHLFTLTNLGAPAAFKYFDTTIDRKRYTSTKEVLDATLIHQSITGLYETRIDLSQLGGDGGGGGEAAAKGGSGGVPWLTQQPLQLTILVPLQEYQDRILNKTALPEEQKQQLKALFTKYDNLWQHWENQVGHRKIRPHNIATGDYPPRPQKQYPINPKAKPSIQIVIDDLLKQGVLTPQNSTMNTPVYPVPKPDGRWRMVLDYREVNKTIPLTAAQNQHSAGILATIVRQKYKTTLDLANGFWAHPITPDSYWLTAFTWQGKQYCWTRLPQGFLNSPALFTADAVDLLKEVPNVQVYVDDIYLSHDNPHEHIQQLEKVFQILLQAGYVVSLKKSEIGQRTVEFLGFNITKEGRGLTDTFKTKLLNVTPPKDLKQLQSILGLLNFARNFIPNFAELVQTLYNLIASSKGKYIEWTEDNTKQLNKVIEALNTASNLEERLPDQRLVIKVNTSPSAGYVRYYNESGKKPIMYLNYVFSKAELKFSMLEKLLTTMHKALIKAMDLAMGQEILVYSPIVSMTKIQKTPLPERKALPIRWITWMTYLEDPRIQFHYDKTLPELKHIPDVYTSSIPPLKHPSQYEGVFCTDGSAIKSPDPTKSNNAGMGIVHAIYNPEYKILNQWSIPLGHHTAQMAEIAAVEFACKKALKVPGPVLVITDSFYVAESANKELPYWKSNGFVNNKKEPLKHISKWKSIAECLSIKPDITIQHEKGHQPINTSIHTEGNALADKLATQGSYVVNAGKRTADGSEFEKRTADGSEFESPKKKAKVE

SEQ ID NO: 698 - protein, 2087 aa, synthetic construct
MPAAKRVKLDGGDKKYSIGLDIGTNSVGWAVITDEYKVPSKKFKVLGNTDRHSIKKNLIGALLFDSGETAEATRLKRTARRRYTRRKNRICYLQEIFSNEMAKVDDSFFHRLEESFLVEEDKKHERHPIFGNIVDEVAYHEKYPTIYHLRKKLVDSTDKADLRLIYLALAHMIKFRGHFLIEGDLNPDNSDVDKLFIQLVQTYNQLFEENPINASGVDAKAILSARLSKSRRLENLIAQLPGEKKNGLFGNLIALSLGLTPNFKSNFDLAEDAKLQLSKDTYDDDLDNLLAQIGDQYADLFLAAKNLSDAILLSDILRVNTEITKAPLSASMIKRYDEHHQDLTLLKALVRQQLPEKYKEIFFDQSKNGYAGYIDGGASQEEFYKFIKPILEKMDGTEELLVKLNREDLLRKQRTFDNGSIPHQIHLGELHAILRRQEDFYPFLKDNREKIEKILTFRIPYYVGPLARGNSRFAWMTRKSEETITPWNFEEVVDKGASAQSFIERMTNFDKNLPNEKVLPKHSLLYEYFTVYNELTKVKYVTEGMRKPAFLSGEQKKAIVDLLFKTNRKVTVKQLKEDYFKKIECFDSVEISGVEDRFNASLGTYHDLLKIIKDKDFLDNEENEDILEDIVLTLTLFEDREMIEERLKTYAHLFDDKVMKQLKRRRYTGWGRLSRKLINGIRDKQSGKTILDFLKSDGFANRNFMQLIHDDSLTFKEDIQKAQVSGQGDSLHEHIANLAGSPAIKKGILQTVKVVDELVKVMGRHKPENIVIEMARENQTTQKGQKNSRERMKRIEEGIKELGSQILKEHPVENTQLQNEKLYLYYLQNGRDMYVDQELDINRLSDYDVDHIVPQSFLKDDSIDNKVLTRSDKARGKSDNVPSEEVVKKMKNYWRQLLNAKLITQRKFDNLTKAERGGLSELDKAGFIKRQLVETRQITKHVAQILDSRMNTKYDENDKLIREVKVITLKSKLVSDFRKDFQFYKVREINNYHHAHDAYLNAVVGTALIKKYPKLESEFVYGDYKVYDVRKMIAKSEQEIGKATAKYFFYSNIMNFFKTEITLANGEIRKRPLIETNGETGEIVWDKGRDFATVRKVLSMPQVNIVKKTEVQTGGFSKESILPKRNSDKLIARKKDWDPKKYGGFDSPTVAYSVLVVAKVEKGKSKKLKSVKELLGITIMERSSFEKNPIDFLEAKGYKEVKKDLIIKLPKYSLFELENGRKRMLASAGELQKGNELALPSKYVNFLYLASHYEKLKGSPEDNEQKQLFVEQHKHYLDEIIEQISEFSKRVILADANLDKVLSAYNKHRDKPIREQAENIIHLFTLTNLGAPAAFKYFDTTIDRKRYTSTKEVLDATLIHQSITGLYETRIDLSQLGGDGGGGGEAAAKGSSGGVPWLTQQPLQLTILVPLQEYQDRILNKTALPEEQKQQLKALFTKYDNLWQHWENQVGHRKIRPHNIATGDYPPRPQKQYPINPKAKPSIQIVIDDLLKQGVLTPQNSTMNTPVYPVPKPDGRWRMVLDYREVNKTIPLTAAQNQHSAGILATIVRQKYKTTLDLANGFWAHPITPDSYWLTAFTWQGKQYCWTRLPQGFLNSPALFTADAVDLLKEVPNVQVYVDDIYLSHDNPHEHIQQLEKVFQILLQAGYVVSLKKSEIGQRTVEFLGFNITKEGRGLTDTFKTKLLNVTPPKDLKQLQSILGLLNFARNFIPNFAELVQTLYNLIASSKGKYIEWTEDNTKQLNKVIEALNTASNLEERLPDQRLVIKVNTSPSAGYVRYYNESGKKPIMYLNYVFSKAELKFSMLEKLLTTMHKALIKAMDLAMGQEILVYSPIVSMTKIQKTPLPERKALPIRWITWMTYLEDPRIQFHYDKTLPELKHIPDVYTSSIPPLKHPSQYEGVFCTDGSAIKSPDPTKSNNAGMGIVHAIYNPEYKILNQWSIPLGHHTAQMAEIAAVEFACKKALKVPGPVLVITDSFYVAESANKELPYWKSNGFVNNKKEPLKHISKWKSIAECLSIKPDITIQHEKGHQPINTSIHTEGNALADKLATQGSYVVNAGKRTADGSEFEKRTADGSEFESPKKKAKVE

SEQ ID NO: 699 - protein, 2087 aa, synthetic construct
MPAAKRVKLDGGDKKYSIGLDIGTNSVGWAVITDEYKVPSKKFKVLGNTDRHSIKKNLIGALLFDSGETAEATRLKRTARRRYTRRKNRICYLQEIFSNEMAKVDDSFFHRLEESFLVEEDKKHERHPIFGNIVDEVAYHEKYPTIYHLRKKLVDSTDKADLRLIYLALAHMIKFRGHFLIEGDLNPDNSDVDKLFIQLVQTYNQLFEENPINASGVDAKAILSARLSKSRRLENLIAQLPGEKKNGLFGNLIALSLGLTPNFKSNFDLAEDAKLQLSKDTYDDDLDNLLAQIGDQYADLFLAAKNLSDAILLSDILRVNTEITKAPLSASMIKRYDEHHQDLTLLKALVRQQLPEKYKEIFFDQSKNGYAGYIDGGASQEEFYKFIKPILEKMDGTEELLVKLNREDLLRKQRTFDNGSIPHQIHLGELHAILRRQEDFYPFLKDNREKIEKILTFRIPYYVGPLARGNSRFAWMTRKSEETITPWNFEEVVDKGASAQSFIERMTNFDKNLPNEKVLPKHSLLYEYFTVYNELTKVKYVTEGMRKPAFLSGEQKKAIVDLLFKTNRKVTVKQLKEDYFKKIECFDSVEISGVEDRFNASLGTYHDLLKIIKDKDFLDNEENEDILEDIVLTLTLFEDREMIEERLKTYAHLFDDKVMKQLKRRRYTGWGRLSRKLINGIRDKQSGKTILDFLKSDGFANRNFMQLIHDDSLTFKEDIQKAQVSGQGDSLHEHIANLAGSPAIKKGILQTVKVVDELVKVMGRHKPENIVIEMARENQTTQKGQKNSRERMKRIEEGIKELGSQILKEHPVENTQLQNEKLYLYYLQNGRDMYVDQELDINRLSDYDVDHIVPQSFLKDDSIDNKVLTRSDKARGKSDNVPSEEVVKKMKNYWRQLLNAKLITQRKFDNLTKAERGGLSELDKAGFIKRQLVETRQITKHVAQILDSRMNTKYDENDKLIREVKVITLKSKLVSDFRKDFQFYKVREINNYHHAHDAYLNAVVGTALIKKYPKLESEFVYGDYKVYDVRKMIAKSEQEIGKATAKYFFYSNIMNFFKTEITLANGEIRKRPLIETNGETGEIVWDKGRDFATVRKVLSMPQVNIVKKTEVQTGGFSKESILPKRNSDKLIARKKDWDPKKYGGFDSPTVAYSVLVVAKVEKGKSKKLKSVKELLGITIMERSSFEKNPIDFLEAKGYKEVKKDLIIKLPKYSLFELENGRKRMLASAGELQKGNELALPSKYVNFLYLASHYEKLKGSPEDNEQKQLFVEQHKHYLDEIIEQISEFSKRVILADANLDKVLSAYNKHRDKPIREQAENIIHLFTLTNLGAPAAFKYFDTTIDRKRYTSTKEVLDATLIHQSITGLYETRIDLSQLGGDGGGSSGGGEAAAKGGVPWLTQQPLQLTILVPLQEYQDRILNKTALPEEQKQQLKALFTKYDNLWQHWENQVGHRKIRPHNIATGDYPPRPQKQYPINPKAKPSIQIVIDDLLKQGVLTPQNSTMNTPVYPVPKPDGRWRMVLDYREVNKTIPLTAAQNQHSAGILATIVRQKYKTTLDLANGFWAHPITPDSYWLTAFTWQGKQYCWTRLPQGFLNSPALFTADAVDLLKEVPNVQVYVDDIYLSHDNPHEHIQQLEKVFQILLQAGYVVSLKKSEIGQRTVEFLGFNITKEGRGLTDTFKTKLLNVTPPKDLKQLQSILGLLNFARNFIPNFAELVQTLYNLIASSKGKYIEWTEDNTKQLNKVIEALNTASNLEERLPDQRLVIKVNTSPSAGYVRYYNESGKKPIMYLNYVFSKAELKFSMLEKLLTTMHKALIKAMDLAMGQEILVYSPIVSMTKIQKTPLPERKALPIRWITWMTYLEDPRIQFHYDKTLPELKHIPDVYTSSIPPLKHPSQYEGVFCTDGSAIKSPDPTKSNNAGMGIVHAIYNPEYKILNQWSIPLGHHTAQMAEIAAVEFACKKALKVPGPVLVITDSFYVAESANKELPYWKSNGFVNNKKEPLKHISKWKSIAECLSIKPDITIQHEKGHQPINTSIHTEGNALADKLATQGSYVVNAGKRTADGSEFEKRTADGSEFESPKKKAKVE

SEQ ID NO: 700 - protein, 2094 aa, synthetic construct
MPAAKRVKLDGGDKKYSIGLDIGTNSVGWAVITDEYKVPSKKFKVLGNTDRHSIKKNLIGALLFDSGETAEATRLKRTARRRYTRRKNRICYLQEIFSNEMAKVDDSFFHRLEESFLVEEDKKHERHPIFGNIVDEVAYHEKYPTIYHLRKKLVDSTDKADLRLIYLALAHMIKFRGHFLIEGDLNPDNSDVDKLFIQLVQTYNQLFEENPINASGVDAKAILSARLSKSRRLENLIAQLPGEKKNGLFGNLIALSLGLTPNFKSNFDLAEDAKLQLSKDTYDDDLDNLLAQIGDQYADLFLAAKNLSDAILLSDILRVNTEITKAPLSASMIKRYDEHHQDLTLLKALVRQQLPEKYKEIFFDQSKNGYAGYIDGGASQEEFYKFIKPILEKMDGTEELLVKLNREDLLRKQRTFDNGSIPHQIHLGELHAILRRQEDFYPFLKDNREKIEKILTFRIPYYVGPLARGNSRFAWMTRKSEETITPWNFEEVVDKGASAQSFIERMTNFDKNLPNEKVLPKHSLLYEYFTVYNELTKVKYVTEGMRKPAFLSGEQKKAIVDLLFKTNRKVTVKQLKEDYFKKIECFDSVEISGVEDRFNASLGTYHDLLKIIKDKDFLDNEENEDILEDIVLTLTLFEDREMIEERLKTYAHLFDDKVMKQLKRRRYTGWGRLSRKLINGIRDKQSGKTILDFLKSDGFANRNFMQLIHDDSLTFKEDIQKAQVSGQGDSLHEHIANLAGSPAIKKGILQTVKVVDELVKVMGRHKPENIVIEMARENQTTQKGQKNSRERMKRIEEGIKELGSQILKEHPVENTQLQNEKLYLYYLQNGRDMYVDQELDINRLSDYDVDHIVPQSFLKDDSIDNKVLTRSDKARGKSDNVPSEEVVKKMKNYWRQLLNAKLITQRKFDNLTKAERGGLSELDKAGFIKRQLVETRQITKHVAQILDSRMNTKYDENDKLIREVKVITLKSKLVSDFRKDFQFYKVREINNYHHAHDAYLNAVVGTALIKKYPKLESEFVYGDYKVYDVRKMIAKSEQEIGKATAKYFFYSNIMNFFKTEITLANGEIRKRPLIETNGETGEIVWDKGRDFATVRKVLSMPQVNIVKKTEVQTGGFSKESILPKRNSDKLIARKKDWDPKKYGGFDSPTVAYSVLVVAKVEKGKSKKLKSVKELLGITIMERSSFEKNPIDFLEAKGYKEVKKDLIIKLPKYSLFELENGRKRMLASAGELQKGNELALPSKYVNFLYLASHYEKLKGSPEDNEQKQLFVEQHKHYLDEIIEQISEFSKRVILADANLDKVLSAYNKHRDKPIREQAENIIHLFTLTNLGAPAAFKYFDTTIDRKRYTSTKEVLDATLIHQSITGLYETRIDLSQLGGDGGGGSGGSGGSGGSGGSGGSGGVPWLTQQPLQLTILVPLQEYQDRILNKTALPEEQKQQLKALFTKYDNLWQHWENQVGHRKIRPHNIATGDYPPRPQKQYPINPKAKPSIQIVIDDLLKQGVLTPQNSTMNTPVYPVPKPDGRWRMVLDYREVNKTIPLTAAQNQHSAGILATIVRQKYKTTLDLANGFWAHPITPDSYWLTAFTWQGKQYCWTRLPQGFLNSPALFNADAVDLLKEVPNVQVYVDDIYLSHDNPHEHIQQLEKVFQILLQAGYVVSLKKSEIGQRTVEFLGFNITKEGRGLTDTFKTKLLNVTPPKDLKQLQSILGLLNFARNFIPNFAELVQTLYNLIASSPGKYIEWTEDNTKQLNKVIEALNTASNLEERLPDQRLVIKVNTSPSAGYVRYYNESGKKPIMYLNYVFSKAELKFSMLEKLLTTMHKALIKAMDLAMGQEILVYSPIVSMTKIQKTPLPERKALPIRWITWMTYLEDPRIQFHYDKTLPELKHIPDVYTSSIPPLKHPSQYEGVFCTDGSAIKSPDPTKSNNAGMGIVHAIYNPEYKILNQWSIPLGHHTAQMAEIAAVEFACKKALKVPGPVLVITDSFYVAESANKELPYWKSNGFVNNKKEPLKHISKWKSIAECLSIKPDITIQHEKGHQPINTSIHTEGNALADKLATQGSYVVNAGKRTADGSEFEKRTADGSEFESPKKKAKVE

SEQ ID NO: 701 - protein, 2091 aa, synthetic construct
MPAAKRVKLDGGDKKYSIGLDIGTNSVGWAVITDEYKVPSKKFKVLGNTDRHSIKKNLIGALLFDSGETAEATRLKRTARRRYTRRKNRICYLQEIFSNEMAKVDDSFFHRLEESFLVEEDKKHERHPIFGNIVDEVAYHEKYPTIYHLRKKLVDSTDKADLRLIYLALAHMIKFRGHFLIEGDLNPDNSDVDKLFIQLVQTYNQLFEENPINASGVDAKAILSARLSKSRRLENLIAQLPGEKKNGLFGNLIALSLGLTPNFKSNFDLAEDAKLQLSKDTYDDDLDNLLAQIGDQYADLFLAAKNLSDAILLSDILRVNTEITKAPLSASMIKRYDEHHQDLTLLKALVRQQLPEKYKEIFFDQSKNGYAGYIDGGASQEEFYKFIKPILEKMDGTEELLVKLNREDLLRKQRTFDNGSIPHQIHLGELHAILRRQEDFYPFLKDNREKIEKILTFRIPYYVGPLARGNSRFAWMTRKSEETITPWNFEEVVDKGASAQSFIERMTNFDKNLPNEKVLPKHSLLYEYFTVYNELTKVKYVTEGMRKPAFLSGEQKKAIVDLLFKTNRKVTVKQLKEDYFKKIECFDSVEISGVEDRFNASLGTYHDLLKIIKDKDFLDNEENEDILEDIVLTLTLFEDREMIEERLKTYAHLFDDKVMKQLKRRRYTGWGRLSRKLINGIRDKQSGKTILDFLKSDGFANRNFMQLIHDDSLTFKEDIQKAQVSGQGDSLHEHIANLAGSPAIKKGILQTVKVVDELVKVMGRHKPENIVIEMARENQTTQKGQKNSRERMKRIEEGIKELGSQILKEHPVENTQLQNEKLYLYYLQNGRDMYVDQELDINRLSDYDVDHIVPQSFLKDDSIDNKVLTRSDKARGKSDNVPSEEVVKKMKNYWRQLLNAKLITQRKFDNLTKAERGGLSELDKAGFIKRQLVETRQITKHVAQILDSRMNTKYDENDKLIREVKVITLKSKLVSDFRKDFQFYKVREINNYHHAHDAYLNAVVGTALIKKYPKLESEFVYGDYKVYDVRKMIAKSEQEIGKATAKYFFYSNIMNFFKTEITLANGEIRKRPLIETNGETGEIVWDKGRDFATVRKVLSMPQVNIVKKTEVQTGGFSKESILPKRNSDKLIARKKDWDPKKYGGFDSPTVAYSVLVVAKVEKGKSKKLKSVKELLGITIMERSSFEKNPIDFLEAKGYKEVKKDLIIKLPKYSLFELENGRKRMLASAGELQKGNELALPSKYVNFLYLASHYEKLKGSPEDNEQKQLFVEQHKHYLDEIIEQISEFSKRVILADANLDKVLSAYNKHRDKPIREQAENIIHLFTLTNLGAPAAFKYFDTTIDRKRYTSTKEVLDATLIHQSITGLYETRIDLSQLGGDGGEAAAKGGGGSEAAAKGGVPWLTQQPLQLTILVPLQEYQDRILNKTALPEEQKQQLKALFTKYDNLWQHWENQVGHRKIRPHNIATGDYPPRPQKQYPINPKAKPSIQIVIDDLLKQGVLTPQNSTMNTPVYPVPKPDGRWRMVLDYREVNKTIPLTAAQNQHSAGILATIVRQKYKTTLDLANGFWAHPITPDSYWLTAFTWQGKQYCWTRLPQGFLNSPALFNADAVDLLKEVPNVQVYVDDIYLSHDNPHEHIQQLEKVFQILLQAGYVVSLKKSEIGQRTVEFLGFNITKEGRGLTDTFKTKLLNVTPPKDLKQLQSILGLLNFARNFIPNFAELVQTLYNLIASSPGKYIEWTEDNTKQLNKVIEALNTASNLEERLPDQRLVIKVNTSPSAGYVRYYNESGKKPIMYLNYVFSKAELKFSMLEKLLTTMHKALIKAMDLAMGQEILVYSPIVSMTKIQKTPLPERKALPIRWITWMTYLEDPRIQFHYDKTLPELKHIPDVYTSSIPPLKHPSQYEGVFCTDGSAIKSPDPTKSNNAGMGIVHAIYNPEYKILNQWSIPLGHHTAQMAEIAAVEFACKKALKVPGPVLVITDSFYVAESANKELPYWKSNGFVNNKKEPLKHISKWKSIAECLSIKPDITIQHEKGHQPINTSIHTEGNALADKLATQGSYVVNAGKRTADGSEFEKRTADGSEFESPKKKAKVE

SEQ ID NO: 702 - protein, 2091 aa, synthetic construct
MPAAKRVKLDGGDKKYSIGLDIGTNSVGWAVITDEYKVPSKKFKVLGNTDRHSIKKNLIGALLFDSGETAEATRLKRTARRRYTRRKNRICYLQEIFSNEMAKVDDSFFHRLEESFLVEEDKKHERHPIFGNIVDEVAYHEKYPTIYHLRKKLVDSTDKADLRLIYLALAHMIKFRGHFLIEGDLNPDNSDVDKLFIQLVQTYNQLFEENPINASGVDAKAILSARLSKSRRLENLIAQLPGEKKNGLFGNLIALSLGLTPNFKSNFDLAEDAKLQLSKDTYDDDLDNLLAQIGDQYADLFLAAKNLSDAILLSDILRVNTEITKAPLSASMIKRYDEHHQDLTLLKALVRQQLPEKYKEIFFDQSKNGYAGYIDGGASQEEFYKFIKPILEKMDGTEELLVKLNREDLLRKQRTFDNGSIPHQIHLGELHAILRRQEDFYPFLKDNREKIEKILTFRIPYYVGPLARGNSRFAWMTRKSEETITPWNFEEVVDKGASAQSFIERMTNFDKNLPNEKVLPKHSLLYEYFTVYNELTKVKYVTEGMRKPAFLSGEQKKAIVDLLFKTNRKVTVKQLKEDYFKKIECFDSVEISGVEDRFNASLGTYHDLLKIIKDKDFLDNEENEDILEDIVLTLTLFEDREMIEERLKTYAHLFDDKVMKQLKRRRYTGWGRLSRKLINGIRDKQSGKTILDFLKSDGFANRNFMQLIHDDSLTFKEDIQKAQVSGQGDSLHEHIANLAGSPAIKKGILQTVKVVDELVKVMGRHKPENIVIEMARENQTTQKGQKNSRERMKRIEEGIKELGSQILKEHPVENTQLQNEKLYLYYLQNGRDMYVDQELDINRLSDYDVDHIVPQSFLKDDSIDNKVLTRSDKARGKSDNVPSEEVVKKMKNYWRQLLNAKLITQRKFDNLTKAERGGLSELDKAGFIKRQLVETRQITKHVAQILDSRMNTKYDENDKLIREVKVITLKSKLVSDFRKDFQFYKVREINNYHHAHDAYLNAVVGTALIKKYPKLESEFVYGDYKVYDVRKMIAKSEQEIGKATAKYFFYSNIMNFFKTEITLANGEIRKRPLIETNGETGEIVWDKGRDFATVRKVLSMPQVNIVKKTEVQTGGFSKESILPKRNSDKLIARKKDWDPKKYGGFDSPTVAYSVLVVAKVEKGKSKKLKSVKELLGITIMERSSFEKNPIDFLEAKGYKEVKKDLIIKLPKYSLFELENGRKRMLASAGELQKGNELALPSKYVNFLYLASHYEKLKGSPEDNEQKQLFVEQHKHYLDEIIEQISEFSKRVILADANLDKVLSAYNKHRDKPIREQAENIIHLFTLTNLGAPAAFKYFDTTIDRKRYTSTKEVLDATLIHQSITGLYETRIDLSQLGGDGGGGSGGSGGSGGSGGSGGVPWLTQQPLQLTILVPLQEYQDRILNKTALPEEQKQQLKALFTKYDNLWQHWENQVGHRKIRPHNIATGDYPPRPQKQYPINPKAKPSIQIVIDDLLKQGVLTPQNSTMNTPVYPVPKPDGRWRMVLDYREVNKTIPLTAAQNQHSAGILATIVRQKYKTTLDLANGFWAHPITPDSYWLTAFTWQGKQYCWTRLPQGFLNSPALFNADAVDLLKEVPNVQVYVDDIYLSHDNPHEHIQQLEKVFQILLQAGYVVSLKKSEIGQRTVEFLGFNITKEGRGLTDTFKTKLLNVTPPKDLKQLQSILGLLNFARNFIPNFAELVQTLYNLIASSPGKYIEWTEDNTKQLNKVIEALNTASNLEERLPDQRLVIKVNTSPSAGYVRYYNESGKKPIMYLNYVFSKAELKFSMLEKLLTTMHKALIKAMDLAMGQEILVYSPIVSMTKIQKTPLPERKALPIRWITWMTYLEDPRIQFHYDKTLPELKHIPDVYTSSIPPLKHPSQYEGVFCTDGSAIKSPDPTKSNNAGMGIVHAIYNPEYKILNQWSIPLGHHTAQMAEIAAVEFACKKALKVPGPVLVITDSFYVAESANKELPYWKSNGFVNNKKEPLKHISKWKSIAECLSIKPDITIQHEKGHQPINTSIHTEGNALADKLATQGSYVVNAGKRTADGSEFEKRTADGSEFESPKKKAKVE

SEQ ID NO: 703 - protein, 2082 aa, synthetic construct
MPAAKRVKLDGGDKKYSIGLDIGTNSVGWAVITDEYKVPSKKFKVLGNTDRHSIKKNLIGALLFDSGETAEATRLKRTARRRYTRRKNRICYLQEIFSNEMAKVDDSFFHRLEESFLVEEDKKHERHPIFGNIVDEVAYHEKYPTIYHLRKKLVDSTDKADLRLIYLALAHMIKFRGHFLIEGDLNPDNSDVDKLFIQLVQTYNQLFEENPINASGVDAKAILSARLSKSRRLENLIAQLPGEKKNGLFGNLIALSLGLTPNFKSNFDLAEDAKLQLSKDTYDDDLDNLLAQIGDQYADLFLAAKNLSDAILLSDILRVNTEITKAPLSASMIKRYDEHHQDLTLLKALVRQQLPEKYKEIFFDQSKNGYAGYIDGGASQEEFYKFIKPILEKMDGTEELLVKLNREDLLRKQRTFDNGSIPHQIHLGELHAILRRQEDFYPFLKDNREKIEKILTFRIPYYVGPLARGNSRFAWMTRKSEETITPWNFEEVVDKGASAQSFIERMTNFDKNLPNEKVLPKHSLLYEYFTVYNELTKVKYVTEGMRKPAFLSGEQKKAIVDLLFKTNRKVTVKQLKEDYFKKIECFDSVEISGVEDRFNASLGTYHDLLKIIKDKDFLDNEENEDILEDIVLTLTLFEDREMIEERLKTYAHLFDDKVMKQLKRRRYTGWGRLSRKLINGIRDKQSGKTILDFLKSDGFANRNFMQLIHDDSLTFKEDIQKAQVSGQGDSLHEHIANLAGSPAIKKGILQTVKVVDELVKVMGRHKPENIVIEMARENQTTQKGQKNSRERMKRIEEGIKELGSQILKEHPVENTQLQNEKLYLYYLQNGRDMYVDQELDINRLSDYDVDHIVPQSFLKDDSIDNKVLTRSDKARGKSDNVPSEEVVKKMKNYWRQLLNAKLITQRKFDNLTKAERGGLSELDKAGFIKRQLVETRQITKHVAQILDSRMNTKYDENDKLIREVKVITLKSKLVSDFRKDFQFYKVREINNYHHAHDAYLNAVVGTALIKKYPKLESEFVYGDYKVYDVRKMIAKSEQEIGKATAKYFFYSNIMNFFKTEITLANGEIRKRPLIETNGETGEIVWDKGRDFATVRKVLSMPQVNIVKKTEVQTGGFSKESILPKRNSDKLIARKKDWDPKKYGGFDSPTVAYSVLVVAKVEKGKSKKLKSVKELLGITIMERSSFEKNPIDFLEAKGYKEVKKDLIIKLPKYSLFELENGRKRMLASAGELQKGNELALPSKYVNFLYLASHYEKLKGSPEDNEQKQLFVEQHKHYLDEIIEQISEFSKRVILADANLDKVLSAYNKHRDKPIREQAENIIHLFTLTNLGAPAAFKYFDTTIDRKRYTSTKEVLDATLIHQSITGLYETRIDLSQLGGDGGGSSGGSGGVPWLTQQPLQLTILVPLQEYQDRILNKTALPEEQKQQLKALFTKYDNLWQHWENQVGHRKIRPHNIATGDYPPRPQKQYPINPKAKPSIQIVIDDLLKQGVLTPQNSTMNTPVYPVPKPDGRWRMVLDYREVNKTIPLTAAQNQHSAGILATIVRQKYKTTLDLANGFWAHPITPDSYWLTAFTWQGKQYCWTRLPQGFLNSPALFNADAVDLLKEVPNVQVYVDDIYLSHDNPHEHIQQLEKVFQILLQAGYVVSLKKSEIGQRTVEFLGFNITKEGRGLTDTFKTKLLNVTPPKDLKQLQSILGLLNFARNFIPNFAELVQTLYNLIASSPGKYIEWTEDNTKQLNKVIEALNTASNLEERLPDQRLVIKVNTSPSAGYVRYYNESGKKPIMYLNYVFSKAELKFSMLEKLLTTMHKALIKAMDLAMGQEILVYSPIVSMTKIQKTPLPERKALPIRWITWMTYLEDPRIQFHYDKTLPELKHIPDVYTSSIPPLKHPSQYEGVFCTDGSAIKSPDPTKSNNAGMGIVHAIYNPEYKILNQWSIPLGHHTAQMAEIAAVEFACKKALKVPGPVLVITDSFYVAESANKELPYWKSNGFVNNKKEPLKHISKWKSIAECLSIKPDITIQHEKGHQPINTSIHTEGNALADKLATQGSYVVNAGKRTADGSEFEKRTADGSEFESPKKKAKVE

SEQ ID NO: 704 - protein, 2092 aa, synthetic construct
MPAAKRVKLDGGDKKYSIGLDIGTNSVGWAVITDEYKVPSKKFKVLGNTDRHSIKKNLIGALLFDSGETAEATRLKRTARRRYTRRKNRICYLQEIFSNEMAKVDDSFFHRLEESFLVEEDKKHERHPIFGNIVDEVAYHEKYPTIYHLRKKLVDSTDKADLRLIYLALAHMIKFRGHFLIEGDLNPDNSDVDKLFIQLVQTYNQLFEENPINASGVDAKAILSARLSKSRRLENLIAQLPGEKKNGLFGNLIALSLGLTPNFKSNFDLAEDAKLQLSKDTYDDDLDNLLAQIGDQYADLFLAAKNLSDAILLSDILRVNTEITKAPLSASMIKRYDEHHQDLTLLKALVRQQLPEKYKEIFFDQSKNGYAGYIDGGASQEEFYKFIKPILEKMDGTEELLVKLNREDLLRKQRTFDNGSIPHQIHLGELHAILRRQEDFYPFLKDNREKIEKILTFRIPYYVGPLARGNSRFAWMTRKSEETITPWNFEEVVDKGASAQSFIERMTNFDKNLPNEKVLPKHSLLYEYFTVYNELTKVKYVTEGMRKPAFLSGEQKKAIVDLLFKTNRKVTVKQLKEDYFKKIECFDSVEISGVEDRFNASLGTYHDLLKIIKDKDFLDNEENEDILEDIVLTLTLFEDREMIEERLKTYAHLFDDKVMKQLKRRRYTGWGRLSRKLINGIRDKQSGKTILDFLKSDGFANRNFMQLIHDDSLTFKEDIQKAQVSGQGDSLHEHIANLAGSPAIKKGILQTVKVVDELVKVMGRHKPENIVIEMARENQTTQKGQKNSRERMKRIEEGIKELGSQILKEHPVENTQLQNEKLYLYYLQNGRDMYVDQELDINRLSDYDVDHIVPQSFLKDDSIDNKVLTRSDKARGKSDNVPSEEVVKKMKNYWRQLLNAKLITQRKFDNLTKAERGGLSELDKAGFIKRQLVETRQITKHVAQILDSRMNTKYDENDKLIREVKVITLKSKLVSDFRKDFQFYKVREINNYHHAHDAYLNAVVGTALIKKYPKLESEFVYGDYKVYDVRKMIAKSEQEIGKATAKYFFYSNIMNFFKTEITLANGEIRKRPLIETNGETGEIVWDKGRDFATVRKVLSMPQVNIVKKTEVQTGGFSKESILPKRNSDKLIARKKDWDPKKYGGFDSPTVAYSVLVVAKVEKGKSKKLKSVKELLGITIMERSSFEKNPIDFLEAKGYKEVKKDLIIKLPKYSLFELENGRKRMLASAGELQKGNELALPSKYVNFLYLASHYEKLKGSPEDNEQKQLFVEQHKHYLDEIIEQISEFSKRVILADANLDKVLSAYNKHRDKPIREQAENIIHLFTLTNLGAPAAFKYFDTTIDRKRYTSTKEVLDATLIHQSITGLYETRIDLSQLGGDGGSGSETPGTSESATPESGGVPWLTQQPLQLTILVPLQEYQDRILNKTALPEEQKQQLKALFTKYDNLWQHWENQVGHRKIRPHNIATGDYPPRPQKQYPINPKAKPSIQIVIDDLLKQGVLTPQNSTMNTPVYPVPKPDGRWRMVLDYREVNKTIPLTAAQNQHSAGILATIVRQKYKTTLDLANGFWAHPITPDSYWLTAFTWQGKQYCWTRLPQGFLNSPALFNADAVDLLKEVPNVQVYVDDIYLSHDNPHEHIQQLEKVFQILLQAGYVVSLKKSEIGQRTVEFLGFNITKEGRGLTDTFKTKLLNVTPPKDLKQLQSILGKLNFARNFIPNFAELVQTLYNLIASSPGKYIEWTEDNTKQLNKVIEALNTASNLEERLPDQRLVIKVNTSPSAGYVRYYNESGKKPIMYLNYVFSKAELKFSMLEKLLTTMHKALIKAMDLAMGQEILVYSPIVSMTKIQKTPLPERKALPIRWITWMTYLEDPRIQFHYDKTLPELKHIPDVYTSSIPPLKHPSQYEGVFCTDGSAIKSPDPTKSNNAGMGIVHAIYNPEYKILNQWSIPLGHHTAQMAEIAAVEFACKKALKVPGPVLVITDSFYVAESANKELPYWKSNGFVNNKKEPLKHISKWKSIAECLSIKPDITIQHEKGHQPINTSIHTEGNALADKLATQGSYVVNAGKRTADGSEFEKRTADGSEFESPKKKAKVE

SEQ ID NO: 705 - protein, 2087 aa, synthetic construct
MPAAKRVKLDGGDKKYSIGLDIGTNSVGWAVITDEYKVPSKKFKVLGNTDRHSIKKNLIGALLFDSGETAEATRLKRTARRRYTRRKNRICYLQEIFSNEMAKVDDSFFHRLEESFLVEEDKKHERHPIFGNIVDEVAYHEKYPTIYHLRKKLVDSTDKADLRLIYLALAHMIKFRGHFLIEGDLNPDNSDVDKLFIQLVQTYNQLFEENPINASGVDAKAILSARLSKSRRLENLIAQLPGEKKNGLFGNLIALSLGLTPNFKSNFDLAEDAKLQLSKDTYDDDLDNLLAQIGDQYADLFLAAKNLSDAILLSDILRVNTEITKAPLSASMIKRYDEHHQDLTLLKALVRQQLPEKYKEIFFDQSKNGYAGYIDGGASQEEFYKFIKPILEKMDGTEELLVKLNREDLLRKQRTFDNGSIPHQIHLGELHAILRRQEDFYPFLKDNREKIEKILTFRIPYYVGPLARGNSRFAWMTRKSEETITPWNFEEVVDKGASAQSFIERMTNFDKNLPNEKVLPKHSLLYEYFTVYNELTKVKYVTEGMRKPAFLSGEQKKAIVDLLFKTNRKVTVKQLKEDYFKKIECFDSVEISGVEDRFNASLGTYHDLLKIIKDKDFLDNEENEDILEDIVLTLTLFEDREMIEERLKTYAHLFDDKVMKQLKRRRYTGWGRLSRKLINGIRDKQSGKTILDFLKSDGFANRNFMQLIHDDSLTFKEDIQKAQVSGQGDSLHEHIANLAGSPAIKKGILQTVKVVDELVKVMGRHKPENIVIEMARENQTTQKGQKNSRERMKRIEEGIKELGSQILKEHPVENTQLQNEKLYLYYLQNGRDMYVDQELDINRLSDYDVDHIVPQSFLKDDSIDNKVLTRSDKARGKSDNVPSEEVVKKMKNYWRQLLNAKLITQRKFDNLTKAERGGLSELDKAGFIKRQLVETRQITKHVAQILDSRMNTKYDENDKLIREVKVITLKSKLVSDFRKDFQFYKVREINNYHHAHDAYLNAVVGTALIKKYPKLESEFVYGDYKVYDVRKMIAKSEQEIGKATAKYFFYSNIMNFFKTEITLANGEIRKRPLIETNGETGEIVWDKGRDFATVRKVLSMPQVNIVKKTEVQTGGFSKESILPKRNSDKLIARKKDWDPKKYGGFDSPTVAYSVLVVAKVEKGKSKKLKSVKELLGITIMERSSFEKNPIDFLEAKGYKEVKKDLIIKLPKYSLFELENGRKRMLASAGELQKGNELALPSKYVNFLYLASHYEKLKGSPEDNEQKQLFVEQHKHYLDEIIEQISEFSKRVILADANLDKVLSAYNKHRDKPIREQAENIIHLFTLTNLGAPAAFKYFDTTIDRKRYTSTKEVLDATLIHQSITGLYETRIDLSQLGGDGGPAPAPAPAPAPGGVPWLTQQPLQLTILVPLQEYQDRILNKTALPEEQKQQLKALFTKYDNLWQHWENQVGHRKIRPHNIATGDYPPRPQKQYPINPKAKPSIQIVIDDLLKQGVLTPQNSTMNTPVYPVPKPDGRWRMVLDYREVNKTIPLTAAQNQHSAGILATIVRQKYKTTLDLANGFWAHPITPDSYWLTAFTWQGKQYCWTRLPQGFLNSPALFNADAVDLLKEVPNVQVYVDDIYLSHDNPHEHIQQLEKVFQILLQAGYVVSLKKSEIGQRTVEFLGFNITKEGRGLTDTFKTKLLNVTPPKDLKQLQSILGKLNFARNFIPNFAELVQTLYNLIASSPGKYIEWTEDNTKQLNKVIEALNTASNLEERLPDQRLVIKVNTSPSAGYVRYYNESGKKPIMYLNYVFSKAELKFSMLEKLLTTMHKALIKAMDLAMGQEILVYSPIVSMTKIQKTPLPERKALPIRWITWMTYLEDPRIQFHYDKTLPELKHIPDVYTSSIPPLKHPSQYEGVFCTDGSAIKSPDPTKSNNAGMGIVHAIYNPEYKILNQWSIPLGHHTAQMAEIAAVEFACKKALKVPGPVLVITDSFYVAESANKELPYWKSNGFVNNKKEPLKHISKWKSIAECLSIKPDITIQHEKGHQPINTSIHTEGNALADKLATQGSYVVNAGKRTADGSEFEKRTADGSEFESPKKKAKVE

SEQ ID NO: 706 - protein, 2085 aa, synthetic construct
MPAAKRVKLDGGDKKYSIGLDIGTNSVGWAVITDEYKVPSKKFKVLGNTDRHSIKKNLIGALLFDSGETAEATRLKRTARRRYTRRKNRICYLQEIFSNEMAKVDDSFFHRLEESFLVEEDKKHERHPIFGNIVDEVAYHEKYPTIYHLRKKLVDSTDKADLRLIYLALAHMIKFRGHFLIEGDLNPDNSDVDKLFIQLVQTYNQLFEENPINASGVDAKAILSARLSKSRRLENLIAQLPGEKKNGLFGNLIALSLGLTPNFKSNFDLAEDAKLQLSKDTYDDDLDNLLAQIGDQYADLFLAAKNLSDAILLSDILRVNTEITKAPLSASMIKRYDEHHQDLTLLKALVRQQLPEKYKEIFFDQSKNGYAGYIDGGASQEEFYKFIKPILEKMDGTEELLVKLNREDLLRKQRTFDNGSIPHQIHLGELHAILRRQEDFYPFLKDNREKIEKILTFRIPYYVGPLARGNSRFAWMTRKSEETITPWNFEEVVDKGASAQSFIERMTNFDKNLPNEKVLPKHSLLYEYFTVYNELTKVKYVTEGMRKPAFLSGEQKKAIVDLLFKTNRKVTVKQLKEDYFKKIECFDSVEISGVEDRFNASLGTYHDLLKIIKDKDFLDNEENEDILEDIVLTLTLFEDREMIEERLKTYAHLFDDKVMKQLKRRRYTGWGRLSRKLINGIRDKQSGKTILDFLKSDGFANRNFMQLIHDDSLTFKEDIQKAQVSGQGDSLHEHIANLAGSPAIKKGILQTVKVVDELVKVMGRHKPENIVIEMARENQTTQKGQKNSRERMKRIEEGIKELGSQILKEHPVENTQLQNEKLYLYYLQNGRDMYVDQELDINRLSDYDVDHIVPQSFLKDDSIDNKVLTRSDKARGKSDNVPSEEVVKKMKNYWRQLLNAKLITQRKFDNLTKAERGGLSELDKAGFIKRQLVETRQITKHVAQILDSRMNTKYDENDKLIREVKVITLKSKLVSDFRKDFQFYKVREINNYHHAHDAYLNAVVGTALIKKYPKLESEFVYGDYKVYDVRKMIAKSEQEIGKATAKYFFYSNIMNFFKTEITLANGEIRKRPLIETNGETGEIVWDKGRDFATVRKVLSMPQVNIVKKTEVQTGGFSKESILPKRNSDKLIARKKDWDPKKYGGFDSPTVAYSVLVVAKVEKGKSKKLKSVKELLGITIMERSSFEKNPIDFLEAKGYKEVKKDLIIKLPKYSLFELENGRKRMLASAGELQKGNELALPSKYVNFLYLASHYEKLKGSPEDNEQKQLFVEQHKHYLDEIIEQISEFSKRVILADANLDKVLSAYNKHRDKPIREQAENIIHLFTLTNLGAPAAFKYFDTTIDRKRYTSTKEVLDATLIHQSITGLYETRIDLSQLGGDGGPAPGGGGSSGGVPWLTQQPLQLTILVPLQEYQDRILNKTALPEEQKQQLKALFTKYDNLWQHWENQVGHRKIRPHNIATGDYPPRPQKQYPINPKAKPSIQIVIDDLLKQGVLTPQNSTMNTPVYPVPKPDGRWRMVLDYREVNKTIPLTAAQNQHSAGILATIVRQKYKTTLDLANGFWAHPITPDSYWLTAFTWQGKQYCWTRLPQGFLNSPALFNADAVDLLKEVPNVQVYVDDIYLSHDNPHEHIQQLEKVFQILLQAGYVVSLKKSEIGQRTVEFLGFNITKEGRGLTDTFKTKLLNVTPPKDLKQLQSILGKLNFARNFIPNFAELVQTLYNLIASSPGKYIEWTEDNTKQLNKVIEALNTASNLEERLPDQRLVIKVNTSPSAGYVRYYNESGKKPIMYLNYVFSKAELKFSMLEKLLTTMHKALIKAMDLAMGQEILVYSPIVSMTKIQKTPLPERKALPIRWITWMTYLEDPRIQFHYDKTLPELKHIPDVYTSSIPPLKHPSQYEGVFCTDGSAIKSPDPTKSNNAGMGIVHAIYNPEYKILNQWSIPLGHHTAQMAEIAAVEFACKKALKVPGPVLVITDSFYVAESANKELPYWKSNGFVNNKKEPLKHISKWKSIAECLSIKPDITIQHEKGHQPINTSIHTEGNALADKLATQGSYVVNAGKRTADGSEFEKRTADGSEFESPKKKAKVE

SEQ ID NO: 707 - protein, 2168 aa, synthetic construct
MPAAKRVKLDGGDKKYSIGLDIGTNSVGWAVITDEYKVPSKKFKVLGNTDRHSIKKNLIGALLFDSGETAEATRLKRTARRRYTRRKNRICYLQEIFSNEMAKVDDSFFHRLEESFLVEEDKKHERHPIFGNIVDEVAYHEKYPTIYHLRKKLVDSTDKADLRLIYLALAHMIKFRGHFLIEGDLNPDNSDVDKLFIQLVQTYNQLFEENPINASGVDAKAILSARLSKSRRLENLIAQLPGEKKNGLFGNLIALSLGLTPNFKSNFDLAEDAKLQLSKDTYDDDLDNLLAQIGDQYADLFLAAKNLSDAILLSDILRVNTEITKAPLSASMIKRYDEHHQDLTLLKALVRQQLPEKYKEIFFDQSKNGYAGYIDGGASQEEFYKFIKPILEKMDGTEELLVKLNREDLLRKQRTFDNGSIPHQIHLGELHAILRRQEDFYPFLKDNREKIEKILTFRIPYYVGPLARGNSRFAWMTRKSEETITPWNFEEVVDKGASAQSFIERMTNFDKNLPNEKVLPKHSLLYEYFTVYNELTKVKYVTEGMRKPAFLSGEQKKAIVDLLFKTNRKVTVKQLKEDYFKKIECFDSVEISGVEDRFNASLGTYHDLLKIIKDKDFLDNEENEDILEDIVLTLTLFEDREMIEERLKTYAHLFDDKVMKQLKRRRYTGWGRLSRKLINGIRDKQSGKTILDFLKSDGFANRNFMQLIHDDSLTFKEDIQKAQVSGQGDSLHEHIANLAGSPAIKKGILQTVKVVDELVKVMGRHKPENIVIEMARENQTTQKGQKNSRERMKRIEEGIKELGSQILKEHPVENTQLQNEKLYLYYLQNGRDMYVDQELDINRLSDYDVDHIVPQSFLKDDSIDNKVLTRSDKARGKSDNVPSEEVVKKMKNYWRQLLNAKLITQRKFDNLTKAERGGLSELDKAGFIKRQLVETRQITKHVAQILDSRMNTKYDENDKLIREVKVITLKSKLVSDFRKDFQFYKVREINNYHHAHDAYLNAVVGTALIKKYPKLESEFVYGDYKVYDVRKMIAKSEQEIGKATAKYFFYSNIMNFFKTEITLANGEIRKRPLIETNGETGEIVWDKGRDFATVRKVLSMPQVNIVKKTEVQTGGFSKESILPKRNSDKLIARKKDWDPKKYGGFDSPTVAYSVLVVAKVEKGKSKKLKSVKELLGITIMERSSFEKNPIDFLEAKGYKEVKKDLIIKLPKYSLFELENGRKRMLASAGELQKGNELALPSKYVNFLYLASHYEKLKGSPEDNEQKQLFVEQHKHYLDEIIEQISEFSKRVILADANLDKVLSAYNKHRDKPIREQAENIIHLFTLTNLGAPAAFKYFDTTIDRKRYTSTKEVLDATLIHQSITGLYETRIDLSQLGGDGGGSSGGMNPLQLLQPLPAEVKGTKLLAHWNSGATITCIPESFLEDEQPIKQTLIKTIHGEKQQNVYYLTFKVKGRKVEAEVIASPYEYILLSPTDVPWLTQQPLQLTILVPLQEYQDRILNKTALPEEQKQQLKALFTKYDNLWQHWENQVGHRKIRPHNIATGDYPPRPQKQYPINPKAKPSIQIVIDDLLKQGVLTPQNSTMNTPVYPVPKPDGRWRMVLDYREVNKTIPLTAAQNQHSAGILATIVRQKYKTTLDLANGFWAHPITPDSYWLTAFTWQGKQYCWTRLPQGFLNSPALFNADAVDLLKEVPNVQVYVDDIYLSHDNPHEHIQQLEKVFQILLQAGYVVSLKKSEIGQRTVEFLGFNITKEGRGLTDTFKTKLLNVTPPKDLKQLQSILGLLNFARNFIPNFAELVQTLYNLIASSPGKYIEWTEDNTKQLNKVIEALNTASNLEERLPDQRLVIKVNTSPSAGYVRYYNESGKKPIMYLNYVFSKAELKFSMLEKLLTTMHKALIKAMDLAMGQEILVYSPIVSMTKIQKTPLPERKALPIRWITWMTYLEDPRIQFHYDKTLPELKHIPDVYTSSIPPLKHPSQYEGVFCTDGSAIKSPDPTKSNNAGMGIVHAIYNPEYKILNQWSIPLGHHTAQMAEIAAVEFACKKALKVPGPVLVITDSFYVAESANKELPYWKSNGFVNNKKEPLKHISKWKSIAECLSIKPDITIQHEKGHQPINTSIHTEGNALADKLATQGSYVVNAGKRTADGSEFEKRTADGSEFESPKKKAKVE

SEQ ID NO: 708 - protein, 2174 aa, synthetic construct
MPAAKRVKLDGGDKKYSIGLDIGTNSVGWAVITDEYKVPSKKFKVLGNTDRHSIKKNLIGALLFDSGETAEATRLKRTARRRYTRRKNRICYLQEIFSNEMAKVDDSFFHRLEESFLVEEDKKHERHPIFGNIVDEVAYHEKYPTIYHLRKKLVDSTDKADLRLIYLALAHMIKFRGHFLIEGDLNPDNSDVDKLFIQLVQTYNQLFEENPINASGVDAKAILSARLSKSRRLENLIAQLPGEKKNGLFGNLIALSLGLTPNFKSNFDLAEDAKLQLSKDTYDDDLDNLLAQIGDQYADLFLAAKNLSDAILLSDILRVNTEITKAPLSASMIKRYDEHHQDLTLLKALVRQQLPEKYKEIFFDQSKNGYAGYIDGGASQEEFYKFIKPILEKMDGTEELLVKLNREDLLRKQRTFDNGSIPHQIHLGELHAILRRQEDFYPFLKDNREKIEKILTFRIPYYVGPLARGNSRFAWMTRKSEETITPWNFEEVVDKGASAQSFIERMTNFDKNLPNEKVLPKHSLLYEYFTVYNELTKVKYVTEGMRKPAFLSGEQKKAIVDLLFKTNRKVTVKQLKEDYFKKIECFDSVEISGVEDRFNASLGTYHDLLKIIKDKDFLDNEENEDILEDIVLTLTLFEDREMIEERLKTYAHLFDDKVMKQLKRRRYTGWGRLSRKLINGIRDKQSGKTILDFLKSDGFANRNFMQLIHDDSLTFKEDIQKAQVSGQGDSLHEHIANLAGSPAIKKGILQTVKVVDELVKVMGRHKPENIVIEMARENQTTQKGQKNSRERMKRIEEGIKELGSQILKEHPVENTQLQNEKLYLYYLQNGRDMYVDQELDINRLSDYDVDHIVPQSFLKDDSIDNKVLTRSDKARGKSDNVPSEEVVKKMKNYWRQLLNAKLITQRKFDNLTKAERGGLSELDKAGFIKRQLVETRQITKHVAQILDSRMNTKYDENDKLIREVKVITLKSKLVSDFRKDFQFYKVREINNYHHAHDAYLNAVVGTALIKKYPKLESEFVYGDYKVYDVRKMIAKSEQEIGKATAKYFFYSNIMNFFKTEITLANGEIRKRPLIETNGETGEIVWDKGRDFATVRKVLSMPQVNIVKKTEVQTGGFSKESILPKRNSDKLIARKKDWDPKKYGGFDSPTVAYSVLVVAKVEKGKSKKLKSVKELLGITIMERSSFEKNPIDFLEAKGYKEVKKDLIIKLPKYSLFELENGRKRMLASAGELQKGNELALPSKYVNFLYLASHYEKLKGSPEDNEQKQLFVEQHKHYLDEIIEQISEFSKRVILADANLDKVLSAYNKHRDKPIREQAENIIHLFTLTNLGAPAAFKYFDTTIDRKRYTSTKEVLDATLIHQSITGLYETRIDLSQLGGDGGGGGPAPGSSGGMNPLQLLQPLPAEVKGTKLLAHWNSGATITCIPESFLEDEQPIKQTLIKTIHGEKQQNVYYLTFKVKGRKVEAEVIASPYEYILLSPTDVPWLTQQPLQLTILVPLQEYQDRILNKTALPEEQKQQLKALFTKYDNLWQHWENQVGHRKIRPHNIATGDYPPRPQKQYPINPKAKPSIQIVIDDLLKQGVLTPQNSTMNTPVYPVPKPDGRWRMVLDYREVNKTIPLTAAQNQHSAGILATIVRQKYKTTLDLANGFWAHPITPDSYWLTAFTWQGKQYCWTRLPQGFLNSPALFNADAVDLLKEVPNVQVYVDDIYLSHDNPHEHIQQLEKVFQILLQAGYVVSLKKSEIGQRTVEFLGFNITKEGRGLTDTFKTKLLNVTPPKDLKQLQSILGLLNFARNFIPNFAELVQTLYNLIASSPGKYIEWTEDNTKQLNKVIEALNTASNLEERLPDQRLVIKVNTSPSAGYVRYYNESGKKPIMYLNYVFSKAELKFSMLEKLLTTMHKALIKAMDLAMGQEILVYSPIVSMTKIQKTPLPERKALPIRWITWMTYLEDPRIQFHYDKTLPELKHIPDVYTSSIPPLKHPSQYEGVFCTDGSAIKSPDPTKSNNAGMGIVHAIYNPEYKILNQWSIPLGHHTAQMAEIAAVEFACKKALKVPGPVLVITDSFYVAESANKELPYWKSNGFVNNKKEPLKHISKWKSIAECLSIKPDITIQHEKGHQPINTSIHTEGNALADKLATQGSYVVNAGKRTADGSEFEKRTADGSEFESPKKKAKVE

SEQ ID NO: 709 - protein, 2176 aa, synthetic construct
MPAAKRVKLDGGDKKYSIGLDIGTNSVGWAVITDEYKVPSKKFKVLGNTDRHSIKKNLIGALLFDSGETAEATRLKRTARRRYTRRKNRICYLQEIFSNEMAKVDDSFFHRLEESFLVEEDKKHERHPIFGNIVDEVAYHEKYPTIYHLRKKLVDSTDKADLRLIYLALAHMIKFRGHFLIEGDLNPDNSDVDKLFIQLVQTYNQLFEENPINASGVDAKAILSARLSKSRRLENLIAQLPGEKKNGLFGNLIALSLGLTPNFKSNFDLAEDAKLQLSKDTYDDDLDNLLAQIGDQYADLFLAAKNLSDAILLSDILRVNTEITKAPLSASMIKRYDEHHQDLTLLKALVRQQLPEKYKEIFFDQSKNGYAGYIDGGASQEEFYKFIKPILEKMDGTEELLVKLNREDLLRKQRTFDNGSIPHQIHLGELHAILRRQEDFYPFLKDNREKIEKILTFRIPYYVGPLARGNSRFAWMTRKSEETITPWNFEEVVDKGASAQSFIERMTNFDKNLPNEKVLPKHSLLYEYFTVYNELTKVKYVTEGMRKPAFLSGEQKKAIVDLLFKTNRKVTVKQLKEDYFKKIECFDSVEISGVEDRFNASLGTYHDLLKIIKDKDFLDNEENEDILEDIVLTLTLFEDREMIEERLKTYAHLFDDKVMKQLKRRRYTGWGRLSRKLINGIRDKQSGKTILDFLKSDGFANRNFMQLIHDDSLTFKEDIQKAQVSGQGDSLHEHIANLAGSPAIKKGILQTVKVVDELVKVMGRHKPENIVIEMARENQTTQKGQKNSRERMKRIEEGIKELGSQILKEHPVENTQLQNEKLYLYYLQNGRDMYVDQELDINRLSDYDVDHIVPQSFLKDDSIDNKVLTRSDKARGKSDNVPSEEVVKKMKNYWRQLLNAKLITQRKFDNLTKAERGGLSELDKAGFIKRQLVETRQITKHVAQILDSRMNTKYDENDKLIREVKVITLKSKLVSDFRKDFQFYKVREINNYHHAHDAYLNAVVGTALIKKYPKLESEFVYGDYKVYDVRKMIAKSEQEIGKATAKYFFYSNIMNFFKTEITLANGEIRKRPLIETNGETGEIVWDKGRDFATVRKVLSMPQVNIVKKTEVQTGGFSKESILPKRNSDKLIARKKDWDPKKYGGFDSPTVAYSVLVVAKVEKGKSKKLKSVKELLGITIMERSSFEKNPIDFLEAKGYKEVKKDLIIKLPKYSLFELENGRKRMLASAGELQKGNELALPSKYVNFLYLASHYEKLKGSPEDNEQKQLFVEQHKHYLDEIIEQISEFSKRVILADANLDKVLSAYNKHRDKPIREQAENIIHLFTLTNLGAPAAFKYFDTTIDRKRYTSTKEVLDATLIHQSITGLYETRIDLSQLGGDGGPAPEAAAKGSSGGMNPLQLLQPLPAEVKGTKLLAHWNSGATITCIPESFLEDEQPIKQTLIKTIHGEKQQNVYYLTFKVKGRKVEAEVIASPYEYILLSPTDVPWLTQQPLQLTILVPLQEYQDRILNKTALPEEQKQQLKALFTKYDNLWQHWENQVGHRKIRPHNIATGDYPPRPQKQYPINPKAKPSIQIVIDDLLKQGVLTPQNSTMNTPVYPVPKPDGRWRMVLDYREVNKTIPLTAAQNQHSAGILATIVRQKYKTTLDLANGFWAHPITPDSYWLTAFTWQGKQYCWTRLPQGFLNSPALFNADAVDLLKEVPNVQVYVDDIYLSHDNPHEHIQQLEKVFQILLQAGYVVSLKKSEIGQRTVEFLGFNITKEGRGLTDTFKTKLLNVTPPKDLKQLQSILGLLNFARNFIPNFAELVQTLYNLIASSPGKYIEWTEDNTKQLNKVIEALNTASNLEERLPDQRLVIKVNTSPSAGYVRYYNESGKKPIMYLNYVFSKAELKFSMLEKLLTTMHKALIKAMDLAMGQEILVYSPIVSMTKIQKTPLPERKALPIRWITWMTYLEDPRIQFHYDKTLPELKHIPDVYTSSIPPLKHPSQYEGVFCTDGSAIKSPDPTKSNNAGMGIVHAIYNPEYKILNQWSIPLGHHTAQMAEIAAVEFACKKALKVPGPVLVITDSFYVAESANKELPYWKSNGFVNNKKEPLKHISKWKSIAECLSIKPDITIQHEKGHQPINTSIHTEGNALADKLATQGSYVVNAGKRTADGSEFEKRTADGSEFESPKKKAKVE

SEQ ID NO: 710 - protein, 2171 aa, synthetic construct
MPAAKRVKLDGGDKKYSIGLDIGTNSVGWAVITDEYKVPSKKFKVLGNTDRHSIKKNLIGALLFDSGETAEATRLKRTARRRYTRRKNRICYLQEIFSNEMAKVDDSFFHRLEESFLVEEDKKHERHPIFGNIVDEVAYHEKYPTIYHLRKKLVDSTDKADLRLIYLALAHMIKFRGHFLIEGDLNPDNSDVDKLFIQLVQTYNQLFEENPINASGVDAKAILSARLSKSRRLENLIAQLPGEKKNGLFGNLIALSLGLTPNFKSNFDLAEDAKLQLSKDTYDDDLDNLLAQIGDQYADLFLAAKNLSDAILLSDILRVNTEITKAPLSASMIKRYDEHHQDLTLLKALVRQQLPEKYKEIFFDQSKNGYAGYIDGGASQEEFYKFIKPILEKMDGTEELLVKLNREDLLRKQRTFDNGSIPHQIHLGELHAILRRQEDFYPFLKDNREKIEKILTFRIPYYVGPLARGNSRFAWMTRKSEETITPWNFEEVVDKGASAQSFIERMTNFDKNLPNEKVLPKHSLLYEYFTVYNELTKVKYVTEGMRKPAFLSGEQKKAIVDLLFKTNRKVTVKQLKEDYFKKIECFDSVEISGVEDRFNASLGTYHDLLKIIKDKDFLDNEENEDILEDIVLTLTLFEDREMIEERLKTYAHLFDDKVMKQLKRRRYTGWGRLSRKLINGIRDKQSGKTILDFLKSDGFANRNFMQLIHDDSLTFKEDIQKAQVSGQGDSLHEHIANLAGSPAIKKGILQTVKVVDELVKVMGRHKPENIVIEMARENQTTQKGQKNSRERMKRIEEGIKELGSQILKEHPVENTQLQNEKLYLYYLQNGRDMYVDQELDINRLSDYDVDHIVPQSFLKDDSIDNKVLTRSDKARGKSDNVPSEEVVKKMKNYWRQLLNAKLITQRKFDNLTKAERGGLSELDKAGFIKRQLVETRQITKHVAQILDSRMNTKYDENDKLIREVKVITLKSKLVSDFRKDFQFYKVREINNYHHAHDAYLNAVVGTALIKKYPKLESEFVYGDYKVYDVRKMIAKSEQEIGKATAKYFFYSNIMNFFKTEITLANGEIRKRPLIETNGETGEIVWDKGRDFATVRKVLSMPQVNIVKKTEVQTGGFSKESILPKRNSDKLIARKKDWDPKKYGGFDSPTVAYSVLVVAKVEKGKSKKLKSVKELLGITIMERSSFEKNPIDFLEAKGYKEVKKDLIIKLPKYSLFELENGRKRMLASAGELQKGNELALPSKYVNFLYLASHYEKLKGSPEDNEQKQLFVEQHKHYLDEIIEQISEFSKRVILADANLDKVLSAYNKHRDKPIREQAENIIHLFTLTNLGAPAAFKYFDTTIDRKRYTSTKEVLDATLIHQSITGLYETRIDLSQLGGDGGGGGGSSGGMNPLQLLQPLPAEVKGTKLLAHWNSGATITCIPESFLEDEQPIKQTLIKTIHGEKQQNVYYLTFKVKGRKVEAEVIASPYEYILLSPTDVPWLTQQPLQLTILVPLQEYQDRILNKTALPEEQKQQLKALFTKYDNLWQHWENQVGHRKIRPHNIATGDYPPRPQKQYPINPKAKPSIQIVIDDLLKQGVLTPQNSTMNTPVYPVPKPDGRWRMVLDYREVNKTIPLTAAQNQHSAGILATIVRQKYKTTLDLANGFWAHPITPDSYWLTAFTWQGKQYCWTRLPQGFLNSPALFNADAVDLLKEVPNVQVYVDDIYLSHDNPHEHIQQLEKVFQILLQAGYVVSLKKSEIGQRTVEFLGFNITKEGRGLTDTFKTKLLNVTPPKDLKQLQSILGLLNFARNFIPNFAELVQTLYNLIASSPGKYIEWTEDNTKQLNKVIEALNTASNLEERLPDQRLVIKVNTSPSAGYVRYYNESGKKPIMYLNYVFSKAELKFSMLEKLLTTMHKALIKAMDLAMGQEILVYSPIVSMTKIQKTPLPERKALPIRWITWMTYLEDPRIQFHYDKTLPELKHIPDVYTSSIPPLKHPSQYEGVFCTDGSAIKSPDPTKSNNAGMGIVHAIYNPEYKILNQWSIPLGHHTAQMAEIAAVEFACKKALKVPGPVLVITDSFYVAESANKELPYWKSNGFVNNKKEPLKHISKWKSIAECLSIKPDITIQHEKGHQPINTSIHTEGNALADKLATQGSYVVNAGKRTADGSEFEKRTADGSEFESPKKKAKVE

SEQ ID NO: 711 - protein, 2174 aa, synthetic construct
MPAAKRVKLDGGDKKYSIGLDIGTNSVGWAVITDEYKVPSKKFKVLGNTDRHSIKKNLIGALLFDSGETAEATRLKRTARRRYTRRKNRICYLQEIFSNEMAKVDDSFFHRLEESFLVEEDKKHERHPIFGNIVDEVAYHEKYPTIYHLRKKLVDSTDKADLRLIYLALAHMIKFRGHFLIEGDLNPDNSDVDKLFIQLVQTYNQLFEENPINASGVDAKAILSARLSKSRRLENLIAQLPGEKKNGLFGNLIALSLGLTPNFKSNFDLAEDAKLQLSKDTYDDDLDNLLAQIGDQYADLFLAAKNLSDAILLSDILRVNTEITKAPLSASMIKRYDEHHQDLTLLKALVRQQLPEKYKEIFFDQSKNGYAGYIDGGASQEEFYKFIKPILEKMDGTEELLVKLNREDLLRKQRTFDNGSIPHQIHLGELHAILRRQEDFYPFLKDNREKIEKILTFRIPYYVGPLARGNSRFAWMTRKSEETITPWNFEEVVDKGASAQSFIERMTNFDKNLPNEKVLPKHSLLYEYFTVYNELTKVKYVTEGMRKPAFLSGEQKKAIVDLLFKTNRKVTVKQLKEDYFKKIECFDSVEISGVEDRFNASLGTYHDLLKIIKDKDFLDNEENEDILEDIVLTLTLFEDREMIEERLKTYAHLFDDKVMKQLKRRRYTGWGRLSRKLINGIRDKQSGKTILDFLKSDGFANRNFMQLIHDDSLTFKEDIQKAQVSGQGDSLHEHIANLAGSPAIKKGILQTVKVVDELVKVMGRHKPENIVIEMARENQTTQKGQKNSRERMKRIEEGIKELGSQILKEHPVENTQLQNEKLYLYYLQNGRDMYVDQELDINRLSDYDVDHIVPQSFLKDDSIDNKVLTRSDKARGKSDNVPSEEVVKKMKNYWRQLLNAKLITQRKFDNLTKAERGGLSELDKAGFIKRQLVETRQITKHVAQILDSRMNTKYDENDKLIREVKVITLKSKLVSDFRKDFQFYKVREINNYHHAHDAYLNAVVGTALIKKYPKLESEFVYGDYKVYDVRKMIAKSEQEIGKATAKYFFYSNIMNFFKTEITLANGEIRKRPLIETNGETGEIVWDKGRDFATVRKVLSMPQVNIVKKTEVQTGGFSKESILPKRNSDKLIARKKDWDPKKYGGFDSPTVAYSVLVVAKVEKGKSKKLKSVKELLGITIMERSSFEKNPIDFLEAKGYKEVKKDLIIKLPKYSLFELENGRKRMLASAGELQKGNELALPSKYVNFLYLASHYEKLKGSPEDNEQKQLFVEQHKHYLDEIIEQISEFSKRVILADANLDKVLSAYNKHRDKPIREQAENIIHLFTLTNLGAPAAFKYFDTTIDRKRYTSTKEVLDATLIHQSITGLYETRIDLSQLGGDGGGSSGGGGGSGGMNPLQLLQPLPAEVKGTKLLAHWNSGATITCIPESFLEDEQPIKQTLIKTIHGEKQQNVYYLTFKVKGRKVEAEVIASPYEYILLSPTDVPWLTQQPLQLTILVPLQEYQDRILNKTALPEEQKQQLKALFTKYDNLWQHWENQVGHRKIRPHNIATGDYPPRPQKQYPINPKAKPSIQIVIDDLLKQGVLTPQNSTMNTPVYPVPKPDGRWRMVLDYREVNKTIPLTAAQNQHSAGILATIVRQKYKTTLDLANGFWAHPITPDSYWLTAFTWQGKQYCWTRLPQGFLNSPALFNADAVDLLKEVPNVQVYVDDIYLSHDNPHEHIQQLEKVFQILLQAGYVVSLKKSEIGQRTVEFLGFNITKEGRGLTDTFKTKLLNVTPPKDLKQLQSILGLLNFARNFIPNFAELVQTLYNLIASSPGKYIEWTEDNTKQLNKVIEALNTASNLEERLPDQRLVIKVNTSPSAGYVRYYNESGKKPIMYLNYVFSKAELKFSMLEKLLTTMHKALIKAMDLAMGQEILVYSPIVSMTKIQKTPLPERKALPIRWITWMTYLEDPRIQFHYDKTLPELKHIPDVYTSSIPPLKHPSQYEGVFCTDGSAIKSPDPTKSNNAGMGIVHAIYNPEYKILNQWSIPLGHHTAQMAEIAAVEFACKKALKVPGPVLVITDSFYVAESANKELPYWKSNGFVNNKKEPLKHISKWKSIAECLSIKPDITIQHEKGHQPINTSIHTEGNALADKLATQGSYVVNAGKRTADGSEFEKRTADGSEFESPKKKAKVE

SEQ ID NO: 712 - protein, 2176 aa, synthetic construct
MPAAKRVKLDGGDKKYSIGLDIGTNSVGWAVITDEYKVPSKKFKVLGNTDRHSIKKNLIGALLFDSGETAEATRLKRTARRRYTRRKNRICYLQEIFSNEMAKVDDSFFHRLEESFLVEEDKKHERHPIFGNIVDEVAYHEKYPTIYHLRKKLVDSTDKADLRLIYLALAHMIKFRGHFLIEGDLNPDNSDVDKLFIQLVQTYNQLFEENPINASGVDAKAILSARLSKSRRLENLIAQLPGEKKNGLFGNLIALSLGLTPNFKSNFDLAEDAKLQLSKDTYDDDLDNLLAQIGDQYADLFLAAKNLSDAILLSDILRVNTEITKAPLSASMIKRYDEHHQDLTLLKALVRQQLPEKYKEIFFDQSKNGYAGYIDGGASQEEFYKFIKPILEKMDGTEELLVKLNREDLLRKQRTFDNGSIPHQIHLGELHAILRRQEDFYPFLKDNREKIEKILTFRIPYYVGPLARGNSRFAWMTRKSEETITPWNFEEVVDKGASAQSFIERMTNFDKNLPNEKVLPKHSLLYEYFTVYNELTKVKYVTEGMRKPAFLSGEQKKAIVDLLFKTNRKVTVKQLKEDYFKKIECFDSVEISGVEDRFNASLGTYHDLLKIIKDKDFLDNEENEDILEDIVLTLTLFEDREMIEERLKTYAHLFDDKVMKQLKRRRYTGWGRLSRKLINGIRDKQSGKTILDFLKSDGFANRNFMQLIHDDSLTFKEDIQKAQVSGQGDSLHEHIANLAGSPAIKKGILQTVKVVDELVKVMGRHKPENIVIEMARENQTTQKGQKNSRERMKRIEEGIKELGSQILKEHPVENTQLQNEKLYLYYLQNGRDMYVDQELDINRLSDYDVDHIVPQSFLKDDSIDNKVLTRSDKARGKSDNVPSEEVVKKMKNYWRQLLNAKLITQRKFDNLTKAERGGLSELDKAGFIKRQLVETRQITKHVAQILDSRMNTKYDENDKLIREVKVITLKSKLVSDFRKDFQFYKVREINNYHHAHDAYLNAVVGTALIKKYPKLESEFVYGDYKVYDVRKMIAKSEQEIGKATAKYFFYSNIMNFFKTEITLANGEIRKRPLIETNGETGEIVWDKGRDFATVRKVLSMPQVNIVKKTEVQTGGFSKESILPKRNSDKLIARKKDWDPKKYGGFDSPTVAYSVLVVAKVEKGKSKKLKSVKELLGITIMERSSFEKNPIDFLEAKGYKEVKKDLIIKLPKYSLFELENGRKRMLASAGELQKGNELALPSKYVNFLYLASHYEKLKGSPEDNEQKQLFVEQHKHYLDEIIEQISEFSKRVILADANLDKVLSAYNKHRDKPIREQAENIIHLFTLTNLGAPAAFKYFDTTIDRKRYTSTKEVLDATLIHQSITGLYETRIDLSQLGGDGGGSSGGSEAAAKGGMNPLQLLQPLPAEVKGTKLLAHWNSGATITCIPESFLEDEQPIKQTLIKTIHGEKQQNVYYLTFKVKGRKVEAEVIASPYEYILLSPTDVPWLTQQPLQLTILVPLQEYQDRILNKTALPEEQKQQLKALFTKYDNLWQHWENQVGHRKIRPHNIATGDYPPRPQKQYPINPKAKPSIQIVIDDLLKQGVLTPQNSTMNTPVYPVPKPDGRWRMVLDYREVNKTIPLTAAQNQHSAGILATIVRQKYKTTLDLANGFWAHPITPDSYWLTAFTWQGKQYCWTRLPQGFLNSPALFNADAVDLLKEVPNVQVYVDDIYLSHDNPHEHIQQLEKVFQILLQAGYVVSLKKSEIGQRTVEFLGFNITKEGRGLTDTFKTKLLNVTPPKDLKQLQSILGLLNFARNFIPNFAELVQTLYNLIASSPGKYIEWTEDNTKQLNKVIEALNTASNLEERLPDQRLVIKVNTSPSAGYVRYYNESGKKPIMYLNYVFSKAELKFSMLEKLLTTMHKALIKAMDLAMGQEILVYSPIVSMTKIQKTPLPERKALPIRWITWMTYLEDPRIQFHYDKTLPELKHIPDVYTSSIPPLKHPSQYEGVFCTDGSAIKSPDPTKSNNAGMGIVHAIYNPEYKILNQWSIPLGHHTAQMAEIAAVEFACKKALKVPGPVLVITDSFYVAESANKELPYWKSNGFVNNKKEPLKHISKWKSIAECLSIKPDITIQHEKGHQPINTSIHTEGNALADKLATQGSYVVNAGKRTADGSEFEKRTADGSEFESPKKKAKVE

SEQ ID NO: 713 - protein, 2181 aa, synthetic construct
MPAAKRVKLDGGDKKYSIGLDIGTNSVGWAVITDEYKVPSKKFKVLGNTDRHSIKKNLIGALLFDSGETAEATRLKRTARRRYTRRKNRICYLQEIFSNEMAKVDDSFFHRLEESFLVEEDKKHERHPIFGNIVDEVAYHEKYPTIYHLRKKLVDSTDKADLRLIYLALAHMIKFRGHFLIEGDLNPDNSDVDKLFIQLVQTYNQLFEENPINASGVDAKAILSARLSKSRRLENLIAQLPGEKKNGLFGNLIALSLGLTPNFKSNFDLAEDAKLQLSKDTYDDDLDNLLAQIGDQYADLFLAAKNLSDAILLSDILRVNTEITKAPLSASMIKRYDEHHQDLTLLKALVRQQLPEKYKEIFFDQSKNGYAGYIDGGASQEEFYKFIKPILEKMDGTEELLVKLNREDLLRKQRTFDNGSIPHQIHLGELHAILRRQEDFYPFLKDNREKIEKILTFRIPYYVGPLARGNSRFAWMTRKSEETITPWNFEEVVDKGASAQSFIERMTNFDKNLPNEKVLPKHSLLYEYFTVYNELTKVKYVTEGMRKPAFLSGEQKKAIVDLLFKTNRKVTVKQLKEDYFKKIECFDSVEISGVEDRFNASLGTYHDLLKIIKDKDFLDNEENEDILEDIVLTLTLFEDREMIEERLKTYAHLFDDKVMKQLKRRRYTGWGRLSRKLINGIRDKQSGKTILDFLKSDGFANRNFMQLIHDDSLTFKEDIQKAQVSGQGDSLHEHIANLAGSPAIKKGILQTVKVVDELVKVMGRHKPENIVIEMARENQTTQKGQKNSRERMKRIEEGIKELGSQILKEHPVENTQLQNEKLYLYYLQNGRDMYVDQELDINRLSDYDVDHIVPQSFLKDDSIDNKVLTRSDKARGKSDNVPSEEVVKKMKNYWRQLLNAKLITQRKFDNLTKAERGGLSELDKAGFIKRQLVETRQITKHVAQILDSRMNTKYDENDKLIREVKVITLKSKLVSDFRKDFQFYKVREINNYHHAHDAYLNAVVGTALIKKYPKLESEFVYGDYKVYDVRKMIAKSEQEIGKATAKYFFYSNIMNFFKTEITLANGEIRKRPLIETNGETGEIVWDKGRDFATVRKVLSMPQVNIVKKTEVQTGGFSKESILPKRNSDKLIARKKDWDPKKYGGFDSPTVAYSVLVVAKVEKGKSKKLKSVKELLGITIMERSSFEKNPIDFLEAKGYKEVKKDLIIKLPKYSLFELENGRKRMLASAGELQKGNELALPSKYVNFLYLASHYEKLKGSPEDNEQKQLFVEQHKHYLDEIIEQISEFSKRVILADANLDKVLSAYNKHRDKPIREQAENIIHLFTLTNLGAPAAFKYFDTTIDRKRYTSTKEVLDATLIHQSITGLYETRIDLSQLGGDGGSGSETPGTSESATPESGGMNPLQLLQPLPAEVKGTKLLAHWNSGATITCIPESFLEDEQPIKQTLIKTIHGEKQQNVYYLTFKVKGRKVEAEVIASPYEYILLSPTDVPWLTQQPLQLTILVPLQEYQDRILNKTALPEEQKQQLKALFTKYDNLWQHWENQVGHRKIRPHNIATGDYPPRPQKQYPINPKAKPSIQIVIDDLLKQGVLTPQNSTMNTPVYPVPKPDGRWRMVLDYREVNKTIPLTAAQNQHSAGILATIVRQKYKTTLDLANGFWAHPITPDSYWLTAFTWQGKQYCWTRLPQGFLNSPALFNADAVDLLKEVPNVQVYVDDIYLSHDNPHEHIQQLEKVFQILLQAGYVVSLKKSEIGQRTVEFLGFNITKEGRGLTDTFKTKLLNVTPPKDLKQLQSILGLLNFARNFIPNFAELVQTLYNLIASSPGKYIEWTEDNTKQLNKVIEALNTASNLEERLPDQRLVIKVNTSPSAGYVRYYNESGKKPIMYLNYVFSKAELKFSMLEKLLTTMHKALIKAMDLAMGQEILVYSPIVSMTKIQKTPLPERKALPIRWITWMTYLEDPRIQFHYDKTLPELKHIPDVYTSSIPPLKHPSQYEGVFCTDGSAIKSPDPTKSNNAGMGIVHAIYNPEYKILNQWSIPLGHHTAQMAEIAAVEFACKKALKVPGPVLVITDSFYVAESANKELPYWKSNGFVNNKKEPLKHISKWKSIAECLSIKPDITIQHEKGHQPINTSIHTEGNALADKLATQGSYVVNAGKRTADGSEFEKRTADGSEFESPKKKAKVE

SEQ ID NO: 714 - protein, 2176 aa, synthetic construct
MPAAKRVKLDGGDKKYSIGLDIGTNSVGWAVITDEYKVPSKKFKVLGNTDRHSIKKNLIGALLFDSGETAEATRLKRTARRRYTRRKNRICYLQEIFSNEMAKVDDSFFHRLEESFLVEEDKKHERHPIFGNIVDEVAYHEKYPTIYHLRKKLVDSTDKADLRLIYLALAHMIKFRGHFLIEGDLNPDNSDVDKLFIQLVQTYNQLFEENPINASGVDAKAILSARLSKSRRLENLIAQLPGEKKNGLFGNLIALSLGLTPNFKSNFDLAEDAKLQLSKDTYDDDLDNLLAQIGDQYADLFLAAKNLSDAILLSDILRVNTEITKAPLSASMIKRYDEHHQDLTLLKALVRQQLPEKYKEIFFDQSKNGYAGYIDGGASQEEFYKFIKPILEKMDGTEELLVKLNREDLLRKQRTFDNGSIPHQIHLGELHAILRRQEDFYPFLKDNREKIEKILTFRIPYYVGPLARGNSRFAWMTRKSEETITPWNFEEVVDKGASAQSFIERMTNFDKNLPNEKVLPKHSLLYEYFTVYNELTKVKYVTEGMRKPAFLSGEQKKAIVDLLFKTNRKVTVKQLKEDYFKKIECFDSVEISGVEDRFNASLGTYHDLLKIIKDKDFLDNEENEDILEDIVLTLTLFEDREMIEERLKTYAHLFDDKVMKQLKRRRYTGWGRLSRKLINGIRDKQSGKTILDFLKSDGFANRNFMQLIHDDSLTFKEDIQKAQVSGQGDSLHEHIANLAGSPAIKKGILQTVKVVDELVKVMGRHKPENIVIEMARENQTTQKGQKNSRERMKRIEEGIKELGSQILKEHPVENTQLQNEKLYLYYLQNGRDMYVDQELDINRLSDYDVDHIVPQSFLKDDSIDNKVLTRSDKARGKSDNVPSEEVVKKMKNYWRQLLNAKLITQRKFDNLTKAERGGLSELDKAGFIKRQLVETRQITKHVAQILDSRMNTKYDENDKLIREVKVITLKSKLVSDFRKDFQFYKVREINNYHHAHDAYLNAVVGTALIKKYPKLESEFVYGDYKVYDVRKMIAKSEQEIGKATAKYFFYSNIMNFFKTEITLANGEIRKRPLIETNGETGEIVWDKGRDFATVRKVLSMPQVNIVKKTEVQTGGFSKESILPKRNSDKLIARKKDWDPKKYGGFDSPTVAYSVLVVAKVEKGKSKKLKSVKELLGITIMERSSFEKNPIDFLEAKGYKEVKKDLIIKLPKYSLFELENGRKRMLASAGELQKGNELALPSKYVNFLYLASHYEKLKGSPEDNEQKQLFVEQHKHYLDEIIEQISEFSKRVILADANLDKVLSAYNKHRDKPIREQAENIIHLFTLTNLGAPAAFKYFDTTIDRKRYTSTKEVLDATLIHQSITGLYETRIDLSQLGGDGGGGSEAAAKPAPGGMNPLQLLQPLPAEVKGTKLLAHWNSGATITCIPESFLEDEQPIKQTLIKTIHGEKQQNVYYLTFKVKGRKVEAEVIASPYEYILLSPTDVPWLTQQPLQLTILVPLQEYQDRILNKTALPEEQKQQLKALFTKYDNLWQHWENQVGHRKIRPHNIATGDYPPRPQKQYPINPKAKPSIQIVIDDLLKQGVLTPQNSTMNTPVYPVPKPDGRWRMVLDYREVNKTIPLTAAQNQHSAGILATIVRQKYKTTLDLANGFWAHPITPDSYWLTAFTWQGKQYCWTRLPQGFLNSPALFNADAVDLLKEVPNVQVYVDDIYLSHDNPHEHIQQLEKVFQILLQAGYVVSLKKSEIGQRTVEFLGFNITKEGRGLTDTFKTKLLNVTPPKDLKQLQSILGLLNFARNFIPNFAELVQTLYNLIASSPGKYIEWTEDNTKQLNKVIEALNTASNLEERLPDQRLVIKVNTSPSAGYVRYYNESGKKPIMYLNYVFSKAELKFSMLEKLLTTMHKALIKAMDLAMGQEILVYSPIVSMTKIQKTPLPERKALPIRWITWMTYLEDPRIQFHYDKTLPELKHIPDVYTSSIPPLKHPSQYEGVFCTDGSAIKSPDPTKSNNAGMGIVHAIYNPEYKILNQWSIPLGHHTAQMAEIAAVEFACKKALKVPGPVLVITDSFYVAESANKELPYWKSNGFVNNKKEPLKHISKWKSIAECLSIKPDITIQHEKGHQPINTSIHTEGNALADKLATQGSYVVNAGKRTADGSEFEKRTADGSEFESPKKKAKVE

SEQ ID NO: 715 - protein, 2208 aa, synthetic construct
MPAAKRVKLDGGDKKYSIGLDIGTNSVGWAVITDEYKVPSKKFKVLGNTDRHSIKKNLIGALLFDSGETAEATRLKRTARRRYTRRKNRICYLQEIFSNEMAKVDDSFFHRLEESFLVEEDKKHERHPIFGNIVDEVAYHEKYPTIYHLRKKLVDSTDKADLRLIYLALAHMIKFRGHFLIEGDLNPDNSDVDKLFIQLVQTYNQLFEENPINASGVDAKAILSARLSKSRRLENLIAQLPGEKKNGLFGNLIALSLGLTPNFKSNFDLAEDAKLQLSKDTYDDDLDNLLAQIGDQYADLFLAAKNLSDAILLSDILRVNTEITKAPLSASMIKRYDEHHQDLTLLKALVRQQLPEKYKEIFFDQSKNGYAGYIDGGASQEEFYKFIKPILEKMDGTEELLVKLNREDLLRKQRTFDNGSIPHQIHLGELHAILRRQEDFYPFLKDNREKIEKILTFRIPYYVGPLARGNSRFAWMTRKSEETITPWNFEEVVDKGASAQSFIERMTNFDKNLPNEKVLPKHSLLYEYFTVYNELTKVKYVTEGMRKPAFLSGEQKKAIVDLLFKTNRKVTVKQLKEDYFKKIECFDSVEISGVEDRFNASLGTYHDLLKIIKDKDFLDNEENEDILEDIVLTLTLFEDREMIEERLKTYAHLFDDKVMKQLKRRRYTGWGRLSRKLINGIRDKQSGKTILDFLKSDGFANRNFMQLIHDDSLTFKEDIQKAQVSGQGDSLHEHIANLAGSPAIKKGILQTVKVVDELVKVMGRHKPENIVIEMARENQTTQKGQKNSRERMKRIEEGIKELGSQILKEHPVENTQLQNEKLYLYYLQNGRDMYVDQELDINRLSDYDVDHIVPQSFLKDDSIDNKVLTRSDKARGKSDNVPSEEVVKKMKNYWRQLLNAKLITQRKFDNLTKAERGGLSELDKAGFIKRQLVETRQITKHVAQILDSRMNTKYDENDKLIREVKVITLKSKLVSDFRKDFQFYKVREINNYHHAHDAYLNAVVGTALIKKYPKLESEFVYGDYKVYDVRKMIAKSEQEIGKATAKYFFYSNIMNFFKTEITLANGEIRKRPLIETNGETGEIVWDKGRDFATVRKVLSMPQVNIVKKTEVQTGGFSKESILPKRNSDKLIARKKDWDPKKYGGFDSPTVAYSVLVVAKVEKGKSKKLKSVKELLGITIMERSSFEKNPIDFLEAKGYKEVKKDLIIKLPKYSLFELENGRKRMLASAGELQKGNELALPSKYVNFLYLASHYEKLKGSPEDNEQKQLFVEQHKHYLDEIIEQISEFSKRVILADANLDKVLSAYNKHRDKPIREQAENIIHLFTLTNLGAPAAFKYFDTTIDRKRYTSTKEVLDATLIHQSITGLYETRIDLSQLGGDGGAEAAAKEAAAKEAAAKEAAAKALEAEAAAKEAAAKEAAAKEAAAKAGGMDLLKPLTVERKGVKIKGYWNSQADITCVPKDLLQGEEPVRQQNVTTIHGTQEGDVYYVNLKIDGRRINTEVIGTTLDYAIITPGDVPWILKKPLELTIKLDLEEQQGTLLNNSILSKKGKEELKQLFEKYSALWQSWENQVGHRRIRPHKIATGTVKPTPQKQYHINPKAKPDIQIVINDLLKQGVLIQKESTMNTPVYPVPKPNGRWRMVLDYRAVNKVTPLIAVQNQHSYGILGSLFKGRYKTTIDLSNGFWAHPIVPEDYWITAFTWQGKQYCWTVLPQGFLNSPGLFTGDVVDLLQGIPNVEVYVDDVYISHDSEKEHLEYLDILFNRLKEAGYIISLKKSNIANSIVDFLGFQITNEGRGLTDTFKEKLENITAPTTLKQLQSILGLLNFARNFIPDFTELIAPLYALIPKSTKNYVPWQIEHSTTLETLITKLNGAEYLQGRKGDKTLIMKVNASYTTGYIRYYNEGEKKPISYVSIVFSKTELKFTELEKLLTTVHKGLLKALDLSMGQNIHVYSPIVSMQNIQKTPQTAKKALASRWLSWLSYLEDPRIRFFYDPQMPALKDLPAVDTGKDNKKHPSNFQHIFYTDGSAITSPTKEGHLNAGMGIVYFINKDGNLQKQQEWSISLGNHTAQFAEIAAFEFALKKCLPLGGNILVVTDSNYVAKAYNEELDVWASNGFVNNRKKPLKHISKWKSVADLKRLRPDVVVTHEPGHQKLDSSPHAYGNNLADQLATQASFKVHAGKRTADGSEFEKRTADGSEFESPKKKAKVE

SEQ ID NO: 716 - protein, 2192 aa, synthetic construct
MPAAKRVKLDGGDKKYSIGLDIGTNSVGWAVITDEYKVPSKKFKVLGNTDRHSIKKNLIGALLFDSGETAEATRLKRTARRRYTRRKNRICYLQEIFSNEMAKVDDSFFHRLEESFLVEEDKKHERHPIFGNIVDEVAYHEKYPTIYHLRKKLVDSTDKADLRLIYLALAHMIKFRGHFLIEGDLNPDNSDVDKLFIQLVQTYNQLFEENPINASGVDAKAILSARLSKSRRLENLIAQLPGEKKNGLFGNLIALSLGLTPNFKSNFDLAEDAKLQLSKDTYDDDLDNLLAQIGDQYADLFLAAKNLSDAILLSDILRVNTEITKAPLSASMIKRYDEHHQDLTLLKALVRQQLPEKYKEIFFDQSKNGYAGYIDGGASQEEFYKFIKPILEKMDGTEELLVKLNREDLLRKQRTFDNGSIPHQIHLGELHAILRRQEDFYPFLKDNREKIEKILTFRIPYYVGPLARGNSRFAWMTRKSEETITPWNFEEVVDKGASAQSFIERMTNFDKNLPNEKVLPKHSLLYEYFTVYNELTKVKYVTEGMRKPAFLSGEQKKAIVDLLFKTNRKVTVKQLKEDYFKKIECFDSVEISGVEDRFNASLGTYHDLLKIIKDKDFLDNEENEDILEDIVLTLTLFEDREMIEERLKTYAHLFDDKVMKQLKRRRYTGWGRLSRKLINGIRDKQSGKTILDFLKSDGFANRNFMQLIHDDSLTFKEDIQKAQVSGQGDSLHEHIANLAGSPAIKKGILQTVKVVDELVKVMGRHKPENIVIEMARENQTTQKGQKNSRERMKRIEEGIKELGSQILKEHPVENTQLQNEKLYLYYLQNGRDMYVDQELDINRLSDYDVDHIVPQSFLKDDSIDNKVLTRSDKARGKSDNVPSEEVVKKMKNYWRQLLNAKLITQRKFDNLTKAERGGLSELDKAGFIKRQLVETRQITKHVAQILDSRMNTKYDENDKLIREVKVITLKSKLVSDFRKDFQFYKVREINNYHHAHDAYLNAVVGTALIKKYPKLESEFVYGDYKVYDVRKMIAKSEQEIGKATAKYFFYSNIMNFFKTEITLANGEIRKRPLIETNGETGEIVWDKGRDFATVRKVLSMPQVNIVKKTEVQTGGFSKESILPKRNSDKLIARKKDWDPKKYGGFDSPTVAYSVLVVAKVEKGKSKKLKSVKELLGITIMERSSFEKNPIDFLEAKGYKEVKKDLIIKLPKYSLFELENGRKRMLASAGELQKGNELALPSKYVNFLYLASHYEKLKGSPEDNEQKQLFVEQHKHYLDEIIEQISEFSKRVILADANLDKVLSAYNKHRDKPIREQAENIIHLFTLTNLGAPAAFKYFDTTIDRKRYTSTKEVLDATLIHQSITGLYETRIDLSQLGGDGGGGGGSGGGGSGGGGSGGGGSGGGGSGGGGSGGMDLLKPLTVERKGVKIKGYWNSQADITCVPKDLLQGEEPVRQQNVTTIHGTQEGDVYYVNLKIDGRRINTEVIGTTLDYAIITPGDVPWILKKPLELTIKLDLEEQQGTLLNNSILSKKGKEELKQLFEKYSALWQSWENQVGHRRIRPHKIATGTVKPTPQKQYHINPKAKPDIQIVINDLLKQGVLIQKESTMNTPVYPVPKPNGRWRMVLDYRAVNKVTPLIAVQNQHSYGILGSLFKGRYKTTIDLSNGFWAHPIVPEDYWITAFTWQGKQYCWTVLPQGFLNSPGLFTGDVVDLLQGIPNVEVYVDDVYISHDSEKEHLEYLDILFNRLKEAGYIISLKKSNIANSIVDFLGFQITNEGRGLTDTFKEKLENITAPTTLKQLQSILGLLNFARNFIPDFTELIAPLYALIPKSTKNYVPWQIEHSTTLETLITKLNGAEYLQGRKGDKTLIMKVNASYTTGYIRYYNEGEKKPISYVSIVFSKTELKFTELEKLLTTVHKGLLKALDLSMGQNIHVYSPIVSMQNIQKTPQTAKKALASRWLSWLSYLEDPRIRFFYDPQMPALKDLPAVDTGKDNKKHPSNFQHIFYTDGSAITSPTKEGHLNAGMGIVYFINKDGNLQKQQEWSISLGNHTAQFAEIAAFEFALKKCLPLGGNILVVTDSNYVAKAYNEELDVWASNGFVNNRKKPLKHISKWKSVADLKRLRPDVVVTHEPGHQKLDSSPHAYGNNLADQLATQASFKVHAGKRTADGSEFEKRTADGSEFESPKKKAKVE

SEQ ID NO: 717 - protein, 2171 aa, synthetic construct
MPAAKRVKLDGGDKKYSIGLDIGTNSVGWAVITDEYKVPSKKFKVLGNTDRHSIKKNLIGALLFDSGETAEATRLKRTARRRYTRRKNRICYLQEIFSNEMAKVDDSFFHRLEESFLVEEDKKHERHPIFGNIVDEVAYHEKYPTIYHLRKKLVDSTDKADLRLIYLALAHMIKFRGHFLIEGDLNPDNSDVDKLFIQLVQTYNQLFEENPINASGVDAKAILSARLSKSRRLENLIAQLPGEKKNGLFGNLIALSLGLTPNFKSNFDLAEDAKLQLSKDTYDDDLDNLLAQIGDQYADLFLAAKNLSDAILLSDILRVNTEITKAPLSASMIKRYDEHHQDLTLLKALVRQQLPEKYKEIFFDQSKNGYAGYIDGGASQEEFYKFIKPILEKMDGTEELLVKLNREDLLRKQRTFDNGSIPHQIHLGELHAILRRQEDFYPFLKDNREKIEKILTFRIPYYVGPLARGNSRFAWMTRKSEETITPWNFEEVVDKGASAQSFIERMTNFDKNLPNEKVLPKHSLLYEYFTVYNELTKVKYVTEGMRKPAFLSGEQKKAIVDLLFKTNRKVTVKQLKEDYFKKIECFDSVEISGVEDRFNASLGTYHDLLKIIKDKDFLDNEENEDILEDIVLTLTLFEDREMIEERLKTYAHLFDDKVMKQLKRRRYTGWGRLSRKLINGIRDKQSGKTILDFLKSDGFANRNFMQLIHDDSLTFKEDIQKAQVSGQGDSLHEHIANLAGSPAIKKGILQTVKVVDELVKVMGRHKPENIVIEMARENQTTQKGQKNSRERMKRIEEGIKELGSQILKEHPVENTQLQNEKLYLYYLQNGRDMYVDQELDINRLSDYDVDHIVPQSFLKDDSIDNKVLTRSDKARGKSDNVPSEEVVKKMKNYWRQLLNAKLITQRKFDNLTKAERGGLSELDKAGFIKRQLVETRQITKHVAQILDSRMNTKYDENDKLIREVKVITLKSKLVSDFRKDFQFYKVREINNYHHAHDAYLNAVVGTALIKKYPKLESEFVYGDYKVYDVRKMIAKSEQEIGKATAKYFFYSNIMNFFKTEITLANGEIRKRPLIETNGETGEIVWDKGRDFATVRKVLSMPQVNIVKKTEVQTGGFSKESILPKRNSDKLIARKKDWDPKKYGGFDSPTVAYSVLVVAKVEKGKSKKLKSVKELLGITIMERSSFEKNPIDFLEAKGYKEVKKDLIIKLPKYSLFELENGRKRMLASAGELQKGNELALPSKYVNFLYLASHYEKLKGSPEDNEQKQLFVEQHKHYLDEIIEQISEFSKRVILADANLDKVLSAYNKHRDKPIREQAENIIHLFTLTNLGAPAAFKYFDTTIDRKRYTSTKEVLDATLIHQSITGLYETRIDLSQLGGDGGGSSGGSPAPGGMDLLKPLTVERKGVKIKGYWNSQADITCVPKDLLQGEEPVRQQNVTTIHGTQEGDVYYVNLKIDGRRINTEVIGTTLDYAIITPGDVPWILKKPLELTIKLDLEEQQGTLLNNSILSKKGKEELKQLFEKYSALWQSWENQVGHRRIRPHKIATGTVKPTPQKQYHINPKAKPDIQIVINDLLKQGVLIQKESTMNTPVYPVPKPNGRWRMVLDYRAVNKVTPLIAVQNQHSYGILGSLFKGRYKTTIDLSNGFWAHPIVPEDYWITAFTWQGKQYCWTVLPQGFLNSPGLFTGDVVDLLQGIPNVEVYVDDVYISHDSEKEHLEYLDILFNRLKEAGYIISLKKSNIANSIVDFLGFQITNEGRGLTDTFKEKLENITAPTTLKQLQSILGLLNFARNFIPDFTELIAPLYALIPKSTKNYVPWQIEHSTTLETLITKLNGAEYLQGRKGDKTLIMKVNASYTTGYIRYYNEGEKKPISYVSIVFSKTELKFTELEKLLTTVHKGLLKALDLSMGQNIHVYSPIVSMQNIQKTPQTAKKALASRWLSWLSYLEDPRIRFFYDPQMPALKDLPAVDTGKDNKKHPSNFQHIFYTDGSAITSPTKEGHLNAGMGIVYFINKDGNLQKQQEWSISLGNHTAQFAEIAAFEFALKKCLPLGGNILVVTDSNYVAKAYNEELDVWASNGFVNNRKKPLKHISKWKSVADLKRLRPDVVVTHEPGHQKLDSSPHAYGNNLADQLATQASFKVHAGKRTADGSEFEKRTADGSEFESPKKKAKVE

SEQ ID NO: 718 - protein, 2177 aa, synthetic construct
MPAAKRVKLDGGDKKYSIGLDIGTNSVGWAVITDEYKVPSKKFKVLGNTDRHSIKKNLIGALLFDSGETAEATRLKRTARRRYTRRKNRICYLQEIFSNEMAKVDDSFFHRLEESFLVEEDKKHERHPIFGNIVDEVAYHEKYPTIYHLRKKLVDSTDKADLRLIYLALAHMIKFRGHFLIEGDLNPDNSDVDKLFIQLVQTYNQLFEENPINASGVDAKAILSARLSKSRRLENLIAQLPGEKKNGLFGNLIALSLGLTPNFKSNFDLAEDAKLQLSKDTYDDDLDNLLAQIGDQYADLFLAAKNLSDAILLSDILRVNTEITKAPLSASMIKRYDEHHQDLTLLKALVRQQLPEKYKEIFFDQSKNGYAGYIDGGASQEEFYKFIKPILEKMDGTEELLVKLNREDLLRKQRTFDNGSIPHQIHLGELHAILRRQEDFYPFLKDNREKIEKILTFRIPYYVGPLARGNSRFAWMTRKSEETITPWNFEEVVDKGASAQSFIERMTNFDKNLPNEKVLPKHSLLYEYFTVYNELTKVKYVTEGMRKPAFLSGEQKKAIVDLLFKTNRKVTVKQLKEDYFKKIECFDSVEISGVEDRFNASLGTYHDLLKIIKDKDFLDNEENEDILEDIVLTLTLFEDREMIEERLKTYAHLFDDKVMKQLKRRRYTGWGRLSRKLINGIRDKQSGKTILDFLKSDGFANRNFMQLIHDDSLTFKEDIQKAQVSGQGDSLHEHIANLAGSPAIKKGILQTVKVVDELVKVMGRHKPENIVIEMARENQTTQKGQKNSRERMKRIEEGIKELGSQILKEHPVENTQLQNEKLYLYYLQNGRDMYVDQELDINRLSDYDVDHIVPQSFLKDDSIDNKVLTRSDKARGKSDNVPSEEVVKKMKNYWRQLLNAKLITQRKFDNLTKAERGGLSELDKAGFIKRQLVETRQITKHVAQILDSRMNTKYDENDKLIREVKVITLKSKLVSDFRKDFQFYKVREINNYHHAHDAYLNAVVGTALIKKYPKLESEFVYGDYKVYDVRKMIAKSEQEIGKATAKYFFYSNIMNFFKTEITLANGEIRKRPLIETNGETGEIVWDKGRDFATVRKVLSMPQVNIVKKTEVQTGGFSKESILPKRNSDKLIARKKDWDPKKYGGFDSPTVAYSVLVVAKVEKGKSKKLKSVKELLGITIMERSSFEKNPIDFLEAKGYKEVKKDLIIKLPKYSLFELENGRKRMLASAGELQKGNELALPSKYVNFLYLASHYEKLKGSPEDNEQKQLFVEQHKHYLDEIIEQISEFSKRVILADANLDKVLSAYNKHRDKPIREQAENIIHLFTLTNLGAPAAFKYFDTTIDRKRYTSTKEVLDATLIHQSITGLYETRIDLSQLGGDGGEAAAKEAAAKEAAAKGGMDLLKPLTVERKGVKIKGYWNSQADITCVPKDLLQGEEPVRQQNVTTIHGTQEGDVYYVNLKIDGRRINTEVIGTTLDYAIITPGDVPWILKKPLELTIKLDLEEQQGTLLNNSILSKKGKEELKQLFEKYSALWQSWENQVGHRRIRPHKIATGTVKPTPQKQYHINPKAKPDIQIVINDLLKQGVLIQKESTMNTPVYPVPKPNGRWRMVLDYRAVNKVTPLIAVQNQHSYGILGSLFKGRYKTTIDLSNGFWAHPIVPEDYWITAFTWQGKQYCWTVLPQGFLNSPGLFTGDVVDLLQGIPNVEVYVDDVYISHDSEKEHLEYLDILFNRLKEAGYIISLKKSNIANSIVDFLGFQITNEGRGLTDTFKEKLENITAPTTLKQLQSILGLLNFARNFIPDFTELIAPLYALIPKSTKNYVPWQIEHSTTLETLITKLNGAEYLQGRKGDKTLIMKVNASYTTGYIRYYNEGEKKPISYVSIVFSKTELKFTELEKLLTTVHKGLLKALDLSMGQNIHVYSPIVSMQNIQKTPQTAKKALASRWLSWLSYLEDPRIRFFYDPQMPALKDLPAVDTGKDNKKHPSNFQHIFYTDGSAITSPTKEGHLNAGMGIVYFINKDGNLQKQQEWSISLGNHTAQFAEIAAFEFALKKCLPLGGNILVVTDSNYVAKAYNEELDVWASNGFVNNRKKPLKHISKWKSVADLKRLRPDVVVTHEPGHQKLDSSPHAYGNNLADQLATQASFKVHAGKRTADGSEFEKRTADGSEFESPKKKAKVE

SEQ ID NO: 719 - protein, 2177 aa, synthetic construct
MPAAKRVKLDGGDKKYSIGLDIGTNSVGWAVITDEYKVPSKKFKVLGNTDRHSIKKNLIGALLFDSGETAEATRLKRTARRRYTRRKNRICYLQEIFSNEMAKVDDSFFHRLEESFLVEEDKKHERHPIFGNIVDEVAYHEKYPTIYHLRKKLVDSTDKADLRLIYLALAHMIKFRGHFLIEGDLNPDNSDVDKLFIQLVQTYNQLFEENPINASGVDAKAILSARLSKSRRLENLIAQLPGEKKNGLFGNLIALSLGLTPNFKSNFDLAEDAKLQLSKDTYDDDLDNLLAQIGDQYADLFLAAKNLSDAILLSDILRVNTEITKAPLSASMIKRYDEHHQDLTLLKALVRQQLPEKYKEIFFDQSKNGYAGYIDGGASQEEFYKFIKPILEKMDGTEELLVKLNREDLLRKQRTFDNGSIPHQIHLGELHAILRRQEDFYPFLKDNREKIEKILTFRIPYYVGPLARGNSRFAWMTRKSEETITPWNFEEVVDKGASAQSFIERMTNFDKNLPNEKVLPKHSLLYEYFTVYNELTKVKYVTEGMRKPAFLSGEQKKAIVDLLFKTNRKVTVKQLKEDYFKKIECFDSVEISGVEDRFNASLGTYHDLLKIIKDKDFLDNEENEDILEDIVLTLTLFEDREMIEERLKTYAHLFDDKVMKQLKRRRYTGWGRLSRKLINGIRDKQSGKTILDFLKSDGFANRNFMQLIHDDSLTFKEDIQKAQVSGQGDSLHEHIANLAGSPAIKKGILQTVKVVDELVKVMGRHKPENIVIEMARENQTTQKGQKNSRERMKRIEEGIKELGSQILKEHPVENTQLQNEKLYLYYLQNGRDMYVDQELDINRLSDYDVDHIVPQSFLKDDSIDNKVLTRSDKARGKSDNVPSEEVVKKMKNYWRQLLNAKLITQRKFDNLTKAERGGLSELDKAGFIKRQLVETRQITKHVAQILDSRMNTKYDENDKLIREVKVITLKSKLVSDFRKDFQFYKVREINNYHHAHDAYLNAVVGTALIKKYPKLESEFVYGDYKVYDVRKMIAKSEQEIGKATAKYFFYSNIMNFFKTEITLANGEIRKRPLIETNGETGEIVWDKGRDFATVRKVLSMPQVNIVKKTEVQTGGFSKESILPKRNSDKLIARKKDWDPKKYGGFDSPTVAYSVLVVAKVEKGKSKKLKSVKELLGITIMERSSFEKNPIDFLEAKGYKEVKKDLIIKLPKYSLFELENGRKRMLASAGELQKGNELALPSKYVNFLYLASHYEKLKGSPEDNEQKQLFVEQHKHYLDEIIEQISEFSKRVILADANLDKVLSAYNKHRDKPIREQAENIIHLFTLTNLGAPAAFKYFDTTIDRKRYTSTKEVLDATLIHQSITGLYETRIDLSQLGGDGGGSSGSSGSSGSSGSSGGMDLLKPLTVERKGVKIKGYWNSQADITCVPKDLLQGEEPVRQQNVTTIHGTQEGDVYYVNLKIDGRRINTEVIGTTLDYAIITPGDVPWILKKPLELTIKLDLEEQQGTLLNNSILSKKGKEELKQLFEKYSALWQSWENQVGHRRIRPHKIATGTVKPTPQKQYHINPKAKPDIQIVINDLLKQGVLIQKESTMNTPVYPVPKPNGRWRMVLDYRAVNKVTPLIAVQNQHSYGILGSLFKGRYKTTIDLSNGFWAHPIVPEDYWITAFTWQGKQYCWTVLPQGFLNSPGLFTGDVVDLLQGIPNVEVYVDDVYISHDSEKEHLEYLDILFNRLKEAGYIISLKKSNIANSIVDFLGFQITNEGRGLTDTFKEKLENITAPTTLKQLQSILGLLNFARNFIPDFTELIAPLYALIPKSTKNYVPWQIEHSTTLETLITKLNGAEYLQGRKGDKTLIMKVNASYTTGYIRYYNEGEKKPISYVSIVFSKTELKFTELEKLLTTVHKGLLKALDLSMGQNIHVYSPIVSMQNIQKTPQTAKKALASRWLSWLSYLEDPRIRFFYDPQMPALKDLPAVDTGKDNKKHPSNFQHIFYTDGSAITSPTKEGHLNAGMGIVYFINKDGNLQKQQEWSISLGNHTAQFAEIAAFEFALKKCLPLGGNILVVTDSNYVAKAYNEELDVWASNGFVNNRKKPLKHISKWKSVADLKRLRPDVVVTHEPGHQKLDSSPHAYGNNLADQLATQASFKVHAGKRTADGSEFEKRTADGSEFESPKKKAKVE

SEQ ID NO: 720 - protein, 2171 aa, synthetic construct
MPAAKRVKLDGGDKKYSIGLDIGTNSVGWAVITDEYKVPSKKFKVLGNTDRHSIKKNLIGALLFDSGETAEATRLKRTARRRYTRRKNRICYLQEIFSNEMAKVDDSFFHRLEESFLVEEDKKHERHPIFGNIVDEVAYHEKYPTIYHLRKKLVDSTDKADLRLIYLALAHMIKFRGHFLIEGDLNPDNSDVDKLFIQLVQTYNQLFEENPINASGVDAKAILSARLSKSRRLENLIAQLPGEKKNGLFGNLIALSLGLTPNFKSNFDLAEDAKLQLSKDTYDDDLDNLLAQIGDQYADLFLAAKNLSDAILLSDILRVNTEITKAPLSASMIKRYDEHHQDLTLLKALVRQQLPEKYKEIFFDQSKNGYAGYIDGGASQEEFYKFIKPILEKMDGTEELLVKLNREDLLRKQRTFDNGSIPHQIHLGELHAILRRQEDFYPFLKDNREKIEKILTFRIPYYVGPLARGNSRFAWMTRKSEETITPWNFEEVVDKGASAQSFIERMTNFDKNLPNEKVLPKHSLLYEYFTVYNELTKVKYVTEGMRKPAFLSGEQKKAIVDLLFKTNRKVTVKQLKEDYFKKIECFDSVEISGVEDRFNASLGTYHDLLKIIKDKDFLDNEENEDILEDIVLTLTLFEDREMIEERLKTYAHLFDDKVMKQLKRRRYTGWGRLSRKLINGIRDKQSGKTILDFLKSDGFANRNFMQLIHDDSLTFKEDIQKAQVSGQGDSLHEHIANLAGSPAIKKGILQTVKVVDELVKVMGRHKPENIVIEMARENQTTQKGQKNSRERMKRIEEGIKELGSQILKEHPVENTQLQNEKLYLYYLQNGRDMYVDQELDINRLSDYDVDHIVPQSFLKDDSIDNKVLTRSDKARGKSDNVPSEEVVKKMKNYWRQLLNAKLITQRKFDNLTKAERGGLSELDKAGFIKRQLVETRQITKHVAQILDSRMNTKYDENDKLIREVKVITLKSKLVSDFRKDFQFYKVREINNYHHAHDAYLNAVVGTALIKKYPKLESEFVYGDYKVYDVRKMIAKSEQEIGKATAKYFFYSNIMNFFKTEITLANGEIRKRPLIETNGETGEIVWDKGRDFATVRKVLSMPQVNIVKKTEVQTGGFSKESILPKRNSDKLIARKKDWDPKKYGGFDSPTVAYSVLVVAKVEKGKSKKLKSVKELLGITIMERSSFEKNPIDFLEAKGYKEVKKDLIIKLPKYSLFELENGRKRMLASAGELQKGNELALPSKYVNFLYLASHYEKLKGSPEDNEQKQLFVEQHKHYLDEIIEQISEFSKRVILADANLDKVLSAYNKHRDKPIREQAENIIHLFTLTNLGAPAAFKYFDTTIDRKRYTSTKEVLDATLIHQSITGLYETRIDLSQLGGDGGGGGGSSPAPGGMDLLKPLTVERKGVKIKGYWNSQADITCVPKDLLQGEEPVRQQNVTTIHGTQEGDVYYVNLKIDGRRINTEVIGTTLDYAIITPGDVPWILKKPLELTIKLDLEEQQGTLLNNSILSKKGKEELKQLFEKYSALWQSWENQVGHRRIRPHKIATGTVKPTPQKQYHINPKAKPDIQIVINDLLKQGVLIQKESTMNTPVYPVPKPNGRWRMVLDYRAVNKVTPLIAVQNQHSYGILGSLFKGRYKTTIDLSNGFWAHPIVPEDYWITAFTWQGKQYCWTVLPQGFLNSPGLFTGDVVDLLQGIPNVEVYVDDVYISHDSEKEHLEYLDILFNRLKEAGYIISLKKSNIANSIVDFLGFQITNEGRGLTDTFKEKLENITAPTTLKQLQSILGLLNFARNFIPDFTELIAPLYALIPKSTKNYVPWQIEHSTTLETLITKLNGAEYLQGRKGDKTLIMKVNASYTTGYIRYYNEGEKKPISYVSIVFSKTELKFTELEKLLTTVHKGLLKALDLSMGQNIHVYSPIVSMQNIQKTPQTAKKALASRWLSWLSYLEDPRIRFFYDPQMPALKDLPAVDTGKDNKKHPSNFQHIFYTDGSAITSPTKEGHLNAGMGIVYFINKDGNLQKQQEWSISLGNHTAQFAEIAAFEFALKKCLPLGGNILVVTDSNYVAKAYNEELDVWASNGFVNNRKKPLKHISKWKSVADLKRLRPDVVVTHEPGHQKLDSSPHAYGNNLADQLATQASFKVHAGKRTADGSEFEKRTADGSEFESPKKKAKVE

SEQ ID NO: 721 - protein, 2173 aa, synthetic construct
MPAAKRVKLDGGDKKYSIGLDIGTNSVGWAVITDEYKVPSKKFKVLGNTDRHSIKKNLIGALLFDSGETAEATRLKRTARRRYTRRKNRICYLQEIFSNEMAKVDDSFFHRLEESFLVEEDKKHERHPIFGNIVDEVAYHEKYPTIYHLRKKLVDSTDKADLRLIYLALAHMIKFRGHFLIEGDLNPDNSDVDKLFIQLVQTYNQLFEENPINASGVDAKAILSARLSKSRRLENLIAQLPGEKKNGLFGNLIALSLGLTPNFKSNFDLAEDAKLQLSKDTYDDDLDNLLAQIGDQYADLFLAAKNLSDAILLSDILRVNTEITKAPLSASMIKRYDEHHQDLTLLKALVRQQLPEKYKEIFFDQSKNGYAGYIDGGASQEEFYKFIKPILEKMDGTEELLVKLNREDLLRKQRTFDNGSIPHQIHLGELHAILRRQEDFYPFLKDNREKIEKILTFRIPYYVGPLARGNSRFAWMTRKSEETITPWNFEEVVDKGASAQSFIERMTNFDKNLPNEKVLPKHSLLYEYFTVYNELTKVKYVTEGMRKPAFLSGEQKKAIVDLLFKTNRKVTVKQLKEDYFKKIECFDSVEISGVEDRFNASLGTYHDLLKIIKDKDFLDNEENEDILEDIVLTLTLFEDREMIEERLKTYAHLFDDKVMKQLKRRRYTGWGRLSRKLINGIRDKQSGKTILDFLKSDGFANRNFMQLIHDDSLTFKEDIQKAQVSGQGDSLHEHIANLAGSPAIKKGILQTVKVVDELVKVMGRHKPENIVIEMARENQTTQKGQKNSRERMKRIEEGIKELGSQILKEHPVENTQLQNEKLYLYYLQNGRDMYVDQELDINRLSDYDVDHIVPQSFLKDDSIDNKVLTRSDKARGKSDNVPSEEVVKKMKNYWRQLLNAKLITQRKFDNLTKAERGGLSELDKAGFIKRQLVETRQITKHVAQILDSRMNTKYDENDKLIREVKVITLKSKLVSDFRKDFQFYKVREINNYHHAHDAYLNAVVGTALIKKYPKLESEFVYGDYKVYDVRKMIAKSEQEIGKATAKYFFYSNIMNFFKTEITLANGEIRKRPLIETNGETGEIVWDKGRDFATVRKVLSMPQVNIVKKTEVQTGGFSKESILPKRNSDKLIARKKDWDPKKYGGFDSPTVAYSVLVVAKVEKGKSKKLKSVKELLGITIMERSSFEKNPIDFLEAKGYKEVKKDLIIKLPKYSLFELENGRKRMLASAGELQKGNELALPSKYVNFLYLASHYEKLKGSPEDNEQKQLFVEQHKHYLDEIIEQISEFSKRVILADANLDKVLSAYNKHRDKPIREQAENIIHLFTLTNLGAPAAFKYFDTTIDRKRYTSTKEVLDATLIHQSITGLYETRIDLSQLGGDGGEAAAKGSSPAPGGMDLLKPLTVERKGVKIKGYWNSQADITCVPKDLLQGEEPVRQQNVTTIHGTQEGDVYYVNLKIDGRRINTEVIGTTLDYAIITPGDVPWILKKPLELTIKLDLEEQQGTLLNNSILSKKGKEELKQLFEKYSALWQSWENQVGHRRIRPHKIATGTVKPTPQKQYHINPKAKPDIQIVINDLLKQGVLIQKESTMNTPVYPVPKPNGRWRMVLDYRAVNKVTPLIAVQNQHSYGILGSLFKGRYKTTIDLSNGFWAHPIVPEDYWITAFTWQGKQYCWTVLPQGFLNSPGLFTGDVVDLLQGIPNVEVYVDDVYISHDSEKEHLEYLDILFNRLKEAGYIISLKKSNIANSIVDFLGFQITNEGRGLTDTFKEKLENITAPTTLKQLQSILGLLNFARNFIPDFTELIAPLYALIPKSTKNYVPWQIEHSTTLETLITKLNGAEYLQGRKGDKTLIMKVNASYTTGYIRYYNEGEKKPISYVSIVFSKTELKFTELEKLLTTVHKGLLKALDLSMGQNIHVYSPIVSMQNIQKTPQTAKKALASRWLSWLSYLEDPRIRFFYDPQMPALKDLPAVDTGKDNKKHPSNFQHIFYTDGSAITSPTKEGHLNAGMGIVYFINKDGNLQKQQEWSISLGNHTAQFAEIAAFEFALKKCLPLGGNILVVTDSNYVAKAYNEELDVWASNGFVNNRKKPLKHISKWKSVADLKRLRPDVVVTHEPGHQKLDSSPHAYGNNLADQLATQASFKVHAGKRTADGSEFEKRTADGSEFESPKKKAKVE

SEQ ID NO: 722 - protein, 2180 aa, synthetic construct
MPAAKRVKLDGGDKKYSIGLDIGTNSVGWAVITDEYKVPSKKFKVLGNTDRHSIKKNLIGALLFDSGETAEATRLKRTARRRYTRRKNRICYLQEIFSNEMAKVDDSFFHRLEESFLVEEDKKHERHPIFGNIVDEVAYHEKYPTIYHLRKKLVDSTDKADLRLIYLALAHMIKFRGHFLIEGDLNPDNSDVDKLFIQLVQTYNQLFEENPINASGVDAKAILSARLSKSRRLENLIAQLPGEKKNGLFGNLIALSLGLTPNFKSNFDLAEDAKLQLSKDTYDDDLDNLLAQIGDQYADLFLAAKNLSDAILLSDILRVNTEITKAPLSASMIKRYDEHHQDLTLLKALVRQQLPEKYKEIFFDQSKNGYAGYIDGGASQEEFYKFIKPILEKMDGTEELLVKLNREDLLRKQRTFDNGSIPHQIHLGELHAILRRQEDFYPFLKDNREKIEKILTFRIPYYVGPLARGNSRFAWMTRKSEETITPWNFEEVVDKGASAQSFIERMTNFDKNLPNEKVLPKHSLLYEYFTVYNELTKVKYVTEGMRKPAFLSGEQKKAIVDLLFKTNRKVTVKQLKEDYFKKIECFDSVEISGVEDRFNASLGTYHDLLKIIKDKDFLDNEENEDILEDIVLTLTLFEDREMIEERLKTYAHLFDDKVMKQLKRRRYTGWGRLSRKLINGIRDKQSGKTILDFLKSDGFANRNFMQLIHDDSLTFKEDIQKAQVSGQGDSLHEHIANLAGSPAIKKGILQTVKVVDELVKVMGRHKPENIVIEMARENQTTQKGQKNSRERMKRIEEGIKELGSQILKEHPVENTQLQNEKLYLYYLQNGRDMYVDQELDINRLSDYDVDHIVPQSFLKDDSIDNKVLTRSDKARGKSDNVPSEEVVKKMKNYWRQLLNAKLITQRKFDNLTKAERGGLSELDKAGFIKRQLVETRQITKHVAQILDSRMNTKYDENDKLIREVKVITLKSKLVSDFRKDFQFYKVREINNYHHAHDAYLNAVVGTALIKKYPKLESEFVYGDYKVYDVRKMIAKSEQEIGKATAKYFFYSNIMNFFKTEITLANGEIRKRPLIETNGETGEIVWDKGRDFATVRKVLSMPQVNIVKKTEVQTGGFSKESILPKRNSDKLIARKKDWDPKKYGGFDSPTVAYSVLVVAKVEKGKSKKLKSVKELLGITIMERSSFEKNPIDFLEAKGYKEVKKDLIIKLPKYSLFELENGRKRMLASAGELQKGNELALPSKYVNFLYLASHYEKLKGSPEDNEQKQLFVEQHKHYLDEIIEQISEFSKRVILADANLDKVLSAYNKHRDKPIREQAENIIHLFTLTNLGAPAAFKYFDTTIDRKRYTSTKEVLDATLIHQSITGLYETRIDLSQLGGDGGGSSGSSGSSGSSGSSGSSGGMDLLKPLTVERKGVKIKGYWNSQADITCVPKDLLQGEEPVRQQNVTTIHGTQEGDVYYVNLKIDGRRINTEVIGTTLDYAIITPGDVPWILKKPLELTIKLDLEEQQGTLLNNSILSKKGKEELKQLFEKYSALWQSWENQVGHRRIRPHKIATGTVKPTPQKQYHINPKAKPDIQIVINDLLKQGVLIQKESTMNTPVYPVPKPNGRWRMVLDYRAVNKVTPLIAVQNQHSYGILGSLFKGRYKTTIDLSNGFWAHPIVPEDYWITAFTWQGKQYCWTVLPQGFLNSPGLFTGDVVDLLQGIPNVEVYVDDVYISHDSEKEHLEYLDILFNRLKEAGYIISLKKSNIANSIVDFLGFQITNEGRGLTDTFKEKLENITAPTTLKQLQSILGLLNFARNFIPDFTELIAPLYALIPKSTKNYVPWQIEHSTTLETLITKLNGAEYLQGRKGDKTLIMKVNASYTTGYIRYYNEGEKKPISYVSIVFSKTELKFTELEKLLTTVHKGLLKALDLSMGQNIHVYSPIVSMQNIQKTPQTAKKALASRWLSWLSYLEDPRIRFFYDPQMPALKDLPAVDTGKDNKKHPSNFQHIFYTDGSAITSPTKEGHLNAGMGIVYFINKDGNLQKQQEWSISLGNHTAQFAEIAAFEFALKKCLPLGGNILVVTDSNYVAKAYNEELDVWASNGFVNNRKKPLKHISKWKSVADLKRLRPDVVVTHEPGHQKLDSSPHAYGNNLADQLATQASFKVHAGKRTADGSEFEKRTADGSEFESPKKKAKVE

SEQ ID NO: 723 - protein, 2171 aa, synthetic construct
MPAAKRVKLDGGDKKYSIGLDIGTNSVGWAVITDEYKVPSKKFKVLGNTDRHSIKKNLIGALLFDSGETAEATRLKRTARRRYTRRKNRICYLQEIFSNEMAKVDDSFFHRLEESFLVEEDKKHERHPIFGNIVDEVAYHEKYPTIYHLRKKLVDSTDKADLRLIYLALAHMIKFRGHFLIEGDLNPDNSDVDKLFIQLVQTYNQLFEENPINASGVDAKAILSARLSKSRRLENLIAQLPGEKKNGLFGNLIALSLGLTPNFKSNFDLAEDAKLQLSKDTYDDDLDNLLAQIGDQYADLFLAAKNLSDAILLSDILRVNTEITKAPLSASMIKRYDEHHQDLTLLKALVRQQLPEKYKEIFFDQSKNGYAGYIDGGASQEEFYKFIKPILEKMDGTEELLVKLNREDLLRKQRTFDNGSIPHQIHLGELHAILRRQEDFYPFLKDNREKIEKILTFRIPYYVGPLARGNSRFAWMTRKSEETITPWNFEEVVDKGASAQSFIERMTNFDKNLPNEKVLPKHSLLYEYFTVYNELTKVKYVTEGMRKPAFLSGEQKKAIVDLLFKTNRKVTVKQLKEDYFKKIECFDSVEISGVEDRFNASLGTYHDLLKIIKDKDFLDNEENEDILEDIVLTLTLFEDREMIEERLKTYAHLFDDKVMKQLKRRRYTGWGRLSRKLINGIRDKQSGKTILDFLKSDGFANRNFMQLIHDDSLTFKEDIQKAQVSGQGDSLHEHIANLAGSPAIKKGILQTVKVVDELVKVMGRHKPENIVIEMARENQTTQKGQKNSRERMKRIEEGIKELGSQILKEHPVENTQLQNEKLYLYYLQNGRDMYVDQELDINRLSDYDVDHIVPQSFLKDDSIDNKVLTRSDKARGKSDNVPSEEVVKKMKNYWRQLLNAKLITQRKFDNLTKAERGGLSELDKAGFIKRQLVETRQITKHVAQILDSRMNTKYDENDKLIREVKVITLKSKLVSDFRKDFQFYKVREINNYHHAHDAYLNAVVGTALIKKYPKLESEFVYGDYKVYDVRKMIAKSEQEIGKATAKYFFYSNIMNFFKTEITLANGEIRKRPLIETNGETGEIVWDKGRDFATVRKVLSMPQVNIVKKTEVQTGGFSKESILPKRNSDKLIARKKDWDPKKYGGFDSPTVAYSVLVVAKVEKGKSKKLKSVKELLGITIMERSSFEKNPIDFLEAKGYKEVKKDLIIKLPKYSLFELENGRKRMLASAGELQKGNELALPSKYVNFLYLASHYEKLKGSPEDNEQKQLFVEQHKHYLDEIIEQISEFSKRVILADANLDKVLSAYNKHRDKPIREQAENIIHLFTLTNLGAPAAFKYFDTTIDRKRYTSTKEVLDATLIHQSITGLYETRIDLSQLGGDGGPAPAPAPAPGGMDLLKPLTVERKGVKIKGYWNSQADITCVPKDLLQGEEPVRQQNVTTIHGTQEGDVYYVNLKIDGRRINTEVIGTTLDYAIITPGDVPWILKKPLELTIKLDLEEQQGTLLNNSILSKKGKEELKQLFEKYSALWQSWENQVGHRRIRPHKIATGTVKPTPQKQYHINPKAKPDIQIVINDLLKQGVLIQKESTMNTPVYPVPKPNGRWRMVLDYRAVNKVTPLIAVQNQHSYGILGSLFKGRYKTTIDLSNGFWAHPIVPEDYWITAFTWQGKQYCWTVLPQGFLNSPGLFTGDVVDLLQGIPNVEVYVDDVYISHDSEKEHLEYLDILFNRLKEAGYIISLKKSNIANSIVDFLGFQITNEGRGLTDTFKEKLENITAPTTLKQLQSILGLLNFARNFIPDFTELIAPLYALIPKSTKNYVPWQIEHSTTLETLITKLNGAEYLQGRKGDKTLIMKVNASYTTGYIRYYNEGEKKPISYVSIVFSKTELKFTELEKLLTTVHKGLLKALDLSMGQNIHVYSPIVSMQNIQKTPQTAKKALASRWLSWLSYLEDPRIRFFYDPQMPALKDLPAVDTGKDNKKHPSNFQHIFYTDGSAITSPTKEGHLNAGMGIVYFINKDGNLQKQQEWSISLGNHTAQFAEIAAFEFALKKCLPLGGNILVVTDSNYVAKAYNEELDVWASNGFVNNRKKPLKHISKWKSVADLKRLRPDVVVTHEPGHQKLDSSPHAYGNNLADQLATQASFKVHAGKRTADGSEFEKRTADGSEFESPKKKAKVE

SEQ ID NO: 724 - protein, 2170 aa, synthetic construct
MPAAKRVKLDGGDKKYSIGLDIGTNSVGWAVITDEYKVPSKKFKVLGNTDRHSIKKNLIGALLFDSGETAEATRLKRTARRRYTRRKNRICYLQEIFSNEMAKVDDSFFHRLEESFLVEEDKKHERHPIFGNIVDEVAYHEKYPTIYHLRKKLVDSTDKADLRLIYLALAHMIKFRGHFLIEGDLNPDNSDVDKLFIQLVQTYNQLFEENPINASGVDAKAILSARLSKSRRLENLIAQLPGEKKNGLFGNLIALSLGLTPNFKSNFDLAEDAKLQLSKDTYDDDLDNLLAQIGDQYADLFLAAKNLSDAILLSDILRVNTEITKAPLSASMIKRYDEHHQDLTLLKALVRQQLPEKYKEIFFDQSKNGYAGYIDGGASQEEFYKFIKPILEKMDGTEELLVKLNREDLLRKQRTFDNGSIPHQIHLGELHAILRRQEDFYPFLKDNREKIEKILTFRIPYYVGPLARGNSRFAWMTRKSEETITPWNFEEVVDKGASAQSFIERMTNFDKNLPNEKVLPKHSLLYEYFTVYNELTKVKYVTEGMRKPAFLSGEQKKAIVDLLFKTNRKVTVKQLKEDYFKKIECFDSVEISGVEDRFNASLGTYHDLLKIIKDKDFLDNEENEDILEDIVLTLTLFEDREMIEERLKTYAHLFDDKVMKQLKRRRYTGWGRLSRKLINGIRDKQSGKTILDFLKSDGFANRNFMQLIHDDSLTFKEDIQKAQVSGQGDSLHEHIANLAGSPAIKKGILQTVKVVDELVKVMGRHKPENIVIEMARENQTTQKGQKNSRERMKRIEEGIKELGSQILKEHPVENTQLQNEKLYLYYLQNGRDMYVDQELDINRLSDYDVDHIVPQSFLKDDSIDNKVLTRSDKARGKSDNVPSEEVVKKMKNYWRQLLNAKLITQRKFDNLTKAERGGLSELDKAGFIKRQLVETRQITKHVAQILDSRMNTKYDENDKLIREVKVITLKSKLVSDFRKDFQFYKVREINNYHHAHDAYLNAVVGTALIKKYPKLESEFVYGDYKVYDVRKMIAKSEQEIGKATAKYFFYSNIMNFFKTEITLANGEIRKRPLIETNGETGEIVWDKGRDFATVRKVLSMPQVNIVKKTEVQTGGFSKESILPKRNSDKLIARKKDWDPKKYGGFDSPTVAYSVLVVAKVEKGKSKKLKSVKELLGITIMERSSFEKNPIDFLEAKGYKEVKKDLIIKLPKYSLFELENGRKRMLASAGELQKGNELALPSKYVNFLYLASHYEKLKGSPEDNEQKQLFVEQHKHYLDEIIEQISEFSKRVILADANLDKVLSAYNKHRDKPIREQAENIIHLFTLTNLGAPAAFKYFDTTIDRKRYTSTKEVLDATLIHQSITGLYETRIDLSQLGGDGGGSSEAAAKGGMDLLKPLTVERKGVKIKGYWNSQADITCVPKDLLQGEEPVRQQNVTTIHGTQEGDVYYVNLKIDGRRINTEVIGTTLDYAIITPGDVPWILKKPLELTIKLDLEEQQGTLLNNSILSKKGKEELKQLFEKYSALWQSWENQVGHRRIRPHKIATGTVKPTPQKQYHINPKAKPDIQIVINDLLKQGVLIQKESTMNTPVYPVPKPNGRWRMVLDYRAVNKVTPLIAVQNQHSYGILGSLFKGRYKTTIDLSNGFWAHPIVPEDYWITAFTWQGKQYCWTVLPQGFLNSPGLFTGDVVDLLQGIPNVEVYVDDVYISHDSEKEHLEYLDILFNRLKEAGYIISLKKSNIANSIVDFLGFQITNEGRGLTDTFKEKLENITAPTTLKQLQSILGLLNFARNFIPDFTELIAPLYALIPKSTKNYVPWQIEHSTTLETLITKLNGAEYLQGRKGDKTLIMKVNASYTTGYIRYYNEGEKKPISYVSIVFSKTELKFTELEKLLTTVHKGLLKALDLSMGQNIHVYSPIVSMQNIQKTPQTAKKALASRWLSWLSYLEDPRIRFFYDPQMPALKDLPAVDTGKDNKKHPSNFQHIFYTDGSAITSPTKEGHLNAGMGIVYFINKDGNLQKQQEWSISLGNHTAQFAEIAAFEFALKKCLPLGGNILVVTDSNYVAKAYNEELDVWASNGFVNNRKKPLKHISKWKSVADLKRLRPDVVVTHEPGHQKLDSSPHAYGNNLADQLATQASFKVHAGKRTADGSEFEKRTADGSEFESPKKKAKVE

SEQ ID NO: 725 - protein, 2165 aa, synthetic construct
MPAAKRVKLDGGDKKYSIGLDIGTNSVGWAVITDEYKVPSKKFKVLGNTDRHSIKKNLIGALLFDSGETAEATRLKRTARRRYTRRKNRICYLQEIFSNEMAKVDDSFFHRLEESFLVEEDKKHERHPIFGNIVDEVAYHEKYPTIYHLRKKLVDSTDKADLRLIYLALAHMIKFRGHFLIEGDLNPDNSDVDKLFIQLVQTYNQLFEENPINASGVDAKAILSARLSKSRRLENLIAQLPGEKKNGLFGNLIALSLGLTPNFKSNFDLAEDAKLQLSKDTYDDDLDNLLAQIGDQYADLFLAAKNLSDAILLSDILRVNTEITKAPLSASMIKRYDEHHQDLTLLKALVRQQLPEKYKEIFFDQSKNGYAGYIDGGASQEEFYKFIKPILEKMDGTEELLVKLNREDLLRKQRTFDNGSIPHQIHLGELHAILRRQEDFYPFLKDNREKIEKILTFRIPYYVGPLARGNSRFAWMTRKSEETITPWNFEEVVDKGASAQSFIERMTNFDKNLPNEKVLPKHSLLYEYFTVYNELTKVKYVTEGMRKPAFLSGEQKKAIVDLLFKTNRKVTVKQLKEDYFKKIECFDSVEISGVEDRFNASLGTYHDLLKIIKDKDFLDNEENEDILEDIVLTLTLFEDREMIEERLKTYAHLFDDKVMKQLKRRRYTGWGRLSRKLINGIRDKQSGKTILDFLKSDGFANRNFMQLIHDDSLTFKEDIQKAQVSGQGDSLHEHIANLAGSPAIKKGILQTVKVVDELVKVMGRHKPENIVIEMARENQTTQKGQKNSRERMKRIEEGIKELGSQILKEHPVENTQLQNEKLYLYYLQNGRDMYVDQELDINRLSDYDVDHIVPQSFLKDDSIDNKVLTRSDKARGKSDNVPSEEVVKKMKNYWRQLLNAKLITQRKFDNLTKAERGGLSELDKAGFIKRQLVETRQITKHVAQILDSRMNTKYDENDKLIREVKVITLKSKLVSDFRKDFQFYKVREINNYHHAHDAYLNAVVGTALIKKYPKLESEFVYGDYKVYDVRKMIAKSEQEIGKATAKYFFYSNIMNFFKTEITLANGEIRKRPLIETNGETGEIVWDKGRDFATVRKVLSMPQVNIVKKTEVQTGGFSKESILPKRNSDKLIARKKDWDPKKYGGFDSPTVAYSVLVVAKVEKGKSKKLKSVKELLGITIMERSSFEKNPIDFLEAKGYKEVKKDLIIKLPKYSLFELENGRKRMLASAGELQKGNELALPSKYVNFLYLASHYEKLKGSPEDNEQKQLFVEQHKHYLDEIIEQISEFSKRVILADANLDKVLSAYNKHRDKPIREQAENIIHLFTLTNLGAPAAFKYFDTTIDRKRYTSTKEVLDATLIHQSITGLYETRIDLSQLGGDGGGSSGGMDLLKPLTVERKGVKIKGYWNSQADITCVPKDLLQGEEPVRQQNVTTIHGTQEGDVYYVNLKIDGRRINTEVIGTTLDYAIITPGDVPWILKKPLELTIKLDLEEQQGTLLNNSILSKKGKEELKQLFEKYSALWQSWENQVGHRRIRPHKIATGTVKPTPQKQYHINPKAKPDIQIVINDLLKQGVLIQKESTMNTPVYPVPKPNGRWRMVLDYRAVNKVTPLIAVQNQHSYGILGSLFKGRYKTTIDLSNGFWAHPIVPEDYWITAFTWQGKQYCWTVLPQGFLNSPGLFTGDVVDLLQGIPNVEVYVDDVYISHDSEKEHLEYLDILFNRLKEAGYIISLKKSNIANSIVDFLGFQITNEGRGLTDTFKEKLENITAPTTLKQLQSILGLLNFARNFIPDFTELIAPLYALIPKSTKNYVPWQIEHSTTLETLITKLNGAEYLQGRKGDKTLIMKVNASYTTGYIRYYNEGEKKPISYVSIVFSKTELKFTELEKLLTTVHKGLLKALDLSMGQNIHVYSPIVSMQNIQKTPQTAKKALASRWLSWLSYLEDPRIRFFYDPQMPALKDLPAVDTGKDNKKHPSNFQHIFYTDGSAITSPTKEGHLNAGMGIVYFINKDGNLQKQQEWSISLGNHTAQFAEIAAFEFALKKCLPLGGNILVVTDSNYVAKAYNEELDVWASNGFVNNRKKPLKHISKWKSVADLKRLRPDVVVTHEPGHQKLDSSPHAYGNNLADQLATQASFKVHAGKRTADGSEFEKRTADGSEFESPKKKAKVE

SEQ ID NO: 726 - protein, 2173 aa, synthetic construct
MPAAKRVKLDGGDKKYSIGLDIGTNSVGWAVITDEYKVPSKKFKVLGNTDRHSIKKNLIGALLFDSGETAEATRLKRTARRRYTRRKNRICYLQEIFSNEMAKVDDSFFHRLEESFLVEEDKKHERHPIFGNIVDEVAYHEKYPTIYHLRKKLVDSTDKADLRLIYLALAHMIKFRGHFLIEGDLNPDNSDVDKLFIQLVQTYNQLFEENPINASGVDAKAILSARLSKSRRLENLIAQLPGEKKNGLFGNLIALSLGLTPNFKSNFDLAEDAKLQLSKDTYDDDLDNLLAQIGDQYADLFLAAKNLSDAILLSDILRVNTEITKAPLSASMIKRYDEHHQDLTLLKALVRQQLPEKYKEIFFDQSKNGYAGYIDGGASQEEFYKFIKPILEKMDGTEELLVKLNREDLLRKQRTFDNGSIPHQIHLGELHAILRRQEDFYPFLKDNREKIEKILTFRIPYYVGPLARGNSRFAWMTRKSEETITPWNFEEVVDKGASAQSFIERMTNFDKNLPNEKVLPKHSLLYEYFTVYNELTKVKYVTEGMRKPAFLSGEQKKAIVDLLFKTNRKVTVKQLKEDYFKKIECFDSVEISGVEDRFNASLGTYHDLLKIIKDKDFLDNEENEDILEDIVLTLTLFEDREMIEERLKTYAHLFDDKVMKQLKRRRYTGWGRLSRKLINGIRDKQSGKTILDFLKSDGFANRNFMQLIHDDSLTFKEDIQKAQVSGQGDSLHEHIANLAGSPAIKKGILQTVKVVDELVKVMGRHKPENIVIEMARENQTTQKGQKNSRERMKRIEEGIKELGSQILKEHPVENTQLQNEKLYLYYLQNGRDMYVDQELDINRLSDYDVDHIVPQSFLKDDSIDNKVLTRSDKARGKSDNVPSEEVVKKMKNYWRQLLNAKLITQRKFDNLTKAERGGLSELDKAGFIKRQLVETRQITKHVAQILDSRMNTKYDENDKLIREVKVITLKSKLVSDFRKDFQFYKVREINNYHHAHDAYLNAVVGTALIKKYPKLESEFVYGDYKVYDVRKMIAKSEQEIGKATAKYFFYSNIMNFFKTEITLANGEIRKRPLIETNGETGEIVWDKGRDFATVRKVLSMPQVNIVKKTEVQTGGFSKESILPKRNSDKLIARKKDWDPKKYGGFDSPTVAYSVLVVAKVEKGKSKKLKSVKELLGITIMERSSFEKNPIDFLEAKGYKEVKKDLIIKLPKYSLFELENGRKRMLASAGELQKGNELALPSKYVNFLYLASHYEKLKGSPEDNEQKQLFVEQHKHYLDEIIEQISEFSKRVILADANLDKVLSAYNKHRDKPIREQAENIIHLFTLTNLGAPAAFKYFDTTIDRKRYTSTKEVLDATLIHQSITGLYETRIDLSQLGGDGGEAAAKGGSGGGGGMDLLKPLTVERKGVKIKGYWNSQADITCVPKDLLQGEEPVRQQNVTTIHGTQEGDVYYVNLKIDGRRINTEVIGTTLDYAIITPGDVPWILKKPLELTIKLDLEEQQGTLLNNSILSKKGKEELKQLFEKYSALWQSWENQVGHRRIRPHKIATGTVKPTPQKQYHINPKAKPDIQIVINDLLKQGVLIQKESTMNTPVYPVPKPNGRWRMVLDYRAVNKVTPLIAVQNQHSYGILGSLFKGRYKTTIDLSNGFWAHPIVPEDYWITAFTWQGKQYCWTVLPQGFLNSPGLFTGDVVDLLQGIPNVEVYVDDVYISHDSEKEHLEYLDILFNRLKEAGYIISLKKSNIANSIVDFLGFQITNEGRGLTDTFKEKLENITAPTTLKQLQSILGLLNFARNFIPDFTELIAPLYALIPKSTKNYVPWQIEHSTTLETLITKLNGAEYLQGRKGDKTLIMKVNASYTTGYIRYYNEGEKKPISYVSIVFSKTELKFTELEKLLTTVHKGLLKALDLSMGQNIHVYSPIVSMQNIQKTPQTAKKALASRWLSWLSYLEDPRIRFFYDPQMPALKDLPAVDTGKDNKKHPSNFQHIFYTDGSAITSPTKEGHLNAGMGIVYFINKDGNLQKQQEWSISLGNHTAQFAEIAAFEFALKKCLPLGGNILVVTDSNYVAKAYNEELDVWASNGFVNNRKKPLKHISKWKSVADLKRLRPDVVVTHEPGHQKLDSSPHAYGNNLADQLATQASFKVHAGKRTADGSEFEKRTADGSEFESPKKKAKVE

SEQ ID NO: 727 - protein, 2173 aa, synthetic construct
MPAAKRVKLDGGDKKYSIGLDIGTNSVGWAVITDEYKVPSKKFKVLGNTDRHSIKKNLIGALLFDSGETAEATRLKRTARRRYTRRKNRICYLQEIFSNEMAKVDDSFFHRLEESFLVEEDKKHERHPIFGNIVDEVAYHEKYPTIYHLRKKLVDSTDKADLRLIYLALAHMIKFRGHFLIEGDLNPDNSDVDKLFIQLVQTYNQLFEENPINASGVDAKAILSARLSKSRRLENLIAQLPGEKKNGLFGNLIALSLGLTPNFKSNFDLAEDAKLQLSKDTYDDDLDNLLAQIGDQYADLFLAAKNLSDAILLSDILRVNTEITKAPLSASMIKRYDEHHQDLTLLKALVRQQLPEKYKEIFFDQSKNGYAGYIDGGASQEEFYKFIKPILEKMDGTEELLVKLNREDLLRKQRTFDNGSIPHQIHLGELHAILRRQEDFYPFLKDNREKIEKILTFRIPYYVGPLARGNSRFAWMTRKSEETITPWNFEEVVDKGASAQSFIERMTNFDKNLPNEKVLPKHSLLYEYFTVYNELTKVKYVTEGMRKPAFLSGEQKKAIVDLLFKTNRKVTVKQLKEDYFKKIECFDSVEISGVEDRFNASLGTYHDLLKIIKDKDFLDNEENEDILEDIVLTLTLFEDREMIEERLKTYAHLFDDKVMKQLKRRRYTGWGRLSRKLINGIRDKQSGKTILDFLKSDGFANRNFMQLIHDDSLTFKEDIQKAQVSGQGDSLHEHIANLAGSPAIKKGILQTVKVVDELVKVMGRHKPENIVIEMARENQTTQKGQKNSRERMKRIEEGIKELGSQILKEHPVENTQLQNEKLYLYYLQNGRDMYVDQELDINRLSDYDVDHIVPQSFLKDDSIDNKVLTRSDKARGKSDNVPSEEVVKKMKNYWRQLLNAKLITQRKFDNLTKAERGGLSELDKAGFIKRQLVETRQITKHVAQILDSRMNTKYDENDKLIREVKVITLKSKLVSDFRKDFQFYKVREINNYHHAHDAYLNAVVGTALIKKYPKLESEFVYGDYKVYDVRKMIAKSEQEIGKATAKYFFYSNIMNFFKTEITLANGEIRKRPLIETNGETGEIVWDKGRDFATVRKVLSMPQVNIVKKTEVQTGGFSKESILPKRNSDKLIARKKDWDPKKYGGFDSPTVAYSVLVVAKVEKGKSKKLKSVKELLGITIMERSSFEKNPIDFLEAKGYKEVKKDLIIKLPKYSLFELENGRKRMLASAGELQKGNELALPSKYVNFLYLASHYEKLKGSPEDNEQKQLFVEQHKHYLDEIIEQISEFSKRVILADANLDKVLSAYNKHRDKPIREQAENIIHLFTLTNLGAPAAFKYFDTTIDRKRYTSTKEVLDATLIHQSITGLYETRIDLSQLGGDGGGSSEAAAKPAPGGMDLLKPLTVERKGVKIKGYWNSQADITCVPKDLLQGEEPVRQQNVTTIHGTQEGDVYYVNLKIDGRRINTEVIGTTLDYAIITPGDVPWILKKPLELTIKLDLEEQQGTLLNNSILSKKGKEELKQLFEKYSALWQSWENQVGHRRIRPHKIATGTVKPTPQKQYHINPKAKPDIQIVINDLLKQGVLIQKESTMNTPVYPVPKPNGRWRMVLDYRAVNKVTPLIAVQNQHSYGILGSLFKGRYKTTIDLSNGFWAHPIVPEDYWITAFTWQGKQYCWTVLPQGFLNSPGLFTGDVVDLLQGIPNVEVYVDDVYISHDSEKEHLEYLDILFNRLKEAGYIISLKKSNIANSIVDFLGFQITNEGRGLTDTFKEKLENITAPTTLKQLQSILGLLNFARNFIPDFTELIAPLYALIPKSTKNYVPWQIEHSTTLETLITKLNGAEYLQGRKGDKTLIMKVNASYTTGYIRYYNEGEKKPISYVSIVFSKTELKFTELEKLLTTVHKGLLKALDLSMGQNIHVYSPIVSMQNIQKTPQTAKKALASRWLSWLSYLEDPRIRFFYDPQMPALKDLPAVDTGKDNKKHPSNFQHIFYTDGSAITSPTKEGHLNAGMGIVYFINKDGNLQKQQEWSISLGNHTAQFAEIAAFEFALKKCLPLGGNILVVTDSNYVAKAYNEELDVWASNGFVNNRKKPLKHISKWKSVADLKRLRPDVVVTHEPGHQKLDSSPHAYGNNLADQLATQASFKVHAGKRTADGSEFEKRTADGSEFESPKKKAKVE

SEQ ID NO: 728 - protein, 2173 aa, synthetic construct
MPAAKRVKLDGGDKKYSIGLDIGTNSVGWAVITDEYKVPSKKFKVLGNTDRHSIKKNLIGALLFDSGETAEATRLKRTARRRYTRRKNRICYLQEIFSNEMAKVDDSFFHRLEESFLVEEDKKHERHPIFGNIVDEVAYHEKYPTIYHLRKKLVDSTDKADLRLIYLALAHMIKFRGHFLIEGDLNPDNSDVDKLFIQLVQTYNQLFEENPINASGVDAKAILSARLSKSRRLENLIAQLPGEKKNGLFGNLIALSLGLTPNFKSNFDLAEDAKLQLSKDTYDDDLDNLLAQIGDQYADLFLAAKNLSDAILLSDILRVNTEITKAPLSASMIKRYDEHHQDLTLLKALVRQQLPEKYKEIFFDQSKNGYAGYIDGGASQEEFYKFIKPILEKMDGTEELLVKLNREDLLRKQRTFDNGSIPHQIHLGELHAILRRQEDFYPFLKDNREKIEKILTFRIPYYVGPLARGNSRFAWMTRKSEETITPWNFEEVVDKGASAQSFIERMTNFDKNLPNEKVLPKHSLLYEYFTVYNELTKVKYVTEGMRKPAFLSGEQKKAIVDLLFKTNRKVTVKQLKEDYFKKIECFDSVEISGVEDRFNASLGTYHDLLKIIKDKDFLDNEENEDILEDIVLTLTLFEDREMIEERLKTYAHLFDDKVMKQLKRRRYTGWGRLSRKLINGIRDKQSGKTILDFLKSDGFANRNFMQLIHDDSLTFKEDIQKAQVSGQGDSLHEHIANLAGSPAIKKGILQTVKVVDELVKVMGRHKPENIVIEMARENQTTQKGQKNSRERMKRIEEGIKELGSQILKEHPVENTQLQNEKLYLYYLQNGRDMYVDQELDINRLSDYDVDHIVPQSFLKDDSIDNKVLTRSDKARGKSDNVPSEEVVKKMKNYWRQLLNAKLITQRKFDNLTKAERGGLSELDKAGFIKRQLVETRQITKHVAQILDSRMNTKYDENDKLIREVKVITLKSKLVSDFRKDFQFYKVREINNYHHAHDAYLNAVVGTALIKKYPKLESEFVYGDYKVYDVRKMIAKSEQEIGKATAKYFFYSNIMNFFKTEITLANGEIRKRPLIETNGETGEIVWDKGRDFATVRKVLSMPQVNIVKKTEVQTGGFSKESILPKRNSDKLIARKKDWDPKKYGGFDSPTVAYSVLVVAKVEKGKSKKLKSVKELLGITIMERSSFEKNPIDFLEAKGYKEVKKDLIIKLPKYSLFELENGRKRMLASAGELQKGNELALPSKYVNFLYLASHYEKLKGSPEDNEQKQLFVEQHKHYLDEIIEQISEFSKRVILADANLDKVLSAYNKHRDKPIREQAENIIHLFTLTNLGAPAAFKYFDTTIDRKRYTSTKEVLDATLIHQSITGLYETRIDLSQLGGDGGGSSGGGEAAAKGGMDLLKPLTVERKGVKIKGYWNSQADITCVPKDLLQGEEPVRQQNVTTIHGTQEGDVYYVNLKIDGRRINTEVIGTTLDYAIITPGDVPWILKKPLELTIKLDLEEQQGTLLNNSILSKKGKEELKQLFEKYSALWQSWENQVGHRRIRPHKIATGTVKPTPQKQYHINPKAKPDIQIVINDLLKQGVLIQKESTMNTPVYPVPKPNGRWRMVLDYRAVNKVTPLIAVQNQHSYGILGSLFKGRYKTTIDLSNGFWAHPIVPEDYWITAFTWQGKQYCWTVLPQGFLNSPGLFTGDVVDLLQGIPNVEVYVDDVYISHDSEKEHLEYLDILFNRLKEAGYIISLKKSNIANSIVDFLGFQITNEGRGLTDTFKEKLENITAPTTLKQLQSILGLLNFARNFIPDFTELIAPLYALIPKSTKNYVPWQIEHSTTLETLITKLNGAEYLQGRKGDKTLIMKVNASYTTGYIRYYNEGEKKPISYVSIVFSKTELKFTELEKLLTTVHKGLLKALDLSMGQNIHVYSPIVSMQNIQKTPQTAKKALASRWLSWLSYLEDPRIRFFYDPQMPALKDLPAVDTGKDNKKHPSNFQHIFYTDGSAITSPTKEGHLNAGMGIVYFINKDGNLQKQQEWSISLGNHTAQFAEIAAFEFALKKCLPLGGNILVVTDSNYVAKAYNEELDVWASNGFVNNRKKPLKHISKWKSVADLKRLRPDVVVTHEPGHQKLDSSPHAYGNNLADQLATQASFKVHAGKRTADGSEFEKRTADGSEFESPKKKAKVE

SEQ ID NO: 729 - protein, 2171 aa, synthetic construct
MPAAKRVKLDGGDKKYSIGLDIGTNSVGWAVITDEYKVPSKKFKVLGNTDRHSIKKNLIGALLFDSGETAEATRLKRTARRRYTRRKNRICYLQEIFSNEMAKVDDSFFHRLEESFLVEEDKKHERHPIFGNIVDEVAYHEKYPTIYHLRKKLVDSTDKADLRLIYLALAHMIKFRGHFLIEGDLNPDNSDVDKLFIQLVQTYNQLFEENPINASGVDAKAILSARLSKSRRLENLIAQLPGEKKNGLFGNLIALSLGLTPNFKSNFDLAEDAKLQLSKDTYDDDLDNLLAQIGDQYADLFLAAKNLSDAILLSDILRVNTEITKAPLSASMIKRYDEHHQDLTLLKALVRQQLPEKYKEIFFDQSKNGYAGYIDGGASQEEFYKFIKPILEKMDGTEELLVKLNREDLLRKQRTFDNGSIPHQIHLGELHAILRRQEDFYPFLKDNREKIEKILTFRIPYYVGPLARGNSRFAWMTRKSEETITPWNFEEVVDKGASAQSFIERMTNFDKNLPNEKVLPKHSLLYEYFTVYNELTKVKYVTEGMRKPAFLSGEQKKAIVDLLFKTNRKVTVKQLKEDYFKKIECFDSVEISGVEDRFNASLGTYHDLLKIIKDKDFLDNEENEDILEDIVLTLTLFEDREMIEERLKTYAHLFDDKVMKQLKRRRYTGWGRLSRKLINGIRDKQSGKTILDFLKSDGFANRNFMQLIHDDSLTFKEDIQKAQVSGQGDSLHEHIANLAGSPAIKKGILQTVKVVDELVKVMGRHKPENIVIEMARENQTTQKGQKNSRERMKRIEEGIKELGSQILKEHPVENTQLQNEKLYLYYLQNGRDMYVDQELDINRLSDYDVDHIVPQSFLKDDSIDNKVLTRSDKARGKSDNVPSEEVVKKMKNYWRQLLNAKLITQRKFDNLTKAERGGLSELDKAGFIKRQLVETRQITKHVAQILDSRMNTKYDENDKLIREVKVITLKSKLVSDFRKDFQFYKVREINNYHHAHDAYLNAVVGTALIKKYPKLESEFVYGDYKVYDVRKMIAKSEQEIGKATAKYFFYSNIMNFFKTEITLANGEIRKRPLIETNGETGEIVWDKGRDFATVRKVLSMPQVNIVKKTEVQTGGFSKESILPKRNSDKLIARKKDWDPKKYGGFDSPTVAYSVLVVAKVEKGKSKKLKSVKELLGITIMERSSFEKNPIDFLEAKGYKEVKKDLIIKLPKYSLFELENGRKRMLASAGELQKGNELALPSKYVNFLYLASHYEKLKGSPEDNEQKQLFVEQHKHYLDEIIEQISEFSKRVILADANLDKVLSAYNKHRDKPIREQAENIIHLFTLTNLGAPAAFKYFDTTIDRKRYTSTKEVLDATLIHQSITGLYETRIDLSQLGGDGGGGSGSSGGGGGMDLLKPLTVERKGVKIKGYWNSQADITCVPKDLLQGEEPVRQQNVTTIHGTQEGDVYYVNLKIDGRRINTEVIGTTLDYAIITPGDVPWILKKPLELTIKLDLEEQQGTLLNNSILSKKGKEELKQLFEKYSALWQSWENQVGHRRIRPHKIATGTVKPTPQKQYHINPKAKPDIQIVINDLLKQGVLIQKESTMNTPVYPVPKPNGRWRMVLDYRAVNKVTPLIAVQNQHSYGILGSLFKGRYKTTIDLSNGFWAHPIVPEDYWITAFTWQGKQYCWTVLPQGFLNSPGLFTGDVVDLLQGIPNVEVYVDDVYISHDSEKEHLEYLDILFNRLKEAGYIISLKKSNIANSIVDFLGFQITNEGRGLTDTFKEKLENITAPTTLKQLQSILGLLNFARNFIPDFTELIAPLYALIPKSTKNYVPWQIEHSTTLETLITKLNGAEYLQGRKGDKTLIMKVNASYTTGYIRYYNEGEKKPISYVSIVFSKTELKFTELEKLLTTVHKGLLKALDLSMGQNIHVYSPIVSMQNIQKTPQTAKKALASRWLSWLSYLEDPRIRFFYDPQMPALKDLPAVDTGKDNKKHPSNFQHIFYTDGSAITSPTKEGHLNAGMGIVYFINKDGNLQKQQEWSISLGNHTAQFAEIAAFEFALKKCLPLGGNILVVTDSNYVAKAYNEELDVWASNGFVNNRKKPLKHISKWKSVADLKRLRPDVVVTHEPGHQKLDSSPHAYGNNLADQLATQASFKVHAGKRTADGSEFEKRTADGSEFESPKKKAKVE

SEQ ID NO: 730 - protein, 2173 aa, synthetic construct
MPAAKRVKLDGGDKKYSIGLDIGTNSVGWAVITDEYKVPSKKFKVLGNTDRHSIKKNLIGALLFDSGETAEATRLKRTARRRYTRRKNRICYLQEIFSNEMAKVDDSFFHRLEESFLVEEDKKHERHPIFGNIVDEVAYHEKYPTIYHLRKKLVDSTDKADLRLIYLALAHMIKFRGHFLIEGDLNPDNSDVDKLFIQLVQTYNQLFEENPINASGVDAKAILSARLSKSRRLENLIAQLPGEKKNGLFGNLIALSLGLTPNFKSNFDLAEDAKLQLSKDTYDDDLDNLLAQIGDQYADLFLAAKNLSDAILLSDILRVNTEITKAPLSASMIKRYDEHHQDLTLLKALVRQQLPEKYKEIFFDQSKNGYAGYIDGGASQEEFYKFIKPILEKMDGTEELLVKLNREDLLRKQRTFDNGSIPHQIHLGELHAILRRQEDFYPFLKDNREKIEKILTFRIPYYVGPLARGNSRFAWMTRKSEETITPWNFEEVVDKGASAQSFIERMTNFDKNLPNEKVLPKHSLLYEYFTVYNELTKVKYVTEGMRKPAFLSGEQKKAIVDLLFKTNRKVTVKQLKEDYFKKIECFDSVEISGVEDRFNASLGTYHDLLKIIKDKDFLDNEENEDILEDIVLTLTLFEDREMIEERLKTYAHLFDDKVMKQLKRRRYTGWGRLSRKLINGIRDKQSGKTILDFLKSDGFANRNFMQLIHDDSLTFKEDIQKAQVSGQGDSLHEHIANLAGSPAIKKGILQTVKVVDELVKVMGRHKPENIVIEMARENQTTQKGQKNSRERMKRIEEGIKELGSQILKEHPVENTQLQNEKLYLYYLQNGRDMYVDQELDINRLSDYDVDHIVPQSFLKDDSIDNKVLTRSDKARGKSDNVPSEEVVKKMKNYWRQLLNAKLITQRKFDNLTKAERGGLSELDKAGFIKRQLVETRQITKHVAQILDSRMNTKYDENDKLIREVKVITLKSKLVSDFRKDFQFYKVREINNYHHAHDAYLNAVVGTALIKKYPKLESEFVYGDYKVYDVRKMIAKSEQEIGKATAKYFFYSNIMNFFKTEITLANGEIRKRPLIETNGETGEIVWDKGRDFATVRKVLSMPQVNIVKKTEVQTGGFSKESILPKRNSDKLIARKKDWDPKKYGGFDSPTVAYSVLVVAKVEKGKSKKLKSVKELLGITIMERSSFEKNPIDFLEAKGYKEVKKDLIIKLPKYSLFELENGRKRMLASAGELQKGNELALPSKYVNFLYLASHYEKLKGSPEDNEQKQLFVEQHKHYLDEIIEQISEFSKRVILADANLDKVLSAYNKHRDKPIREQAENIIHLFTLTNLGAPAAFKYFDTTIDRKRYTSTKEVLDATLIHQSITGLYETRIDLSQLGGDGGGSSGGSEAAAKGGMDLLKPLTVERKGVKIKGYWNSQADITCVPKDLLQGEEPVRQQNVTTIHGTQEGDVYYVNLKIDGRRINTEVIGTTLDYAIITPGDVPWILKKPLELTIKLDLEEQQGTLLNNSILSKKGKEELKQLFEKYSALWQSWENQVGHRRIRPHKIATGTVKPTPQKQYHINPKAKPDIQIVINDLLKQGVLIQKESTMNTPVYPVPKPNGRWRMVLDYRAVNKVTPLIAVQNQHSYGILGSLFKGRYKTTIDLSNGFWAHPIVPEDYWITAFTWQGKQYCWTVLPQGFLNSPGLFTGDVVDLLQGIPNVEVYVDDVYISHDSEKEHLEYLDILFNRLKEAGYIISLKKSNIANSIVDFLGFQITNEGRGLTDTFKEKLENITAPTTLKQLQSILGLLNFARNFIPDFTELIAPLYALIPKSTKNYVPWQIEHSTTLETLITKLNGAEYLQGRKGDKTLIMKVNASYTTGYIRYYNEGEKKPISYVSIVFSKTELKFTELEKLLTTVHKGLLKALDLSMGQNIHVYSPIVSMQNIQKTPQTAKKALASRWLSWLSYLEDPRIRFFYDPQMPALKDLPAVDTGKDNKKHPSNFQHIFYTDGSAITSPTKEGHLNAGMGIVYFINKDGNLQKQQEWSISLGNHTAQFAEIAAFEFALKKCLPLGGNILVVTDSNYVAKAYNEELDVWASNGFVNNRKKPLKHISKWKSVADLKRLRPDVVVTHEPGHQKLDSSPHAYGNNLADQLATQASFKVHAGKRTADGSEFEKRTADGSEFESPKKKAKVE

SEQ ID NO: 731 - protein, 2171 aa, synthetic construct
MPAAKRVKLDGGDKKYSIGLDIGTNSVGWAVITDEYKVPSKKFKVLGNTDRHSIKKNLIGALLFDSGETAEATRLKRTARRRYTRRKNRICYLQEIFSNEMAKVDDSFFHRLEESFLVEEDKKHERHPIFGNIVDEVAYHEKYPTIYHLRKKLVDSTDKADLRLIYLALAHMIKFRGHFLIEGDLNPDNSDVDKLFIQLVQTYNQLFEENPINASGVDAKAILSARLSKSRRLENLIAQLPGEKKNGLFGNLIALSLGLTPNFKSNFDLAEDAKLQLSKDTYDDDLDNLLAQIGDQYADLFLAAKNLSDAILLSDILRVNTEITKAPLSASMIKRYDEHHQDLTLLKALVRQQLPEKYKEIFFDQSKNGYAGYIDGGASQEEFYKFIKPILEKMDGTEELLVKLNREDLLRKQRTFDNGSIPHQIHLGELHAILRRQEDFYPFLKDNREKIEKILTFRIPYYVGPLARGNSRFAWMTRKSEETITPWNFEEVVDKGASAQSFIERMTNFDKNLPNEKVLPKHSLLYEYFTVYNELTKVKYVTEGMRKPAFLSGEQKKAIVDLLFKTNRKVTVKQLKEDYFKKIECFDSVEISGVEDRFNASLGTYHDLLKIIKDKDFLDNEENEDILEDIVLTLTLFEDREMIEERLKTYAHLFDDKVMKQLKRRRYTGWGRLSRKLINGIRDKQSGKTILDFLKSDGFANRNFMQLIHDDSLTFKEDIQKAQVSGQGDSLHEHIANLAGSPAIKKGILQTVKVVDELVKVMGRHKPENIVIEMARENQTTQKGQKNSRERMKRIEEGIKELGSQILKEHPVENTQLQNEKLYLYYLQNGRDMYVDQELDINRLSDYDVDHIVPQSFLKDDSIDNKVLTRSDKARGKSDNVPSEEVVKKMKNYWRQLLNAKLITQRKFDNLTKAERGGLSELDKAGFIKRQLVETRQITKHVAQILDSRMNTKYDENDKLIREVKVITLKSKLVSDFRKDFQFYKVREINNYHHAHDAYLNAVVGTALIKKYPKLESEFVYGDYKVYDVRKMIAKSEQEIGKATAKYFFYSNIMNFFKTEITLANGEIRKRPLIETNGETGEIVWDKGRDFATVRKVLSMPQVNIVKKTEVQTGGFSKESILPKRNSDKLIARKKDWDPKKYGGFDSPTVAYSVLVVAKVEKGKSKKLKSVKELLGITIMERSSFEKNPIDFLEAKGYKEVKKDLIIKLPKYSLFELENGRKRMLASAGELQKGNELALPSKYVNFLYLASHYEKLKGSPEDNEQKQLFVEQHKHYLDEIIEQISEFSKRVILADANLDKVLSAYNKHRDKPIREQAENIIHLFTLTNLGAPAAFKYFDTTIDRKRYTSTKEVLDATLIHQSITGLYETRIDLSQLGGDGGGGSGGGPAPGGMDLLKPLTVERKGVKIKGYWNSQADITCVPKDLLQGEEPVRQQNVTTIHGTQEGDVYYVNLKIDGRRINTEVIGTTLDYAIITPGDVPWILKKPLELTIKLDLEEQQGTLLNNSILSKKGKEELKQLFEKYSALWQSWENQVGHRRIRPHKIATGTVKPTPQKQYHINPKAKPDIQIVINDLLKQGVLIQKESTMNTPVYPVPKPNGRWRMVLDYRAVNKVTPLIAVQNQHSYGILGSLFKGRYKTTIDLSNGFWAHPIVPEDYWITAFTWQGKQYCWTVLPQGFLNSPGLFTGDVVDLLQGIPNVEVYVDDVYISHDSEKEHLEYLDILFNRLKEAGYIISLKKSNIANSIVDFLGFQITNEGRGLTDTFKEKLENITAPTTLKQLQSILGLLNFARNFIPDFTELIAPLYALIPKSTKNYVPWQIEHSTTLETLITKLNGAEYLQGRKGDKTLIMKVNASYTTGYIRYYNEGEKKPISYVSIVFSKTELKFTELEKLLTTVHKGLLKALDLSMGQNIHVYSPIVSMQNIQKTPQTAKKALASRWLSWLSYLEDPRIRFFYDPQMPALKDLPAVDTGKDNKKHPSNFQHIFYTDGSAITSPTKEGHLNAGMGIVYFINKDGNLQKQQEWSISLGNHTAQFAEIAAFEFALKKCLPLGGNILVVTDSNYVAKAYNEELDVWASNGFVNNRKKPLKHISKWKSVADLKRLRPDVVVTHEPGHQKLDSSPHAYGNNLADQLATQASFKVHAGKRTADGSEFEKRTADGSEFESPKKKAKVE

SEQ ID NO: 732 - protein, 2173 aa, synthetic construct
MPAAKRVKLDGGDKKYSIGLDIGTNSVGWAVITDEYKVPSKKFKVLGNTDRHSIKKNLIGALLFDSGETAEATRLKRTARRRYTRRKNRICYLQEIFSNEMAKVDDSFFHRLEESFLVEEDKKHERHPIFGNIVDEVAYHEKYPTIYHLRKKLVDSTDKADLRLIYLALAHMIKFRGHFLIEGDLNPDNSDVDKLFIQLVQTYNQLFEENPINASGVDAKAILSARLSKSRRLENLIAQLPGEKKNGLFGNLIALSLGLTPNFKSNFDLAEDAKLQLSKDTYDDDLDNLLAQIGDQYADLFLAAKNLSDAILLSDILRVNTEITKAPLSASMIKRYDEHHQDLTLLKALVRQQLPEKYKEIFFDQSKNGYAGYIDGGASQEEFYKFIKPILEKMDGTEELLVKLNREDLLRKQRTFDNGSIPHQIHLGELHAILRRQEDFYPFLKDNREKIEKILTFRIPYYVGPLARGNSRFAWMTRKSEETITPWNFEEVVDKGASAQSFIERMTNFDKNLPNEKVLPKHSLLYEYFTVYNELTKVKYVTEGMRKPAFLSGEQKKAIVDLLFKTNRKVTVKQLKEDYFKKIECFDSVEISGVEDRFNASLGTYHDLLKIIKDKDFLDNEENEDILEDIVLTLTLFEDREMIEERLKTYAHLFDDKVMKQLKRRRYTGWGRLSRKLINGIRDKQSGKTILDFLKSDGFANRNFMQLIHDDSLTFKEDIQKAQVSGQGDSLHEHIANLAGSPAIKKGILQTVKVVDELVKVMGRHKPENIVIEMARENQTTQKGQKNSRERMKRIEEGIKELGSQILKEHPVENTQLQNEKLYLYYLQNGRDMYVDQELDINRLSDYDVDHIVPQSFLKDDSIDNKVLTRSDKARGKSDNVPSEEVVKKMKNYWRQLLNAKLITQRKFDNLTKAERGGLSELDKAGFIKRQLVETRQITKHVAQILDSRMNTKYDENDKLIREVKVITLKSKLVSDFRKDFQFYKVREINNYHHAHDAYLNAVVGTALIKKYPKLESEFVYGDYKVYDVRKMIAKSEQEIGKATAKYFFYSNIMNFFKTEITLANGEIRKRPLIETNGETGEIVWDKGRDFATVRKVLSMPQVNIVKKTEVQTGGFSKESILPKRNSDKLIARKKDWDPKKYGGFDSPTVAYSVLVVAKVEKGKSKKLKSVKELLGITIMERSSFEKNPIDFLEAKGYKEVKKDLIIKLPKYSLFELENGRKRMLASAGELQKGNELALPSKYVNFLYLASHYEKLKGSPEDNEQKQLFVEQHKHYLDEIIEQISEFSKRVILADANLDKVLSAYNKHRDKPIREQAENIIHLFTLTNLGAPAAFKYFDTTIDRKRYTSTKEVLDATLIHQSITGLYETRIDLSQLGGDGGGGGEAAAKPAPGGMDLLKPLTVERKGVKIKGYWNSQADITCVPKDLLQGEEPVRQQNVTTIHGTQEGDVYYVNLKIDGRRINTEVIGTTLDYAIITPGDVPWILKKPLELTIKLDLEEQQGTLLNNSILSKKGKEELKQLFEKYSALWQSWENQVGHRRIRPHKIATGTVKPTPQKQYHINPKAKPDIQIVINDLLKQGVLIQKESTMNTPVYPVPKPNGRWRMVLDYRAVNKVTPLIAVQNQHSYGILGSLFKGRYKTTIDLSNGFWAHPIVPEDYWITAFTWQGKQYCWTVLPQGFLNSPGLFTGDVVDLLQGIPNVEVYVDDVYISHDSEKEHLEYLDILFNRLKEAGYIISLKKSNIANSIVDFLGFQITNEGRGLTDTFKEKLENITAPTTLKQLQSILGLLNFARNFIPDFTELIAPLYALIPKSTKNYVPWQIEHSTTLETLITKLNGAEYLQGRKGDKTLIMKVNASYTTGYIRYYNEGEKKPISYVSIVFSKTELKFTELEKLLTTVHKGLLKALDLSMGQNIHVYSPIVSMQNIQKTPQTAKKALASRWLSWLSYLEDPRIRFFYDPQMPALKDLPAVDTGKDNKKHPSNFQHIFYTDGSAITSPTKEGHLNAGMGIVYFINKDGNLQKQQEWSISLGNHTAQFAEIAAFEFALKKCLPLGGNILVVTDSNYVAKAYNEELDVWASNGFVNNRKKPLKHISKWKSVADLKRLRPDVVVTHEPGHQKLDSSPHAYGNNLADQLATQASFKVHAGKRTADGSEFEKRTADGSEFESPKKKAKVE

SEQ ID NO: 733 - protein, 2167 aa, synthetic construct
MPAAKRVKLDGGDKKYSIGLDIGTNSVGWAVITDEYKVPSKKFKVLGNTDRHSIKKNLIGALLFDSGETAEATRLKRTARRRYTRRKNRICYLQEIFSNEMAKVDDSFFHRLEESFLVEEDKKHERHPIFGNIVDEVAYHEKYPTIYHLRKKLVDSTDKADLRLIYLALAHMIKFRGHFLIEGDLNPDNSDVDKLFIQLVQTYNQLFEENPINASGVDAKAILSARLSKSRRLENLIAQLPGEKKNGLFGNLIALSLGLTPNFKSNFDLAEDAKLQLSKDTYDDDLDNLLAQIGDQYADLFLAAKNLSDAILLSDILRVNTEITKAPLSASMIKRYDEHHQDLTLLKALVRQQLPEKYKEIFFDQSKNGYAGYIDGGASQEEFYKFIKPILEKMDGTEELLVKLNREDLLRKQRTFDNGSIPHQIHLGELHAILRRQEDFYPFLKDNREKIEKILTFRIPYYVGPLARGNSRFAWMTRKSEETITPWNFEEVVDKGASAQSFIERMTNFDKNLPNEKVLPKHSLLYEYFTVYNELTKVKYVTEGMRKPAFLSGEQKKAIVDLLFKTNRKVTVKQLKEDYFKKIECFDSVEISGVEDRFNASLGTYHDLLKIIKDKDFLDNEENEDILEDIVLTLTLFEDREMIEERLKTYAHLFDDKVMKQLKRRRYTGWGRLSRKLINGIRDKQSGKTILDFLKSDGFANRNFMQLIHDDSLTFKEDIQKAQVSGQGDSLHEHIANLAGSPAIKKGILQTVKVVDELVKVMGRHKPENIVIEMARENQTTQKGQKNSRERMKRIEEGIKELGSQILKEHPVENTQLQNEKLYLYYLQNGRDMYVDQELDINRLSDYDVDHIVPQSFLKDDSIDNKVLTRSDKARGKSDNVPSEEVVKKMKNYWRQLLNAKLITQRKFDNLTKAERGGLSELDKAGFIKRQLVETRQITKHVAQILDSRMNTKYDENDKLIREVKVITLKSKLVSDFRKDFQFYKVREINNYHHAHDAYLNAVVGTALIKKYPKLESEFVYGDYKVYDVRKMIAKSEQEIGKATAKYFFYSNIMNFFKTEITLANGEIRKRPLIETNGETGEIVWDKGRDFATVRKVLSMPQVNIVKKTEVQTGGFSKESILPKRNSDKLIARKKDWDPKKYGGFDSPTVAYSVLVVAKVEKGKSKKLKSVKELLGITIMERSSFEKNPIDFLEAKGYKEVKKDLIIKLPKYSLFELENGRKRMLASAGELQKGNELALPSKYVNFLYLASHYEKLKGSPEDNEQKQLFVEQHKHYLDEIIEQISEFSKRVILADANLDKVLSAYNKHRDKPIREQAENIIHLFTLTNLGAPAAFKYFDTTIDRKRYTSTKEVLDATLIHQSITGLYETRIDLSQLGGDGGGGGGGGGMDLLKPLTVERKGVKIKGYWNSQADITCVPKDLLQGEEPVRQQNVTTIHGTQEGDVYYVNLKIDGRRINTEVIGTTLDYAIITPGDVPWILKKPLELTIKLDLEEQQGTLLNNSILSKKGKEELKQLFEKYSALWQSWENQVGHRRIRPHKIATGTVKPTPQKQYHINPKAKPDIQIVINDLLKQGVLIQKESTMNTPVYPVPKPNGRWRMVLDYRAVNKVTPLIAVQNQHSYGILGSLFKGRYKTTIDLSNGFWAHPIVPEDYWITAFTWQGKQYCWTVLPQGFLNSPGLFTGDVVDLLQGIPNVEVYVDDVYISHDSEKEHLEYLDILFNRLKEAGYIISLKKSNIANSIVDFLGFQITNEGRGLTDTFKEKLENITAPTTLKQLQSILGLLNFARNFIPDFTELIAPLYALIPKSTKNYVPWQIEHSTTLETLITKLNGAEYLQGRKGDKTLIMKVNASYTTGYIRYYNEGEKKPISYVSIVFSKTELKFTELEKLLTTVHKGLLKALDLSMGQNIHVYSPIVSMQNIQKTPQTAKKALASRWLSWLSYLEDPRIRFFYDPQMPALKDLPAVDTGKDNKKHPSNFQHIFYTDGSAITSPTKEGHLNAGMGIVYFINKDGNLQKQQEWSISLGNHTAQFAEIAAFEFALKKCLPLGGNILVVTDSNYVAKAYNEELDVWASNGFVNNRKKPLKHISKWKSVADLKRLRPDVVVTHEPGHQKLDSSPHAYGNNLADQLATQASFKVHAGKRTADGSEFEKRTADGSEFESPKKKAKVE

SEQ ID NO: 734 - protein, 2165 aa, synthetic construct
MPAAKRVKLDGGDKKYSIGLDIGTNSVGWAVITDEYKVPSKKFKVLGNTDRHSIKKNLIGALLFDSGETAEATRLKRTARRRYTRRKNRICYLQEIFSNEMAKVDDSFFHRLEESFLVEEDKKHERHPIFGNIVDEVAYHEKYPTIYHLRKKLVDSTDKADLRLIYLALAHMIKFRGHFLIEGDLNPDNSDVDKLFIQLVQTYNQLFEENPINASGVDAKAILSARLSKSRRLENLIAQLPGEKKNGLFGNLIALSLGLTPNFKSNFDLAEDAKLQLSKDTYDDDLDNLLAQIGDQYADLFLAAKNLSDAILLSDILRVNTEITKAPLSASMIKRYDEHHQDLTLLKALVRQQLPEKYKEIFFDQSKNGYAGYIDGGASQEEFYKFIKPILEKMDGTEELLVKLNREDLLRKQRTFDNGSIPHQIHLGELHAILRRQEDFYPFLKDNREKIEKILTFRIPYYVGPLARGNSRFAWMTRKSEETITPWNFEEVVDKGASAQSFIERMTNFDKNLPNEKVLPKHSLLYEYFTVYNELTKVKYVTEGMRKPAFLSGEQKKAIVDLLFKTNRKVTVKQLKEDYFKKIECFDSVEISGVEDRFNASLGTYHDLLKIIKDKDFLDNEENEDILEDIVLTLTLFEDREMIEERLKTYAHLFDDKVMKQLKRRRYTGWGRLSRKLINGIRDKQSGKTILDFLKSDGFANRNFMQLIHDDSLTFKEDIQKAQVSGQGDSLHEHIANLAGSPAIKKGILQTVKVVDELVKVMGRHKPENIVIEMARENQTTQKGQKNSRERMKRIEEGIKELGSQILKEHPVENTQLQNEKLYLYYLQNGRDMYVDQELDINRLSDYDVDHIVPQSFLKDDSIDNKVLTRSDKARGKSDNVPSEEVVKKMKNYWRQLLNAKLITQRKFDNLTKAERGGLSELDKAGFIKRQLVETRQITKHVAQILDSRMNTKYDENDKLIREVKVITLKSKLVSDFRKDFQFYKVREINNYHHAHDAYLNAVVGTALIKKYPKLESEFVYGDYKVYDVRKMIAKSEQEIGKATAKYFFYSNIMNFFKTEITLANGEIRKRPLIETNGETGEIVWDKGRDFATVRKVLSMPQVNIVKKTEVQTGGFSKESILPKRNSDKLIARKKDWDPKKYGGFDSPTVAYSVLVVAKVEKGKSKKLKSVKELLGITIMERSSFEKNPIDFLEAKGYKEVKKDLIIKLPKYSLFELENGRKRMLASAGELQKGNELALPSKYVNFLYLASHYEKLKGSPEDNEQKQLFVEQHKHYLDEIIEQISEFSKRVILADANLDKVLSAYNKHRDKPIREQAENIIHLFTLTNLGAPAAFKYFDTTIDRKRYTSTKEVLDATLIHQSITGLYETRIDLSQLGGDGGGGGGGMDLLKPLTVERKGVKIKGYWNSQADITCVPKDLLQGEEPVRQQNVTTIHGTQEGDVYYVNLKIDGRRINTEVIGTTLDYAIITPGDVPWILKKPLELTIKLDLEEQQGTLLNNSILSKKGKEELKQLFEKYSALWQSWENQVGHRRIRPHKIATGTVKPTPQKQYHINPKAKPDIQIVINDLLKQGVLIQKESTMNTPVYPVPKPNGRWRMVLDYRAVNKVTPLIAVQNQHSYGILGSLFKGRYKTTIDLSNGFWAHPIVPEDYWITAFTWQGKQYCWTVLPQGFLNSPGLFTGDVVDLLQGIPNVEVYVDDVYISHDSEKEHLEYLDILFNRLKEAGYIISLKKSNIANSIVDFLGFQITNEGRGLTDTFKEKLENITAPTTLKQLQSILGLLNFARNFIPDFTELIAPLYALIPKSTKNYVPWQIEHSTTLETLITKLNGAEYLQGRKGDKTLIMKVNASYTTGYIRYYNEGEKKPISYVSIVFSKTELKFTELEKLLTTVHKGLLKALDLSMGQNIHVYSPIVSMQNIQKTPQTAKKALASRWLSWLSYLEDPRIRFFYDPQMPALKDLPAVDTGKDNKKHPSNFQHIFYTDGSAITSPTKEGHLNAGMGIVYFINKDGNLQKQQEWSISLGNHTAQFAEIAAFEFALKKCLPLGGNILVVTDSNYVAKAYNEELDVWASNGFVNNRKKPLKHISKWKSVADLKRLRPDVVVTHEPGHQKLDSSPHAYGNNLADQLATQASFKVHAGKRTADGSEFEKRTADGSEFESPKKKAKVE

SEQ ID NO: 735 - protein, 2167 aa, synthetic construct
MPAAKRVKLDGGDKKYSIGLDIGTNSVGWAVITDEYKVPSKKFKVLGNTDRHSIKKNLIGALLFDSGETAEATRLKRTARRRYTRRKNRICYLQEIFSNEMAKVDDSFFHRLEESFLVEEDKKHERHPIFGNIVDEVAYHEKYPTIYHLRKKLVDSTDKADLRLIYLALAHMIKFRGHFLIEGDLNPDNSDVDKLFIQLVQTYNQLFEENPINASGVDAKAILSARLSKSRRLENLIAQLPGEKKNGLFGNLIALSLGLTPNFKSNFDLAEDAKLQLSKDTYDDDLDNLLAQIGDQYADLFLAAKNLSDAILLSDILRVNTEITKAPLSASMIKRYDEHHQDLTLLKALVRQQLPEKYKEIFFDQSKNGYAGYIDGGASQEEFYKFIKPILEKMDGTEELLVKLNREDLLRKQRTFDNGSIPHQIHLGELHAILRRQEDFYPFLKDNREKIEKILTFRIPYYVGPLARGNSRFAWMTRKSEETITPWNFEEVVDKGASAQSFIERMTNFDKNLPNEKVLPKHSLLYEYFTVYNELTKVKYVTEGMRKPAFLSGEQKKAIVDLLFKTNRKVTVKQLKEDYFKKIECFDSVEISGVEDRFNASLGTYHDLLKIIKDKDFLDNEENEDILEDIVLTLTLFEDREMIEERLKTYAHLFDDKVMKQLKRRRYTGWGRLSRKLINGIRDKQSGKTILDFLKSDGFANRNFMQLIHDDSLTFKEDIQKAQVSGQGDSLHEHIANLAGSPAIKKGILQTVKVVDELVKVMGRHKPENIVIEMARENQTTQKGQKNSRERMKRIEEGIKELGSQILKEHPVENTQLQNEKLYLYYLQNGRDMYVDQELDINRLSDYDVDHIVPQSFLKDDSIDNKVLTRSDKARGKSDNVPSEEVVKKMKNYWRQLLNAKLITQRKFDNLTKAERGGLSELDKAGFIKRQLVETRQITKHVAQILDSRMNTKYDENDKLIREVKVITLKSKLVSDFRKDFQFYKVREINNYHHAHDAYLNAVVGTALIKKYPKLESEFVYGDYKVYDVRKMIAKSEQEIGKATAKYFFYSNIMNFFKTEITLANGEIRKRPLIETNGETGEIVWDKGRDFATVRKVLSMPQVNIVKKTEVQTGGFSKESILPKRNSDKLIARKKDWDPKKYGGFDSPTVAYSVLVVAKVEKGKSKKLKSVKELLGITIMERSSFEKNPIDFLEAKGYKEVKKDLIIKLPKYSLFELENGRKRMLASAGELQKGNELALPSKYVNFLYLASHYEKLKGSPEDNEQKQLFVEQHKHYLDEIIEQISEFSKRVILADANLDKVLSAYNKHRDKPIREQAENIIHLFTLTNLGAPAAFKYFDTTIDRKRYTSTKEVLDATLIHQSITGLYETRIDLSQLGGDGGPAPAPGGMDLLKPLTVERKGVKIKGYWNSQADITCVPKDLLQGEEPVRQQNVTTIHGTQEGDVYYVNLKIDGRRINTEVIGTTLDYAIITPGDVPWILKKPLELTIKLDLEEQQGTLLNNSILSKKGKEELKQLFEKYSALWQSWENQVGHRRIRPHKIATGTVKPTPQKQYHINPKAKPDIQIVINDLLKQGVLIQKESTMNTPVYPVPKPNGRWRMVLDYRAVNKVTPLIAVQNQHSYGILGSLFKGRYKTTIDLSNGFWAHPIVPEDYWITAFTWQGKQYCWTVLPQGFLNSPGLFTGDVVDLLQGIPNVEVYVDDVYISHDSEKEHLEYLDILFNRLKEAGYIISLKKSNIANSIVDFLGFQITNEGRGLTDTFKEKLENITAPTTLKQLQSILGLLNFARNFIPDFTELIAPLYALIPKSTKNYVPWQIEHSTTLETLITKLNGAEYLQGRKGDKTLIMKVNASYTTGYIRYYNEGEKKPISYVSIVFSKTELKFTELEKLLTTVHKGLLKALDLSMGQNIHVYSPIVSMQNIQKTPQTAKKALASRWLSWLSYLEDPRIRFFYDPQMPALKDLPAVDTGKDNKKHPSNFQHIFYTDGSAITSPTKEGHLNAGMGIVYFINKDGNLQKQQEWSISLGNHTAQFAEIAAFEFALKKCLPLGGNILVVTDSNYVAKAYNEELDVWASNGFVNNRKKPLKHISKWKSVADLKRLRPDVVVTHEPGHQKLDSSPHAYGNNLADQLATQASFKVHAGKRTADGSEFEKRTADGSEFESPKKKAKVE

SEQ ID NO: 736 - protein, 2171 aa, synthetic construct
MPAAKRVKLDGGDKKYSIGLDIGTNSVGWAVITDEYKVPSKKFKVLGNTDRHSIKKNLIGALLFDSGETAEATRLKRTARRRYTRRKNRICYLQEIFSNEMAKVDDSFFHRLEESFLVEEDKKHERHPIFGNIVDEVAYHEKYPTIYHLRKKLVDSTDKADLRLIYLALAHMIKFRGHFLIEGDLNPDNSDVDKLFIQLVQTYNQLFEENPINASGVDAKAILSARLSKSRRLENLIAQLPGEKKNGLFGNLIALSLGLTPNFKSNFDLAEDAKLQLSKDTYDDDLDNLLAQIGDQYADLFLAAKNLSDAILLSDILRVNTEITKAPLSASMIKRYDEHHQDLTLLKALVRQQLPEKYKEIFFDQSKNGYAGYIDGGASQEEFYKFIKPILEKMDGTEELLVKLNREDLLRKQRTFDNGSIPHQIHLGELHAILRRQEDFYPFLKDNREKIEKILTFRIPYYVGPLARGNSRFAWMTRKSEETITPWNFEEVVDKGASAQSFIERMTNFDKNLPNEKVLPKHSLLYEYFTVYNELTKVKYVTEGMRKPAFLSGEQKKAIVDLLFKTNRKVTVKQLKEDYFKKIECFDSVEISGVEDRFNASLGTYHDLLKIIKDKDFLDNEENEDILEDIVLTLTLFEDREMIEERLKTYAHLFDDKVMKQLKRRRYTGWGRLSRKLINGIRDKQSGKTILDFLKSDGFANRNFMQLIHDDSLTFKEDIQKAQVSGQGDSLHEHIANLAGSPAIKKGILQTVKVVDELVKVMGRHKPENIVIEMARENQTTQKGQKNSRERMKRIEEGIKELGSQILKEHPVENTQLQNEKLYLYYLQNGRDMYVDQELDINRLSDYDVDHIVPQSFLKDDSIDNKVLTRSDKARGKSDNVPSEEVVKKMKNYWRQLLNAKLITQRKFDNLTKAERGGLSELDKAGFIKRQLVETRQITKHVAQILDSRMNTKYDENDKLIREVKVITLKSKLVSDFRKDFQFYKVREINNYHHAHDAYLNAVVGTALIKKYPKLESEFVYGDYKVYDVRKMIAKSEQEIGKATAKYFFYSNIMNFFKTEITLANGEIRKRPLIETNGETGEIVWDKGRDFATVRKVLSMPQVNIVKKTEVQTGGFSKESILPKRNSDKLIARKKDWDPKKYGGFDSPTVAYSVLVVAKVEKGKSKKLKSVKELLGITIMERSSFEKNPIDFLEAKGYKEVKKDLIIKLPKYSLFELENGRKRMLASAGELQKGNELALPSKYVNFLYLASHYEKLKGSPEDNEQKQLFVEQHKHYLDEIIEQISEFSKRVILADANLDKVLSAYNKHRDKPIREQAENIIHLFTLTNLGAPAAFKYFDTTIDRKRYTSTKEVLDATLIHQSITGLYETRIDLSQLGGDGGGSSGGGGGSGGMDLLKPLTVERKGVKIKGYWNSQADITCVPKDLLQGEEPVRQQNVTTIHGTQEGDVYYVNLKIDGRRINTEVIGTTLDYAIITPGDVPWILKKPLELTIKLDLEEQQGTLLNNSILSKKGKEELKQLFEKYSALWQSWENQVGHRRIRPHKIATGTVKPTPQKQYHINPKAKPDIQIVINDLLKQGVLIQKESTMNTPVYPVPKPNGRWRMVLDYRAVNKVTPLIAVQNQHSYGILGSLFKGRYKTTIDLSNGFWAHPIVPEDYWITAFTWQGKQYCWTVLPQGFLNSPGLFTGDVVDLLQGIPNVEVYVDDVYISHDSEKEHLEYLDILFNRLKEAGYIISLKKSNIANSIVDFLGFQITNEGRGLTDTFKEKLENITAPTTLKQLQSILGLLNFARNFIPDFTELIAPLYALIPKSTKNYVPWQIEHSTTLETLITKLNGAEYLQGRKGDKTLIMKVNASYTTGYIRYYNEGEKKPISYVSIVFSKTELKFTELEKLLTTVHKGLLKALDLSMGQNIHVYSPIVSMQNIQKTPQTAKKALASRWLSWLSYLEDPRIRFFYDPQMPALKDLPAVDTGKDNKKHPSNFQHIFYTDGSAITSPTKEGHLNAGMGIVYFINKDGNLQKQQEWSISLGNHTAQFAEIAAFEFALKKCLPLGGNILVVTDSNYVAKAYNEELDVWASNGFVNNRKKPLKHISKWKSVADLKRLRPDVVVTHEPGHQKLDSSPHAYGNNLADQLATQASFKVHAGKRTADGSEFEKRTADGSEFESPKKKAKVE

SEQ ID NO: 737 - protein, 2171 aa, synthetic construct
MPAAKRVKLDGGDKKYSIGLDIGTNSVGWAVITDEYKVPSKKFKVLGNTDRHSIKKNLIGALLFDSGETAEATRLKRTARRRYTRRKNRICYLQEIFSNEMAKVDDSFFHRLEESFLVEEDKKHERHPIFGNIVDEVAYHEKYPTIYHLRKKLVDSTDKADLRLIYLALAHMIKFRGHFLIEGDLNPDNSDVDKLFIQLVQTYNQLFEENPINASGVDAKAILSARLSKSRRLENLIAQLPGEKKNGLFGNLIALSLGLTPNFKSNFDLAEDAKLQLSKDTYDDDLDNLLAQIGDQYADLFLAAKNLSDAILLSDILRVNTEITKAPLSASMIKRYDEHHQDLTLLKALVRQQLPEKYKEIFFDQSKNGYAGYIDGGASQEEFYKFIKPILEKMDGTEELLVKLNREDLLRKQRTFDNGSIPHQIHLGELHAILRRQEDFYPFLKDNREKIEKILTFRIPYYVGPLARGNSRFAWMTRKSEETITPWNFEEVVDKGASAQSFIERMTNFDKNLPNEKVLPKHSLLYEYFTVYNELTKVKYVTEGMRKPAFLSGEQKKAIVDLLFKTNRKVTVKQLKEDYFKKIECFDSVEISGVEDRFNASLGTYHDLLKIIKDKDFLDNEENEDILEDIVLTLTLFEDREMIEERLKTYAHLFDDKVMKQLKRRRYTGWGRLSRKLINGIRDKQSGKTILDFLKSDGFANRNFMQLIHDDSLTFKEDIQKAQVSGQGDSLHEHIANLAGSPAIKKGILQTVKVVDELVKVMGRHKPENIVIEMARENQTTQKGQKNSRERMKRIEEGIKELGSQILKEHPVENTQLQNEKLYLYYLQNGRDMYVDQELDINRLSDYDVDHIVPQSFLKDDSIDNKVLTRSDKARGKSDNVPSEEVVKKMKNYWRQLLNAKLITQRKFDNLTKAERGGLSELDKAGFIKRQLVETRQITKHVAQILDSRMNTKYDENDKLIREVKVITLKSKLVSDFRKDFQFYKVREINNYHHAHDAYLNAVVGTALIKKYPKLESEFVYGDYKVYDVRKMIAKSEQEIGKATAKYFFYSNIMNFFKTEITLANGEIRKRPLIETNGETGEIVWDKGRDFATVRKVLSMPQVNIVKKTEVQTGGFSKESILPKRNSDKLIARKKDWDPKKYGGFDSPTVAYSVLVVAKVEKGKSKKLKSVKELLGITIMERSSFEKNPIDFLEAKGYKEVKKDLIIKLPKYSLFELENGRKRMLASAGELQKGNELALPSKYVNFLYLASHYEKLKGSPEDNEQKQLFVEQHKHYLDEIIEQISEFSKRVILADANLDKVLSAYNKHRDKPIREQAENIIHLFTLTNLGAPAAFKYFDTTIDRKRYTSTKEVLDATLIHQSITGLYETRIDLSQLGGDGGPAPGGSGSSGGMDLLKPLTVERKGVKIKGYWNSQADITCVPKDLLQGEEPVRQQNVTTIHGTQEGDVYYVNLKIDGRRINTEVIGTTLDYAIITPGDVPWILKKPLELTIKLDLEEQQGTLLNNSILSKKGKEELKQLFEKYSALWQSWENQVGHRRIRPHKIATGTVKPTPQKQYHINPKAKPDIQIVINDLLKQGVLIQKESTMNTPVYPVPKPNGRWRMVLDYRAVNKVTPLIAVQNQHSYGILGSLFKGRYKTTIDLSNGFWAHPIVPEDYWITAFTWQGKQYCWTVLPQGFLNSPGLFTGDVVDLLQGIPNVEVYVDDVYISHDSEKEHLEYLDILFNRLKEAGYIISLKKSNIANSIVDFLGFQITNEGRGLTDTFKEKLENITAPTTLKQLQSILGLLNFARNFIPDFTELIAPLYALIPKSTKNYVPWQIEHSTTLETLITKLNGAEYLQGRKGDKTLIMKVNASYTTGYIRYYNEGEKKPISYVSIVFSKTELKFTELEKLLTTVHKGLLKALDLSMGQNIHVYSPIVSMQNIQKTPQTAKKALASRWLSWLSYLEDPRIRFFYDPQMPALKDLPAVDTGKDNKKHPSNFQHIFYTDGSAITSPTKEGHLNAGMGIVYFINKDGNLQKQQEWSISLGNHTAQFAEIAAFEFALKKCLPLGGNILVVTDSNYVAKAYNEELDVWASNGFVNNRKKPLKHISKWKSVADLKRLRPDVVVTHEPGHQKLDSSPHAYGNNLADQLATQASFKVHAGKRTADGSEFEKRTADGSEFESPKKKAKVE

SEQ ID NO: 738 - protein, 2185 aa, synthetic construct
MPAAKRVKLDGGDKKYSIGLDIGTNSVGWAVITDEYKVPSKKFKVLGNTDRHSIKKNLIGALLFDSGETAEATRLKRTARRRYTRRKNRICYLQEIFSNEMAKVDDSFFHRLEESFLVEEDKKHERHPIFGNIVDEVAYHEKYPTIYHLRKKLVDSTDKADLRLIYLALAHMIKFRGHFLIEGDLNPDNSDVDKLFIQLVQTYNQLFEENPINASGVDAKAILSARLSKSRRLENLIAQLPGEKKNGLFGNLIALSLGLTPNFKSNFDLAEDAKLQLSKDTYDDDLDNLLAQIGDQYADLFLAAKNLSDAILLSDILRVNTEITKAPLSASMIKRYDEHHQDLTLLKALVRQQLPEKYKEIFFDQSKNGYAGYIDGGASQEEFYKFIKPILEKMDGTEELLVKLNREDLLRKQRTFDNGSIPHQIHLGELHAILRRQEDFYPFLKDNREKIEKILTFRIPYYVGPLARGNSRFAWMTRKSEETITPWNFEEVVDKGASAQSFIERMTNFDKNLPNEKVLPKHSLLYEYFTVYNELTKVKYVTEGMRKPAFLSGEQKKAIVDLLFKTNRKVTVKQLKEDYFKKIECFDSVEISGVEDRFNASLGTYHDLLKIIKDKDFLDNEENEDILEDIVLTLTLFEDREMIEERLKTYAHLFDDKVMKQLKRRRYTGWGRLSRKLINGIRDKQSGKTILDFLKSDGFANRNFMQLIHDDSLTFKEDIQKAQVSGQGDSLHEHIANLAGSPAIKKGILQTVKVVDELVKVMGRHKPENIVIEMARENQTTQKGQKNSRERMKRIEEGIKELGSQILKEHPVENTQLQNEKLYLYYLQNGRDMYVDQELDINRLSDYDVDHIVPQSFLKDDSIDNKVLTRSDKARGKSDNVPSEEVVKKMKNYWRQLLNAKLITQRKFDNLTKAERGGLSELDKAGFIKRQLVETRQITKHVAQILDSRMNTKYDENDKLIREVKVITLKSKLVSDFRKDFQFYKVREINNYHHAHDAYLNAVVGTALIKKYPKLESEFVYGDYKVYDVRKMIAKSEQEIGKATAKYFFYSNIMNFFKTEITLANGEIRKRPLIETNGETGEIVWDKGRDFATVRKVLSMPQVNIVKKTEVQTGGFSKESILPKRNSDKLIARKKDWDPKKYGGFDSPTVAYSVLVVAKVEKGKSKKLKSVKELLGITIMERSSFEKNPIDFLEAKGYKEVKKDLIIKLPKYSLFELENGRKRMLASAGELQKGNELALPSKYVNFLYLASHYEKLKGSPEDNEQKQLFVEQHKHYLDEIIEQISEFSKRVILADANLDKVLSAYNKHRDKPIREQAENIIHLFTLTNLGAPAAFKYFDTTIDRKRYTSTKEVLDATLIHQSITGLYETRIDLSQLGGDGGGGGGSGGGGSGGGGSGGGGSGGMNPLQLLQPLPAEVKGTKLLAHWNSGATITCIPESFLEDEQPIKQTLIKTIHGEKQQNVYYLTFKVKGRKVEAEVIASPYEYILLSPTDVPWLTQQPLQLTILVPLQEYQDRILNKTALPEEQKQQLKALFTKYDNLWQHWENQVGHRKIRPHNIATGDYPPRPQKQYPINPKAKPSIQIVIDDLLKQGVLTPQNSTMNTPVYPVPKPDGRWRMVLDYREVNKTIPLTAAQNQHSAGILATIVRQKYKTTLDLANGFWAHPITPDSYWLTAFTWQGKQYCWTRLPQGFLNSPALFNADAVDLLKEVPNVQVYVDDIYLSHDNPHEHIQQLEKVFQILLQAGYVVSLKKSEIGQRTVEFLGFNITKEGRGLTDTFKTKLLNVTPPKDLKQLQSILGKLNFARNFIPNFAELVQTLYNLIASSPGKYIEWTEDNTKQLNKVIEALNTASNLEERLPDQRLVIKVNTSPSAGYVRYYNESGKKPIMYLNYVFSKAELKFSMLEKLLTTMHKALIKAMDLAMGQEILVYSPIVSMTKIQKTPLPERKALPIRWITWMTYLEDPRIQFHYDKTLPELKHIPDVYTSSIPPLKHPSQYEGVFCTDGSAIKSPDPTKSNNAGMGIVHAIYNPEYKILNQWSIPLGHHTAQMAEIAAVEFACKKALKVPGPVLVITDSFYVAESANKELPYWKSNGFVNNKKEPLKHISKWKSIAECLSIKPDITIQHEKGHQPINTSIHTEGNALADKLATQGSYVVNAGKRTADGSEFEKRTADGSEFESPKKKAKVE

SEQ ID NO: 739 - protein, 2175 aa, synthetic construct
MPAAKRVKLDGGDKKYSIGLDIGTNSVGWAVITDEYKVPSKKFKVLGNTDRHSIKKNLIGALLFDSGETAEATRLKRTARRRYTRRKNRICYLQEIFSNEMAKVDDSFFHRLEESFLVEEDKKHERHPIFGNIVDEVAYHEKYPTIYHLRKKLVDSTDKADLRLIYLALAHMIKFRGHFLIEGDLNPDNSDVDKLFIQLVQTYNQLFEENPINASGVDAKAILSARLSKSRRLENLIAQLPGEKKNGLFGNLIALSLGLTPNFKSNFDLAEDAKLQLSKDTYDDDLDNLLAQIGDQYADLFLAAKNLSDAILLSDILRVNTEITKAPLSASMIKRYDEHHQDLTLLKALVRQQLPEKYKEIFFDQSKNGYAGYIDGGASQEEFYKFIKPILEKMDGTEELLVKLNREDLLRKQRTFDNGSIPHQIHLGELHAILRRQEDFYPFLKDNREKIEKILTFRIPYYVGPLARGNSRFAWMTRKSEETITPWNFEEVVDKGASAQSFIERMTNFDKNLPNEKVLPKHSLLYEYFTVYNELTKVKYVTEGMRKPAFLSGEQKKAIVDLLFKTNRKVTVKQLKEDYFKKIECFDSVEISGVEDRFNASLGTYHDLLKIIKDKDFLDNEENEDILEDIVLTLTLFEDREMIEERLKTYAHLFDDKVMKQLKRRRYTGWGRLSRKLINGIRDKQSGKTILDFLKSDGFANRNFMQLIHDDSLTFKEDIQKAQVSGQGDSLHEHIANLAGSPAIKKGILQTVKVVDELVKVMGRHKPENIVIEMARENQTTQKGQKNSRERMKRIEEGIKELGSQILKEHPVENTQLQNEKLYLYYLQNGRDMYVDQELDINRLSDYDVDHIVPQSFLKDDSIDNKVLTRSDKARGKSDNVPSEEVVKKMKNYWRQLLNAKLITQRKFDNLTKAERGGLSELDKAGFIKRQLVETRQITKHVAQILDSRMNTKYDENDKLIREVKVITLKSKLVSDFRKDFQFYKVREINNYHHAHDAYLNAVVGTALIKKYPKLESEFVYGDYKVYDVRKMIAKSEQEIGKATAKYFFYSNIMNFFKTEITLANGEIRKRPLIETNGETGEIVWDKGRDFATVRKVLSMPQVNIVKKTEVQTGGFSKESILPKRNSDKLIARKKDWDPKKYGGFDSPTVAYSVLVVAKVEKGKSKKLKSVKELLGITIMERSSFEKNPIDFLEAKGYKEVKKDLIIKLPKYSLFELENGRKRMLASAGELQKGNELALPSKYVNFLYLASHYEKLKGSPEDNEQKQLFVEQHKHYLDEIIEQISEFSKRVILADANLDKVLSAYNKHRDKPIREQAENIIHLFTLTNLGAPAAFKYFDTTIDRKRYTSTKEVLDATLIHQSITGLYETRIDLSQLGGDGGGGGGSGGGGSGGMNPLQLLQPLPAEVKGTKLLAHWNSGATITCIPESFLEDEQPIKQTLIKTIHGEKQQNVYYLTFKVKGRKVEAEVIASPYEYILLSPTDVPWLTQQPLQLTILVPLQEYQDRILNKTALPEEQKQQLKALFTKYDNLWQHWENQVGHRKIRPHNIATGDYPPRPQKQYPINPKAKPSIQIVIDDLLKQGVLTPQNSTMNTPVYPVPKPDGRWRMVLDYREVNKTIPLTAAQNQHSAGILATIVRQKYKTTLDLANGFWAHPITPDSYWLTAFTWQGKQYCWTRLPQGFLNSPALFNADAVDLLKEVPNVQVYVDDIYLSHDNPHEHIQQLEKVFQILLQAGYVVSLKKSEIGQRTVEFLGFNITKEGRGLTDTFKTKLLNVTPPKDLKQLQSILGKLNFARNFIPNFAELVQTLYNLIASSPGKYIEWTEDNTKQLNKVIEALNTASNLEERLPDQRLVIKVNTSPSAGYVRYYNESGKKPIMYLNYVFSKAELKFSMLEKLLTTMHKALIKAMDLAMGQEILVYSPIVSMTKIQKTPLPERKALPIRWITWMTYLEDPRIQFHYDKTLPELKHIPDVYTSSIPPLKHPSQYEGVFCTDGSAIKSPDPTKSNNAGMGIVHAIYNPEYKILNQWSIPLGHHTAQMAEIAAVEFACKKALKVPGPVLVITDSFYVAESANKELPYWKSNGFVNNKKEPLKHISKWKSIAECLSIKPDITIQHEKGHQPINTSIHTEGNALADKLATQGSYVVNAGKRTADGSEFEKRTADGSEFESPKKKAKVE

SEQ ID NO: 740 - protein, 2176 aa, synthetic construct
MPAAKRVKLDGGDKKYSIGLDIGTNSVGWAVITDEYKVPSKKFKVLGNTDRHSIKKNLIGALLFDSGETAEATRLKRTARRRYTRRKNRICYLQEIFSNEMAKVDDSFFHRLEESFLVEEDKKHERHPIFGNIVDEVAYHEKYPTIYHLRKKLVDSTDKADLRLIYLALAHMIKFRGHFLIEGDLNPDNSDVDKLFIQLVQTYNQLFEENPINASGVDAKAILSARLSKSRRLENLIAQLPGEKKNGLFGNLIALSLGLTPNFKSNFDLAEDAKLQLSKDTYDDDLDNLLAQIGDQYADLFLAAKNLSDAILLSDILRVNTEITKAPLSASMIKRYDEHHQDLTLLKALVRQQLPEKYKEIFFDQSKNGYAGYIDGGASQEEFYKFIKPILEKMDGTEELLVKLNREDLLRKQRTFDNGSIPHQIHLGELHAILRRQEDFYPFLKDNREKIEKILTFRIPYYVGPLARGNSRFAWMTRKSEETITPWNFEEVVDKGASAQSFIERMTNFDKNLPNEKVLPKHSLLYEYFTVYNELTKVKYVTEGMRKPAFLSGEQKKAIVDLLFKTNRKVTVKQLKEDYFKKIECFDSVEISGVEDRFNASLGTYHDLLKIIKDKDFLDNEENEDILEDIVLTLTLFEDREMIEERLKTYAHLFDDKVMKQLKRRRYTGWGRLSRKLINGIRDKQSGKTILDFLKSDGFANRNFMQLIHDDSLTFKEDIQKAQVSGQGDSLHEHIANLAGSPAIKKGILQTVKVVDELVKVMGRHKPENIVIEMARENQTTQKGQKNSRERMKRIEEGIKELGSQILKEHPVENTQLQNEKLYLYYLQNGRDMYVDQELDINRLSDYDVDHIVPQSFLKDDSIDNKVLTRSDKARGKSDNVPSEEVVKKMKNYWRQLLNAKLITQRKFDNLTKAERGGLSELDKAGFIKRQLVETRQITKHVAQILDSRMNTKYDENDKLIREVKVITLKSKLVSDFRKDFQFYKVREINNYHHAHDAYLNAVVGTALIKKYPKLESEFVYGDYKVYDVRKMIAKSEQEIGKATAKYFFYSNIMNFFKTEITLANGEIRKRPLIETNGETGEIVWDKGRDFATVRKVLSMPQVNIVKKTEVQTGGFSKESILPKRNSDKLIARKKDWDPKKYGGFDSPTVAYSVLVVAKVEKGKSKKLKSVKELLGITIMERSSFEKNPIDFLEAKGYKEVKKDLIIKLPKYSLFELENGRKRMLASAGELQKGNELALPSKYVNFLYLASHYEKLKGSPEDNEQKQLFVEQHKHYLDEIIEQISEFSKRVILADANLDKVLSAYNKHRDKPIREQAENIIHLFTLTNLGAPAAFKYFDTTIDRKRYTSTKEVLDATLIHQSITGLYETRIDLSQLGGDGGGGGEAAAKGGSGGMNPLQLLQPLPAEVKGTKLLAHWNSGATITCIPESFLEDEQPIKQTLIKTIHGEKQQNVYYLTFKVKGRKVEAEVIASPYEYILLSPTDVPWLTQQPLQLTILVPLQEYQDRILNKTALPEEQKQQLKALFTKYDNLWQHWENQVGHRKIRPHNIATGDYPPRPQKQYPINPKAKPSIQIVIDDLLKQGVLTPQNSTMNTPVYPVPKPDGRWRMVLDYREVNKTIPLTAAQNQHSAGILATIVRQKYKTTLDLANGFWAHPITPDSYWLTAFTWQGKQYCWTRLPQGFLNSPALFNADAVDLLKEVPNVQVYVDDIYLSHDNPHEHIQQLEKVFQILLQAGYVVSLKKSEIGQRTVEFLGFNITKEGRGLTDTFKTKLLNVTPPKDLKQLQSILGKLNFARNFIPNFAELVQTLYNLIASSPGKYIEWTEDNTKQLNKVIEALNTASNLEERLPDQRLVIKVNTSPSAGYVRYYNESGKKPIMYLNYVFSKAELKFSMLEKLLTTMHKALIKAMDLAMGQEILVYSPIVSMTKIQKTPLPERKALPIRWITWMTYLEDPRIQFHYDKTLPELKHIPDVYTSSIPPLKHPSQYEGVFCTDGSAIKSPDPTKSNNAGMGIVHAIYNPEYKILNQWSIPLGHHTAQMAEIAAVEFACKKALKVPGPVLVITDSFYVAESANKELPYWKSNGFVNNKKEPLKHISKWKSIAECLSIKPDITIQHEKGHQPINTSIHTEGNALADKLATQGSYVVNAGKRTADGSEFEKRTADGSEFESPKKKAKVE

SEQ ID NO: 741 - protein, 2012 aa, synthetic construct
MPAAKRVKLDGGDKKYSIGLDIGTNSVGWAVITDEYKVPSKKFKVLGNTDRHSIKKNLIGALLFDSGETAEATRLKRTARRRYTRRKNRICYLQEIFSNEMAKVDDSFFHRLEESFLVEEDKKHERHPIFGNIVDEVAYHEKYPTIYHLRKKLVDSTDKADLRLIYLALAHMIKFRGHFLIEGDLNPDNSDVDKLFIQLVQTYNQLFEENPINASGVDAKAILSARLSKSRRLENLIAQLPGEKKNGLFGNLIALSLGLTPNFKSNFDLAEDAKLQLSKDTYDDDLDNLLAQIGDQYADLFLAAKNLSDAILLSDILRVNTEITKAPLSASMIKRYDEHHQDLTLLKALVRQQLPEKYKEIFFDQSKNGYAGYIDGGASQEEFYKFIKPILEKMDGTEELLVKLNREDLLRKQRTFDNGSIPHQIHLGELHAILRRQEDFYPFLKDNREKIEKILTFRIPYYVGPLARGNSRFAWMTRKSEETITPWNFEEVVDKGASAQSFIERMTNFDKNLPNEKVLPKHSLLYEYFTVYNELTKVKYVTEGMRKPAFLSGEQKKAIVDLLFKTNRKVTVKQLKEDYFKKIECFDSVEISGVEDRFNASLGTYHDLLKIIKDKDFLDNEENEDILEDIVLTLTLFEDREMIEERLKTYAHLFDDKVMKQLKRRRYTGWGRLSRKLINGIRDKQSGKTILDFLKSDGFANRNFMQLIHDDSLTFKEDIQKAQVSGQGDSLHEHIANLAGSPAIKKGILQTVKVVDELVKVMGRHKPENIVIEMARENQTTQKGQKNSRERMKRIEEGIKELGSQILKEHPVENTQLQNEKLYLYYLQNGRDMYVDQELDINRLSDYDVDHIVPQSFLKDDSIDNKVLTRSDKARGKSDNVPSEEVVKKMKNYWRQLLNAKLITQRKFDNLTKAERGGLSELDKAGFIKRQLVETRQITKHVAQILDSRMNTKYDENDKLIREVKVITLKSKLVSDFRKDFQFYKVREINNYHHAHDAYLNAVVGTALIKKYPKLESEFVYGDYKVYDVRKMIAKSEQEIGKATAKYFFYSNIMNFFKTEITLANGEIRKRPLIETNGETGEIVWDKGRDFATVRKVLSMPQVNIVKKTEVQTGGFSKESILPKRNSDKLIARKKDWDPKKYGGFDSPTVAYSVLVVAKVEKGKSKKLKSVKELLGITIMERSSFEKNPIDFLEAKGYKEVKKDLIIKLPKYSLFELENGRKRMLASAGELQKGNELALPSKYVNFLYLASHYEKLKGSPEDNEQKQLFVEQHKHYLDEIIEQISEFSKRVILADANLDKVLSAYNKHRDKPIREQAENIIHLFTLTNLGAPAAFKYFDTTIDRKRYTSTKEVLDATLIHQSITGLYETRIDLSQLGGDGGPAPGGGGGPRSRAIDIPVPHADKISWKITDPVWVDQWPLTYEKTLAAIALVQEQLAAGHIEPTNSPWNTPIFIIKKKSGSWRLLQDLRAVNKVMVPMGALQPGLPSPVAIPLNYHKIVIDLKDCFFTIPLHPEDRPYFAFSVPQINFQSPMPRYQWKVLPQGMANSPTLCQKFVAAAIAPVRSQWPEAYILHYMDDILLACDSAEAAKACYAHIISCLTSYGLKIAPDKVQVSEPFSYLGFELHHQQVFTPRVCLKTDHLKTLNDFQKLLGDIQWLRPYLKLPTSALVPLNNILKGDPNPLSVRALTPEAKQSLALINKAIQNQSVQQISYNLPLVLLLLPTPHTPTAVFWQPNGTDPTKNGSPLLWLHLPASPSKVLLTYPSLLAMLIIKGRYTGRQLFGRDPHSIIIPYTQDQLTWLLQTSDEWAIALSSFTGDIDNHYPSDPVIQFAKLHQFIFPKITKCAPIPQATLVFTDGSSNGIAAYVIDNQPISIKSPYLSAQLVELYAILQVFTVLAHQPFNLYTDSAYIAQSVPLLETVPFIKSSTNATPLFSKLQQLILNRQHPFFIGHLRAHLNLPGPLAEGNALADAATQIFPIISDAGKRTADGSEFEKRTADGSEFESPKKKAKVE

SEQ ID NO: 742 - protein, 2012 aa, synthetic construct
MPAAKRVKLDGGDKKYSIGLDIGTNSVGWAVITDEYKVPSKKFKVLGNTDRHSIKKNLIGALLFDSGETAEATRLKRTARRRYTRRKNRICYLQEIFSNEMAKVDDSFFHRLEESFLVEEDKKHERHPIFGNIVDEVAYHEKYPTIYHLRKKLVDSTDKADLRLIYLALAHMIKFRGHFLIEGDLNPDNSDVDKLFIQLVQTYNQLFEENPINASGVDAKAILSARLSKSRRLENLIAQLPGEKKNGLFGNLIALSLGLTPNFKSNFDLAEDAKLQLSKDTYDDDLDNLLAQIGDQYADLFLAAKNLSDAILLSDILRVNTEITKAPLSASMIKRYDEHHQDLTLLKALVRQQLPEKYKEIFFDQSKNGYAGYIDGGASQEEFYKFIKPILEKMDGTEELLVKLNREDLLRKQRTFDNGSIPHQIHLGELHAILRRQEDFYPFLKDNREKIEKILTFRIPYYVGPLARGNSRFAWMTRKSEETITPWNFEEVVDKGASAQSFIERMTNFDKNLPNEKVLPKHSLLYEYFTVYNELTKVKYVTEGMRKPAFLSGEQKKAIVDLLFKTNRKVTVKQLKEDYFKKIECFDSVEISGVEDRFNASLGTYHDLLKIIKDKDFLDNEENEDILEDIVLTLTLFEDREMIEERLKTYAHLFDDKVMKQLKRRRYTGWGRLSRKLINGIRDKQSGKTILDFLKSDGFANRNFMQLIHDDSLTFKEDIQKAQVSGQGDSLHEHIANLAGSPAIKKGILQTVKVVDELVKVMGRHKPENIVIEMARENQTTQKGQKNSRERMKRIEEGIKELGSQILKEHPVENTQLQNEKLYLYYLQNGRDMYVDQELDINRLSDYDVDHIVPQSFLKDDSIDNKVLTRSDKARGKSDNVPSEEVVKKMKNYWRQLLNAKLITQRKFDNLTKAERGGLSELDKAGFIKRQLVETRQITKHVAQILDSRMNTKYDENDKLIREVKVITLKSKLVSDFRKDFQFYKVREINNYHHAHDAYLNAVVGTALIKKYPKLESEFVYGDYKVYDVRKMIAKSEQEIGKATAKYFFYSNIMNFFKTEITLANGEIRKRPLIETNGETGEIVWDKGRDFATVRKVLSMPQVNIVKKTEVQTGGFSKESILPKRNSDKLIARKKDWDPKKYGGFDSPTVAYSVLVVAKVEKGKSKKLKSVKELLGITIMERSSFEKNPIDFLEAKGYKEVKKDLIIKLPKYSLFELENGRKRMLASAGELQKGNELALPSKYVNFLYLASHYEKLKGSPEDNEQKQLFVEQHKHYLDEIIEQISEFSKRVILADANLDKVLSAYNKHRDKPIREQAENIIHLFTLTNLGAPAAFKYFDTTIDRKRYTSTKEVLDATLIHQSITGLYETRIDLSQLGGDGGGGGGGGGGPRSRAIDIPVPHADKISWKITDPVWVDQWPLTYEKTLAAIALVQEQLAAGHIEPTNSPWNTPIFIIKKKSGSWRLLQDLRAVNKVMVPMGALQPGLPSPVAIPLNYHKIVIDLKDCFFTIPLHPEDRPYFAFSVPQINFQSPMPRYQWKVLPQGMANSPTLCQKFVAAAIAPVRSQWPEAYILHYMDDILLACDSAEAAKACYAHIISCLTSYGLKIAPDKVQVSEPFSYLGFELHHQQVFTPRVCLKTDHLKTLNDFQKLLGDIQWLRPYLKLPTSALVPLNNILKPDPNPLSVRALTPEAKQSLALINKAIQNQSVQQISYNLPLVLLLLPTPHTPTAVFWQPNGTDPTKNGSPLLWLHLPASPSKVLLTYPSLLAMLIIKGRYTGRQLFGRDPHSIIIPYTQDQLTWLLQTSDEWAIALSSFTGDIDNHYPSDPVIQFAKLHQFIFPKITKCAPIPQATLVFTDGSSNGIAAYVIDNQPISIKSPYLSAQLVELYAILQVFTVLAHQPFNLYTDSAYIAQSVPLLETVPFIKSSTNATPLFSKLQQLILNRQHPFFIGHLRAHLNLPGPLAEGNALADAATQIFPIISDAGKRTADGSEFEKRTADGSEFESPKKKAKVE

SEQ ID NO: 743 - protein, 2021 aa, synthetic construct
MPAAKRVKLDGGDKKYSIGLDIGTNSVGWAVITDEYKVPSKKFKVLGNTDRHSIKKNLIGALLFDSGETAEATRLKRTARRRYTRRKNRICYLQEIFSNEMAKVDDSFFHRLEESFLVEEDKKHERHPIFGNIVDEVAYHEKYPTIYHLRKKLVDSTDKADLRLIYLALAHMIKFRGHFLIEGDLNPDNSDVDKLFIQLVQTYNQLFEENPINASGVDAKAILSARLSKSRRLENLIAQLPGEKKNGLFGNLIALSLGLTPNFKSNFDLAEDAKLQLSKDTYDDDLDNLLAQIGDQYADLFLAAKNLSDAILLSDILRVNTEITKAPLSASMIKRYDEHHQDLTLLKALVRQQLPEKYKEIFFDQSKNGYAGYIDGGASQEEFYKFIKPILEKMDGTEELLVKLNREDLLRKQRTFDNGSIPHQIHLGELHAILRRQEDFYPFLKDNREKIEKILTFRIPYYVGPLARGNSRFAWMTRKSEETITPWNFEEVVDKGASAQSFIERMTNFDKNLPNEKVLPKHSLLYEYFTVYNELTKVKYVTEGMRKPAFLSGEQKKAIVDLLFKTNRKVTVKQLKEDYFKKIECFDSVEISGVEDRFNASLGTYHDLLKIIKDKDFLDNEENEDILEDIVLTLTLFEDREMIEERLKTYAHLFDDKVMKQLKRRRYTGWGRLSRKLINGIRDKQSGKTILDFLKSDGFANRNFMQLIHDDSLTFKEDIQKAQVSGQGDSLHEHIANLAGSPAIKKGILQTVKVVDELVKVMGRHKPENIVIEMARENQTTQKGQKNSRERMKRIEEGIKELGSQILKEHPVENTQLQNEKLYLYYLQNGRDMYVDQELDINRLSDYDVDHIVPQSFLKDDSIDNKVLTRSDKARGKSDNVPSEEVVKKMKNYWRQLLNAKLITQRKFDNLTKAERGGLSELDKAGFIKRQLVETRQITKHVAQILDSRMNTKYDENDKLIREVKVITLKSKLVSDFRKDFQFYKVREINNYHHAHDAYLNAVVGTALIKKYPKLESEFVYGDYKVYDVRKMIAKSEQEIGKATAKYFFYSNIMNFFKTEITLANGEIRKRPLIETNGETGEIVWDKGRDFATVRKVLSMPQVNIVKKTEVQTGGFSKESILPKRNSDKLIARKKDWDPKKYGGFDSPTVAYSVLVVAKVEKGKSKKLKSVKELLGITIMERSSFEKNPIDFLEAKGYKEVKKDLIIKLPKYSLFELENGRKRMLASAGELQKGNELALPSKYVNFLYLASHYEKLKGSPEDNEQKQLFVEQHKHYLDEIIEQISEFSKRVILADANLDKVLSAYNKHRDKPIREQAENIIHLFTLTNLGAPAAFKYFDTTIDRKRYTSTKEVLDATLIHQSITGLYETRIDLSQLGGDGGGGSGGSGGSGGSGGSGGPRSRAIDIPVPHADKISWKITDPVWVDQWPLTYEKTLAAIALVQEQLAAGHIEPTNSPWNTPIFIIKKKSGSWRLLQDLRAVNKVMVPMGALQPGLPSPVAPPLNYHKIVIDLKDCFFTIPLHPEDRPYFAFSVPQINFQSPMPRYQWKVLPQGMANSPTLCQKFVAAAIAPVRSQWPEAYILHYMDDILLACDSAEAAKACYAHIISCLTSYGLKIAPDKVQVSEPFSYLGFELHHQQVFTPRVCLKTDHLKTLNDFQKLLGDIQWLRPYLKLPTSALVPLNNILKPDPNPLSVRALTPEAKQSLALINKAIQNQSVQQISYNLPLVLLLLPTPHTPTAVFWQPNGTDPTKNGSPLLWLHLPASPSKVLLTYPSLLAMLIIKGRYTGRQLFGRDPHSIIIPYTQDQLTWLLQTSDEWAIALSSFTGDIDNHYPSDPVIQFAKLHQFIFPKITKCAPIPQATLVFTDGSSNGIAAYVIDNQPISIKSPYLSAQLVELYAILQVFTVLAHQPFNLYTDSAYIAQSVPLLETVPFIKSSTNATPLFSKLQQLILNRQHPFFIGHLRAHLNLPGPLAEGNALADAATQIFPIISDAGKRTADGSEFEKRTADGSEFESPKKKAKVE

SEQ ID NO: 744 - protein, 2017 aa, synthetic construct
MPAAKRVKLDGGDKKYSIGLDIGTNSVGWAVITDEYKVPSKKFKVLGNTDRHSIKKNLIGALLFDSGETAEATRLKRTARRRYTRRKNRICYLQEIFSNEMAKVDDSFFHRLEESFLVEEDKKHERHPIFGNIVDEVAYHEKYPTIYHLRKKLVDSTDKADLRLIYLALAHMIKFRGHFLIEGDLNPDNSDVDKLFIQLVQTYNQLFEENPINASGVDAKAILSARLSKSRRLENLIAQLPGEKKNGLFGNLIALSLGLTPNFKSNFDLAEDAKLQLSKDTYDDDLDNLLAQIGDQYADLFLAAKNLSDAILLSDILRVNTEITKAPLSASMIKRYDEHHQDLTLLKALVRQQLPEKYKEIFFDQSKNGYAGYIDGGASQEEFYKFIKPILEKMDGTEELLVKLNREDLLRKQRTFDNGSIPHQIHLGELHAILRRQEDFYPFLKDNREKIEKILTFRIPYYVGPLARGNSRFAWMTRKSEETITPWNFEEVVDKGASAQSFIERMTNFDKNLPNEKVLPKHSLLYEYFTVYNELTKVKYVTEGMRKPAFLSGEQKKAIVDLLFKTNRKVTVKQLKEDYFKKIECFDSVEISGVEDRFNASLGTYHDLLKIIKDKDFLDNEENEDILEDIVLTLTLFEDREMIEERLKTYAHLFDDKVMKQLKRRRYTGWGRLSRKLINGIRDKQSGKTILDFLKSDGFANRNFMQLIHDDSLTFKEDIQKAQVSGQGDSLHEHIANLAGSPAIKKGILQTVKVVDELVKVMGRHKPENIVIEMARENQTTQKGQKNSRERMKRIEEGIKELGSQILKEHPVENTQLQNEKLYLYYLQNGRDMYVDQELDINRLSDYDVDHIVPQSFLKDDSIDNKVLTRSDKARGKSDNVPSEEVVKKMKNYWRQLLNAKLITQRKFDNLTKAERGGLSELDKAGFIKRQLVETRQITKHVAQILDSRMNTKYDENDKLIREVKVITLKSKLVSDFRKDFQFYKVREINNYHHAHDAYLNAVVGTALIKKYPKLESEFVYGDYKVYDVRKMIAKSEQEIGKATAKYFFYSNIMNFFKTEITLANGEIRKRPLIETNGETGEIVWDKGRDFATVRKVLSMPQVNIVKKTEVQTGGFSKESILPKRNSDKLIARKKDWDPKKYGGFDSPTVAYSVLVVAKVEKGKSKKLKSVKELLGITIMERSSFEKNPIDFLEAKGYKEVKKDLIIKLPKYSLFELENGRKRMLASAGELQKGNELALPSKYVNFLYLASHYEKLKGSPEDNEQKQLFVEQHKHYLDEIIEQISEFSKRVILADANLDKVLSAYNKHRDKPIREQAENIIHLFTLTNLGAPAAFKYFDTTIDRKRYTSTKEVLDATLIHQSITGLYETRIDLSQLGGDGGGSSPAPEAAAKGGPRSRAIDIPVPHADKISWKITDPVWVDQWPLTYEKTLAAIALVQEQLAAGHIEPTNSPWNTPIFIIKKKSGSWRLLQDLRAVNKVMVPMGALQPGLPSPVAPPLNYHKIVIDLKDCFFTIPLHPEDRPYFAFSVPQINFQSPMPRYQWKVLPQGMANSPTLCQKFVAAAIAPVRSQWPEAYILHYMDDILLACDSAEAAKACYAHIISCLTSYGLKIAPDKVQVSEPFSYLGFELHHQQVFTPRVCLKTDHLKTLNDFQKLLGDIQWLRPYLKLPTSALVPLNNILKPDPNPLSVRALTPEAKQSLALINKAIQNQSVQQISYNLPLVLLLLPTPHTPTAVFWQPNGTDPTKNGSPLLWLHLPASPSKVLLTYPSLLAMLIIKGRYTGRQLFGRDPHSIIIPYTQDQLTWLLQTSDEWAIALSSFTGDIDNHYPSDPVIQFAKLHQFIFPKITKCAPIPQATLVFTDGSSNGIAAYVIDNQPISIKSPYLSAQLVELYAILQVFTVLAHQPFNLYTDSAYIAQSVPLLETVPFIKSSTNATPLFSKLQQLILNRQHPFFIGHLRAHLNLPGPLAEGNALADAATQIFPIISDAGKRTADGSEFEKRTADGSEFESPKKKAKVE

SEQ ID NO: 745 - protein, 2032 aa, synthetic construct
MPAAKRVKLDGGDKKYSIGLDIGTNSVGWAVITDEYKVPSKKFKVLGNTDRHSIKKNLIGALLFDSGETAEATRLKRTARRRYTRRKNRICYLQEIFSNEMAKVDDSFFHRLEESFLVEEDKKHERHPIFGNIVDEVAYHEKYPTIYHLRKKLVDSTDKADLRLIYLALAHMIKFRGHFLIEGDLNPDNSDVDKLFIQLVQTYNQLFEENPINASGVDAKAILSARLSKSRRLENLIAQLPGEKKNGLFGNLIALSLGLTPNFKSNFDLAEDAKLQLSKDTYDDDLDNLLAQIGDQYADLFLAAKNLSDAILLSDILRVNTEITKAPLSASMIKRYDEHHQDLTLLKALVRQQLPEKYKEIFFDQSKNGYAGYIDGGASQEEFYKFIKPILEKMDGTEELLVKLNREDLLRKQRTFDNGSIPHQIHLGELHAILRRQEDFYPFLKDNREKIEKILTFRIPYYVGPLARGNSRFAWMTRKSEETITPWNFEEVVDKGASAQSFIERMTNFDKNLPNEKVLPKHSLLYEYFTVYNELTKVKYVTEGMRKPAFLSGEQKKAIVDLLFKTNRKVTVKQLKEDYFKKIECFDSVEISGVEDRFNASLGTYHDLLKIIKDKDFLDNEENEDILEDIVLTLTLFEDREMIEERLKTYAHLFDDKVMKQLKRRRYTGWGRLSRKLINGIRDKQSGKTILDFLKSDGFANRNFMQLIHDDSLTFKEDIQKAQVSGQGDSLHEHIANLAGSPAIKKGILQTVKVVDELVKVMGRHKPENIVIEMARENQTTQKGQKNSRERMKRIEEGIKELGSQILKEHPVENTQLQNEKLYLYYLQNGRDMYVDQELDINRLSDYDVDHIVPQSFLKDDSIDNKVLTRSDKARGKSDNVPSEEVVKKMKNYWRQLLNAKLITQRKFDNLTKAERGGLSELDKAGFIKRQLVETRQITKHVAQILDSRMNTKYDENDKLIREVKVITLKSKLVSDFRKDFQFYKVREINNYHHAHDAYLNAVVGTALIKKYPKLESEFVYGDYKVYDVRKMIAKSEQEIGKATAKYFFYSNIMNFFKTEITLANGEIRKRPLIETNGETGEIVWDKGRDFATVRKVLSMPQVNIVKKTEVQTGGFSKESILPKRNSDKLIARKKDWDPKKYGGFDSPTVAYSVLVVAKVEKGKSKKLKSVKELLGITIMERSSFEKNPIDFLEAKGYKEVKKDLIIKLPKYSLFELENGRKRMLASAGELQKGNELALPSKYVNFLYLASHYEKLKGSPEDNEQKQLFVEQHKHYLDEIIEQISEFSKRVILADANLDKVLSAYNKHRDKPIREQAENIIHLFTLTNLGAPAAFKYFDTTIDRKRYTSTKEVLDATLIHQSITGLYETRIDLSQLGGDGGSGGSSGGSSGSETPGTSESATPESSGGSSGGSSGGLATAVDILAPQRYADPITWKSDEPVWVDQWPLTQEKLAAAQQLVQEQLQAGHIIESNSPWNTPIFVIKKKSGKWRLLQDLRAVNATMVLMGALQPGLPSPVAIPQGYFKIVIDLKDCFFTIPLQPVDQKRFAFSLPSTNFKQPMKRYQWKVLPQGMANSPTLCQKYVAAAIEPVRKSWAQMYIIHYMDDILIAGKLGEQVLQCFAQLKQALTTTGLQIAPEKVQLQDPYTYLGFQINGPKITNQKAVIRRDKLQTLNDFQKLLGDINWLRPYLHLTTGDLKPLFDILKGDSNPNSPRSLSEAALASLQKVETAIAEQFVTQIDYTQPLTFLIFNTTLTPTGLFWQNNPVMWVHLPASPKKVLLPYYDAIADLIILGRDNSKKYFGLEPSTIIQPYSKSQIHWLMQNTETWPIACASYAGNIDNHYPPNKLIQFCKLHAVVFPRIISKTPLDNALLVFTDGSSTGIAAYTFEKTTVRFKTSHTSAQLVELQALIAVLSAFPHRALNVYTDSAYLAHSIPLLETVSHIKHISDTAKFFLQCQQLIYNRSIPFYLGHIRAHSGLPGPLSQGNHITDLATKVVATTLTTAGKRTADGSEFEKRTADGSEFESPKKKAKVE

SEQ ID NO: 746 - protein, 2045 aa, synthetic construct
MPAAKRVKLDGGDKKYSIGLDIGTNSVGWAVITDEYKVPSKKFKVLGNTDRHSIKKNLIGALLFDSGETAEATRLKRTARRRYTRRKNRICYLQEIFSNEMAKVDDSFFHRLEESFLVEEDKKHERHPIFGNIVDEVAYHEKYPTIYHLRKKLVDSTDKADLRLIYLALAHMIKFRGHFLIEGDLNPDNSDVDKLFIQLVQTYNQLFEENPINASGVDAKAILSARLSKSRRLENLIAQLPGEKKNGLFGNLIALSLGLTPNFKSNFDLAEDAKLQLSKDTYDDDLDNLLAQIGDQYADLFLAAKNLSDAILLSDILRVNTEITKAPLSASMIKRYDEHHQDLTLLKALVRQQLPEKYKEIFFDQSKNGYAGYIDGGASQEEFYKFIKPILEKMDGTEELLVKLNREDLLRKQRTFDNGSIPHQIHLGELHAILRRQEDFYPFLKDNREKIEKILTFRIPYYVGPLARGNSRFAWMTRKSEETITPWNFEEVVDKGASAQSFIERMTNFDKNLPNEKVLPKHSLLYEYFTVYNELTKVKYVTEGMRKPAFLSGEQKKAIVDLLFKTNRKVTVKQLKEDYFKKIECFDSVEISGVEDRFNASLGTYHDLLKIIKDKDFLDNEENEDILEDIVLTLTLFEDREMIEERLKTYAHLFDDKVMKQLKRRRYTGWGRLSRKLINGIRDKQSGKTILDFLKSDGFANRNFMQLIHDDSLTFKEDIQKAQVSGQGDSLHEHIANLAGSPAIKKGILQTVKVVDELVKVMGRHKPENIVIEMARENQTTQKGQKNSRERMKRIEEGIKELGSQILKEHPVENTQLQNEKLYLYYLQNGRDMYVDQELDINRLSDYDVDHIVPQSFLKDDSIDNKVLTRSDKARGKSDNVPSEEVVKKMKNYWRQLLNAKLITQRKFDNLTKAERGGLSELDKAGFIKRQLVETRQITKHVAQILDSRMNTKYDENDKLIREVKVITLKSKLVSDFRKDFQFYKVREINNYHHAHDAYLNAVVGTALIKKYPKLESEFVYGDYKVYDVRKMIAKSEQEIGKATAKYFFYSNIMNFFKTEITLANGEIRKRPLIETNGETGEIVWDKGRDFATVRKVLSMPQVNIVKKTEVQTGGFSKESILPKRNSDKLIARKKDWDPKKYGGFDSPTVAYSVLVVAKVEKGKSKKLKSVKELLGITIMERSSFEKNPIDFLEAKGYKEVKKDLIIKLPKYSLFELENGRKRMLASAGELQKGNELALPSKYVNFLYLASHYEKLKGSPEDNEQKQLFVEQHKHYLDEIIEQISEFSKRVILADANLDKVLSAYNKHRDKPIREQAENIIHLFTLTNLGAPAAFKYFDTTIDRKRYTSTKEVLDATLIHQSITGLYETRIDLSQLGGDGGAEAAAKEAAAKEAAAKEAAAKALEAEAAAKEAAAKEAAAKEAAAKAGGLATAVDILAPQRYADPITWKSDEPVWVDQWPLTQEKLAAAQQLVQEQLQAGHIIESNSPWNTPIFVIKKKSGKWRLLQDLRAVNATMVLMGALQPGLPSPVAIPQGYFKIVIDLKDCFFTIPLQPVDQKRFAFSLPSTNFKQPMKRYQWKVLPQGMANSPTLCQKYVAAAIEPVRKSWAQMYIIHYMDDILIAGKLGEQVLQCFAQLKQALTTTGLQIAPEKVQLQDPYTYLGFQINGPKITNQKAVIRRDKLQTLNDFQKLLGDINWLRPYLHLTTGDLKPLFDILKGDSNPNSPRSLSEAALASLQKVETAIAEQFVTQIDYTQPLTFLIFNTTLTPTGLFWQNNPVMWVHLPASPKKVLLPYYDAIADLIILGRDNSKKYFGLEPSTIIQPYSKSQIHWLMQNTETWPIACASYAGNIDNHYPPNKLIQFCKLHAVVFPRIISKTPLDNALLVFTDGSSTGIAAYTFEKTTVRFKTSHTSAQLVELQALIAVLSAFPHRALNVYTDSAYLAHSIPLLETVSHIKHISDTAKFFLQCQQLIYNRSIPFYLGHIRAHSGLPGPLSQGNHITDLATKVVATTLTTAGKRTADGSEFEKRTADGSEFESPKKKAKVE

SEQ ID NO: 747 - protein, 2029 aa, synthetic construct
MPAAKRVKLDGGDKKYSIGLDIGTNSVGWAVITDEYKVPSKKFKVLGNTDRHSIKKNLIGALLFDSGETAEATRLKRTARRRYTRRKNRICYLQEIFSNEMAKVDDSFFHRLEESFLVEEDKKHERHPIFGNIVDEVAYHEKYPTIYHLRKKLVDSTDKADLRLIYLALAHMIKFRGHFLIEGDLNPDNSDVDKLFIQLVQTYNQLFEENPINASGVDAKAILSARLSKSRRLENLIAQLPGEKKNGLFGNLIALSLGLTPNFKSNFDLAEDAKLQLSKDTYDDDLDNLLAQIGDQYADLFLAAKNLSDAILLSDILRVNTEITKAPLSASMIKRYDEHHQDLTLLKALVRQQLPEKYKEIFFDQSKNGYAGYIDGGASQEEFYKFIKPILEKMDGTEELLVKLNREDLLRKQRTFDNGSIPHQIHLGELHAILRRQEDFYPFLKDNREKIEKILTFRIPYYVGPLARGNSRFAWMTRKSEETITPWNFEEVVDKGASAQSFIERMTNFDKNLPNEKVLPKHSLLYEYFTVYNELTKVKYVTEGMRKPAFLSGEQKKAIVDLLFKTNRKVTVKQLKEDYFKKIECFDSVEISGVEDRFNASLGTYHDLLKIIKDKDFLDNEENEDILEDIVLTLTLFEDREMIEERLKTYAHLFDDKVMKQLKRRRYTGWGRLSRKLINGIRDKQSGKTILDFLKSDGFANRNFMQLIHDDSLTFKEDIQKAQVSGQGDSLHEHIANLAGSPAIKKGILQTVKVVDELVKVMGRHKPENIVIEMARENQTTQKGQKNSRERMKRIEEGIKELGSQILKEHPVENTQLQNEKLYLYYLQNGRDMYVDQELDINRLSDYDVDHIVPQSFLKDDSIDNKVLTRSDKARGKSDNVPSEEVVKKMKNYWRQLLNAKLITQRKFDNLTKAERGGLSELDKAGFIKRQLVETRQITKHVAQILDSRMNTKYDENDKLIREVKVITLKSKLVSDFRKDFQFYKVREINNYHHAHDAYLNAVVGTALIKKYPKLESEFVYGDYKVYDVRKMIAKSEQEIGKATAKYFFYSNIMNFFKTEITLANGEIRKRPLIETNGETGEIVWDKGRDFATVRKVLSMPQVNIVKKTEVQTGGFSKESILPKRNSDKLIARKKDWDPKKYGGFDSPTVAYSVLVVAKVEKGKSKKLKSVKELLGITIMERSSFEKNPIDFLEAKGYKEVKKDLIIKLPKYSLFELENGRKRMLASAGELQKGNELALPSKYVNFLYLASHYEKLKGSPEDNEQKQLFVEQHKHYLDEIIEQISEFSKRVILADANLDKVLSAYNKHRDKPIREQAENIIHLFTLTNLGAPAAFKYFDTTIDRKRYTSTKEVLDATLIHQSITGLYETRIDLSQLGGDGGEAAAKEAAAKEAAAKEAAAKEAAAKEAAAKGGLATAVDILAPQRYADPITWKSDEPVWVDQWPLTQEKLAAAQQLVQEQLQAGHIIESNSPWNTPIFVIKKKSGKWRLLQDLRAVNATMVLMGALQPGLPSPVAIPQGYFKIVIDLKDCFFTIPLQPVDQKRFAFSLPSTNFKQPMKRYQWKVLPQGMANSPTLCQKYVAAAIEPVRKSWAQMYIIHYMDDILIAGKLGEQVLQCFAQLKQALTTTGLQIAPEKVQLQDPYTYLGFQINGPKITNQKAVIRRDKLQTLNDFQKLLGDINWLRPYLHLTTGDLKPLFDILKGDSNPNSPRSLSEAALASLQKVETAIAEQFVTQIDYTQPLTFLIFNTTLTPTGLFWQNNPVMWVHLPASPKKVLLPYYDAIADLIILGRDNSKKYFGLEPSTIIQPYSKSQIHWLMQNTETWPIACASYAGNIDNHYPPNKLIQFCKLHAVVFPRIISKTPLDNALLVFTDGSSTGIAAYTFEKTTVRFKTSHTSAQLVELQALIAVLSAFPHRALNVYTDSAYLAHSIPLLETVSHIKHISDTAKFFLQCQQLIYNRSIPFYLGHIRAHSGLPGPLSQGNHITDLATKVVATTLTTAGKRTADGSEFEKRTADGSEFESPKKKAKVE

SEQ ID NO: 748 - protein, 2024 aa, synthetic construct
MPAAKRVKLDGGDKKYSIGLDIGTNSVGWAVITDEYKVPSKKFKVLGNTDRHSIKKNLIGALLFDSGETAEATRLKRTARRRYTRRKNRICYLQEIFSNEMAKVDDSFFHRLEESFLVEEDKKHERHPIFGNIVDEVAYHEKYPTIYHLRKKLVDSTDKADLRLIYLALAHMIKFRGHFLIEGDLNPDNSDVDKLFIQLVQTYNQLFEENPINASGVDAKAILSARLSKSRRLENLIAQLPGEKKNGLFGNLIALSLGLTPNFKSNFDLAEDAKLQLSKDTYDDDLDNLLAQIGDQYADLFLAAKNLSDAILLSDILRVNTEITKAPLSASMIKRYDEHHQDLTLLKALVRQQLPEKYKEIFFDQSKNGYAGYIDGGASQEEFYKFIKPILEKMDGTEELLVKLNREDLLRKQRTFDNGSIPHQIHLGELHAILRRQEDFYPFLKDNREKIEKILTFRIPYYVGPLARGNSRFAWMTRKSEETITPWNFEEVVDKGASAQSFIERMTNFDKNLPNEKVLPKHSLLYEYFTVYNELTKVKYVTEGMRKPAFLSGEQKKAIVDLLFKTNRKVTVKQLKEDYFKKIECFDSVEISGVEDRFNASLGTYHDLLKIIKDKDFLDNEENEDILEDIVLTLTLFEDREMIEERLKTYAHLFDDKVMKQLKRRRYTGWGRLSRKLINGIRDKQSGKTILDFLKSDGFANRNFMQLIHDDSLTFKEDIQKAQVSGQGDSLHEHIANLAGSPAIKKGILQTVKVVDELVKVMGRHKPENIVIEMARENQTTQKGQKNSRERMKRIEEGIKELGSQILKEHPVENTQLQNEKLYLYYLQNGRDMYVDQELDINRLSDYDVDHIVPQSFLKDDSIDNKVLTRSDKARGKSDNVPSEEVVKKMKNYWRQLLNAKLITQRKFDNLTKAERGGLSELDKAGFIKRQLVETRQITKHVAQILDSRMNTKYDENDKLIREVKVITLKSKLVSDFRKDFQFYKVREINNYHHAHDAYLNAVVGTALIKKYPKLESEFVYGDYKVYDVRKMIAKSEQEIGKATAKYFFYSNIMNFFKTEITLANGEIRKRPLIETNGETGEIVWDKGRDFATVRKVLSMPQVNIVKKTEVQTGGFSKESILPKRNSDKLIARKKDWDPKKYGGFDSPTVAYSVLVVAKVEKGKSKKLKSVKELLGITIMERSSFEKNPIDFLEAKGYKEVKKDLIIKLPKYSLFELENGRKRMLASAGELQKGNELALPSKYVNFLYLASHYEKLKGSPEDNEQKQLFVEQHKHYLDEIIEQISEFSKRVILADANLDKVLSAYNKHRDKPIREQAENIIHLFTLTNLGAPAAFKYFDTTIDRKRYTSTKEVLDATLIHQSITGLYETRIDLSQLGGDGGEAAAKEAAAKEAAAKEAAAKEAAAKGGLATAVDILAPQRYADPITWKSDEPVWVDQWPLTQEKLAAAQQLVQEQLQAGHIIESNSPWNTPIFVIKKKSGKWRLLQDLRAVNATMVLMGALQPGLPSPVAIPQGYFKIVIDLKDCFFTIPLQPVDQKRFAFSLPSTNFKQPMKRYQWKVLPQGMANSPTLCQKYVAAAIEPVRKSWAQMYIIHYMDDILIAGKLGEQVLQCFAQLKQALTTTGLQIAPEKVQLQDPYTYLGFQINGPKITNQKAVIRRDKLQTLNDFQKLLGDINWLRPYLHLTTGDLKPLFDILKGDSNPNSPRSLSEAALASLQKVETAIAEQFVTQIDYTQPLTFLIFNTTLTPTGLFWQNNPVMWVHLPASPKKVLLPYYDAIADLIILGRDNSKKYFGLEPSTIIQPYSKSQIHWLMQNTETWPIACASYAGNIDNHYPPNKLIQFCKLHAVVFPRIISKTPLDNALLVFTDGSSTGIAAYTFEKTTVRFKTSHTSAQLVELQALIAVLSAFPHRALNVYTDSAYLAHSIPLLETVSHIKHISDTAKFFLQCQQLIYNRSIPFYLGHIRAHSGLPGPLSQGNHITDLATKVVATTLTTAGKRTADGSEFEKRTADGSEFESPKKKAKVE

SEQ ID NO: 749 - protein, 2012 aa, synthetic construct
MPAAKRVKLDGGDKKYSIGLDIGTNSVGWAVITDEYKVPSKKFKVLGNTDRHSIKKNLIGALLFDSGETAEATRLKRTARRRYTRRKNRICYLQEIFSNEMAKVDDSFFHRLEESFLVEEDKKHERHPIFGNIVDEVAYHEKYPTIYHLRKKLVDSTDKADLRLIYLALAHMIKFRGHFLIEGDLNPDNSDVDKLFIQLVQTYNQLFEENPINASGVDAKAILSARLSKSRRLENLIAQLPGEKKNGLFGNLIALSLGLTPNFKSNFDLAEDAKLQLSKDTYDDDLDNLLAQIGDQYADLFLAAKNLSDAILLSDILRVNTEITKAPLSASMIKRYDEHHQDLTLLKALVRQQLPEKYKEIFFDQSKNGYAGYIDGGASQEEFYKFIKPILEKMDGTEELLVKLNREDLLRKQRTFDNGSIPHQIHLGELHAILRRQEDFYPFLKDNREKIEKILTFRIPYYVGPLARGNSRFAWMTRKSEETITPWNFEEVVDKGASAQSFIERMTNFDKNLPNEKVLPKHSLLYEYFTVYNELTKVKYVTEGMRKPAFLSGEQKKAIVDLLFKTNRKVTVKQLKEDYFKKIECFDSVEISGVEDRFNASLGTYHDLLKIIKDKDFLDNEENEDILEDIVLTLTLFEDREMIEERLKTYAHLFDDKVMKQLKRRRYTGWGRLSRKLINGIRDKQSGKTILDFLKSDGFANRNFMQLIHDDSLTFKEDIQKAQVSGQGDSLHEHIANLAGSPAIKKGILQTVKVVDELVKVMGRHKPENIVIEMARENQTTQKGQKNSRERMKRIEEGIKELGSQILKEHPVENTQLQNEKLYLYYLQNGRDMYVDQELDINRLSDYDVDHIVPQSFLKDDSIDNKVLTRSDKARGKSDNVPSEEVVKKMKNYWRQLLNAKLITQRKFDNLTKAERGGLSELDKAGFIKRQLVETRQITKHVAQILDSRMNTKYDENDKLIREVKVITLKSKLVSDFRKDFQFYKVREINNYHHAHDAYLNAVVGTALIKKYPKLESEFVYGDYKVYDVRKMIAKSEQEIGKATAKYFFYSNIMNFFKTEITLANGEIRKRPLIETNGETGEIVWDKGRDFATVRKVLSMPQVNIVKKTEVQTGGFSKESILPKRNSDKLIARKKDWDPKKYGGFDSPTVAYSVLVVAKVEKGKSKKLKSVKELLGITIMERSSFEKNPIDFLEAKGYKEVKKDLIIKLPKYSLFELENGRKRMLASAGELQKGNELALPSKYVNFLYLASHYEKLKGSPEDNEQKQLFVEQHKHYLDEIIEQISEFSKRVILADANLDKVLSAYNKHRDKPIREQAENIIHLFTLTNLGAPAAFKYFDTTIDRKRYTSTKEVLDATLIHQSITGLYETRIDLSQLGGDGGPAPAPAPAPAPAPGGLATAVDILAPQRYADPITWKSDEPVWVDQWPLTQEKLAAAQQLVQEQLQAGHIIESNSPWNTPIFVIKKKSGKWRLLQDLRAVNATMVLMGALQPGLPSPVAIPQGYFKIVIDLKDCFFTIPLQPVDQKRFAFSLPSTNFKQPMKRYQWKVLPQGMANSPTLCQKYVAAAIEPVRKSWAQMYIIHYMDDILIAGKLGEQVLQCFAQLKQALTTTGLQIAPEKVQLQDPYTYLGFQINGPKITNQKAVIRRDKLQTLNDFQKLLGDINWLRPYLHLTTGDLKPLFDILKGDSNPNSPRSLSEAALASLQKVETAIAEQFVTQIDYTQPLTFLIFNTTLTPTGLFWQNNPVMWVHLPASPKKVLLPYYDAIADLIILGRDNSKKYFGLEPSTIIQPYSKSQIHWLMQNTETWPIACASYAGNIDNHYPPNKLIQFCKLHAVVFPRIISKTPLDNALLVFTDGSSTGIAAYTFEKTTVRFKTSHTSAQLVELQALIAVLSAFPHRALNVYTDSAYLAHSIPLLETVSHIKHISDTAKFFLQCQQLIYNRSIPFYLGHIRAHSGLPGPLSQGNHITDLATKVVATTLTTAGKRTADGSEFEKRTADGSEFESPKKKAKVE

SEQ ID NO: 750 - protein, 2010 aa, synthetic construct
MPAAKRVKLDGGDKKYSIGLDIGTNSVGWAVITDEYKVPSKKFKVLGNTDRHSIKKNLIGALLFDSGETAEATRLKRTARRRYTRRKNRICYLQEIFSNEMAKVDDSFFHRLEESFLVEEDKKHERHPIFGNIVDEVAYHEKYPTIYHLRKKLVDSTDKADLRLIYLALAHMIKFRGHFLIEGDLNPDNSDVDKLFIQLVQTYNQLFEENPINASGVDAKAILSARLSKSRRLENLIAQLPGEKKNGLFGNLIALSLGLTPNFKSNFDLAEDAKLQLSKDTYDDDLDNLLAQIGDQYADLFLAAKNLSDAILLSDILRVNTEITKAPLSASMIKRYDEHHQDLTLLKALVRQQLPEKYKEIFFDQSKNGYAGYIDGGASQEEFYKFIKPILEKMDGTEELLVKLNREDLLRKQRTFDNGSIPHQIHLGELHAILRRQEDFYPFLKDNREKIEKILTFRIPYYVGPLARGNSRFAWMTRKSEETITPWNFEEVVDKGASAQSFIERMTNFDKNLPNEKVLPKHSLLYEYFTVYNELTKVKYVTEGMRKPAFLSGEQKKAIVDLLFKTNRKVTVKQLKEDYFKKIECFDSVEISGVEDRFNASLGTYHDLLKIIKDKDFLDNEENEDILEDIVLTLTLFEDREMIEERLKTYAHLFDDKVMKQLKRRRYTGWGRLSRKLINGIRDKQSGKTILDFLKSDGFANRNFMQLIHDDSLTFKEDIQKAQVSGQGDSLHEHIANLAGSPAIKKGILQTVKVVDELVKVMGRHKPENIVIEMARENQTTQKGQKNSRERMKRIEEGIKELGSQILKEHPVENTQLQNEKLYLYYLQNGRDMYVDQELDINRLSDYDVDHIVPQSFLKDDSIDNKVLTRSDKARGKSDNVPSEEVVKKMKNYWRQLLNAKLITQRKFDNLTKAERGGLSELDKAGFIKRQLVETRQITKHVAQILDSRMNTKYDENDKLIREVKVITLKSKLVSDFRKDFQFYKVREINNYHHAHDAYLNAVVGTALIKKYPKLESEFVYGDYKVYDVRKMIAKSEQEIGKATAKYFFYSNIMNFFKTEITLANGEIRKRPLIETNGETGEIVWDKGRDFATVRKVLSMPQVNIVKKTEVQTGGFSKESILPKRNSDKLIARKKDWDPKKYGGFDSPTVAYSVLVVAKVEKGKSKKLKSVKELLGITIMERSSFEKNPIDFLEAKGYKEVKKDLIIKLPKYSLFELENGRKRMLASAGELQKGNELALPSKYVNFLYLASHYEKLKGSPEDNEQKQLFVEQHKHYLDEIIEQISEFSKRVILADANLDKVLSAYNKHRDKPIREQAENIIHLFTLTNLGAPAAFKYFDTTIDRKRYTSTKEVLDATLIHQSITGLYETRIDLSQLGGDGGPAPAPAPAPAPGGLATAVDILAPQRYADPITWKSDEPVWVDQWPLTQEKLAAAQQLVQEQLQAGHIIESNSPWNTPIFVIKKKSGKWRLLQDLRAVNATMVLMGALQPGLPSPVAIPQGYFKIVIDLKDCFFTIPLQPVDQKRFAFSLPSTNFKQPMKRYQWKVLPQGMANSPTLCQKYVAAAIEPVRKSWAQMYIIHYMDDILIAGKLGEQVLQCFAQLKQALTTTGLQIAPEKVQLQDPYTYLGFQINGPKITNQKAVIRRDKLQTLNDFQKLLGDINWLRPYLHLTTGDLKPLFDILKGDSNPNSPRSLSEAALASLQKVETAIAEQFVTQIDYTQPLTFLIFNTTLTPTGLFWQNNPVMWVHLPASPKKVLLPYYDAIADLIILGRDNSKKYFGLEPSTIIQPYSKSQIHWLMQNTETWPIACASYAGNIDNHYPPNKLIQFCKLHAVVFPRIISKTPLDNALLVFTDGSSTGIAAYTFEKTTVRFKTSHTSAQLVELQALIAVLSAFPHRALNVYTDSAYLAHSIPLLETVSHIKHISDTAKFFLQCQQLIYNRSIPFYLGHIRAHSGLPGPLSQGNHITDLATKVVATTLTTAGKRTADGSEFEKRTADGSEFESPKKKAKVE

SEQ ID NO: 751 - protein, 2014 aa, synthetic construct
MPAAKRVKLDGGDKKYSIGLDIGTNSVGWAVITDEYKVPSKKFKVLGNTDRHSIKKNLIGALLFDSGETAEATRLKRTARRRYTRRKNRICYLQEIFSNEMAKVDDSFFHRLEESFLVEEDKKHERHPIFGNIVDEVAYHEKYPTIYHLRKKLVDSTDKADLRLIYLALAHMIKFRGHFLIEGDLNPDNSDVDKLFIQLVQTYNQLFEENPINASGVDAKAILSARLSKSRRLENLIAQLPGEKKNGLFGNLIALSLGLTPNFKSNFDLAEDAKLQLSKDTYDDDLDNLLAQIGDQYADLFLAAKNLSDAILLSDILRVNTEITKAPLSASMIKRYDEHHQDLTLLKALVRQQLPEKYKEIFFDQSKNGYAGYIDGGASQEEFYKFIKPILEKMDGTEELLVKLNREDLLRKQRTFDNGSIPHQIHLGELHAILRRQEDFYPFLKDNREKIEKILTFRIPYYVGPLARGNSRFAWMTRKSEETITPWNFEEVVDKGASAQSFIERMTNFDKNLPNEKVLPKHSLLYEYFTVYNELTKVKYVTEGMRKPAFLSGEQKKAIVDLLFKTNRKVTVKQLKEDYFKKIECFDSVEISGVEDRFNASLGTYHDLLKIIKDKDFLDNEENEDILEDIVLTLTLFEDREMIEERLKTYAHLFDDKVMKQLKRRRYTGWGRLSRKLINGIRDKQSGKTILDFLKSDGFANRNFMQLIHDDSLTFKEDIQKAQVSGQGDSLHEHIANLAGSPAIKKGILQTVKVVDELVKVMGRHKPENIVIEMARENQTTQKGQKNSRERMKRIEEGIKELGSQILKEHPVENTQLQNEKLYLYYLQNGRDMYVDQELDINRLSDYDVDHIVPQSFLKDDSIDNKVLTRSDKARGKSDNVPSEEVVKKMKNYWRQLLNAKLITQRKFDNLTKAERGGLSELDKAGFIKRQLVETRQITKHVAQILDSRMNTKYDENDKLIREVKVITLKSKLVSDFRKDFQFYKVREINNYHHAHDAYLNAVVGTALIKKYPKLESEFVYGDYKVYDVRKMIAKSEQEIGKATAKYFFYSNIMNFFKTEITLANGEIRKRPLIETNGETGEIVWDKGRDFATVRKVLSMPQVNIVKKTEVQTGGFSKESILPKRNSDKLIARKKDWDPKKYGGFDSPTVAYSVLVVAKVEKGKSKKLKSVKELLGITIMERSSFEKNPIDFLEAKGYKEVKKDLIIKLPKYSLFELENGRKRMLASAGELQKGNELALPSKYVNFLYLASHYEKLKGSPEDNEQKQLFVEQHKHYLDEIIEQISEFSKRVILADANLDKVLSAYNKHRDKPIREQAENIIHLFTLTNLGAPAAFKYFDTTIDRKRYTSTKEVLDATLIHQSITGLYETRIDLSQLGGDGGGSSGSSGSSGSSGSSGGLATAVDILAPQRYADPITWKSDEPVWVDQWPLTQEKLAAAQQLVQEQLQAGHIIESNSPWNTPIFVIKKKSGKWRLLQDLRAVNATMVLMGALQPGLPSPVAIPQGYFKIVIDLKDCFFTIPLQPVDQKRFAFSLPSTNFKQPMKRYQWKVLPQGMANSPTLCQKYVAAAIEPVRKSWAQMYIIHYMDDILIAGKLGEQVLQCFAQLKQALTTTGLQIAPEKVQLQDPYTYLGFQINGPKITNQKAVIRRDKLQTLNDFQKLLGDINWLRPYLHLTTGDLKPLFDILKGDSNPNSPRSLSEAALASLQKVETAIAEQFVTQIDYTQPLTFLIFNTTLTPTGLFWQNNPVMWVHLPASPKKVLLPYYDAIADLIILGRDNSKKYFGLEPSTIIQPYSKSQIHWLMQNTETWPIACASYAGNIDNHYPPNKLIQFCKLHAVVFPRIISKTPLDNALLVFTDGSSTGIAAYTFEKTTVRFKTSHTSAQLVELQALIAVLSAFPHRALNVYTDSAYLAHSIPLLETVSHIKHISDTAKFFLQCQQLIYNRSIPFYLGHIRAHSGLPGPLSQGNHITDLATKVVATTLTTAGKRTADGSEFEKRTADGSEFESPKKKAKVE

SEQ ID NO: 752 - protein, 2015 aa, synthetic construct
MPAAKRVKLDGGDKKYSIGLDIGTNSVGWAVITDEYKVPSKKFKVLGNTDRHSIKKNLIGALLFDSGETAEATRLKRTARRRYTRRKNRICYLQEIFSNEMAKVDDSFFHRLEESFLVEEDKKHERHPIFGNIVDEVAYHEKYPTIYHLRKKLVDSTDKADLRLIYLALAHMIKFRGHFLIEGDLNPDNSDVDKLFIQLVQTYNQLFEENPINASGVDAKAILSARLSKSRRLENLIAQLPGEKKNGLFGNLIALSLGLTPNFKSNFDLAEDAKLQLSKDTYDDDLDNLLAQIGDQYADLFLAAKNLSDAILLSDILRVNTEITKAPLSASMIKRYDEHHQDLTLLKALVRQQLPEKYKEIFFDQSKNGYAGYIDGGASQEEFYKFIKPILEKMDGTEELLVKLNREDLLRKQRTFDNGSIPHQIHLGELHAILRRQEDFYPFLKDNREKIEKILTFRIPYYVGPLARGNSRFAWMTRKSEETITPWNFEEVVDKGASAQSFIERMTNFDKNLPNEKVLPKHSLLYEYFTVYNELTKVKYVTEGMRKPAFLSGEQKKAIVDLLFKTNRKVTVKQLKEDYFKKIECFDSVEISGVEDRFNASLGTYHDLLKIIKDKDFLDNEENEDILEDIVLTLTLFEDREMIEERLKTYAHLFDDKVMKQLKRRRYTGWGRLSRKLINGIRDKQSGKTILDFLKSDGFANRNFMQLIHDDSLTFKEDIQKAQVSGQGDSLHEHIANLAGSPAIKKGILQTVKVVDELVKVMGRHKPENIVIEMARENQTTQKGQKNSRERMKRIEEGIKELGSQILKEHPVENTQLQNEKLYLYYLQNGRDMYVDQELDINRLSDYDVDHIVPQSFLKDDSIDNKVLTRSDKARGKSDNVPSEEVVKKMKNYWRQLLNAKLITQRKFDNLTKAERGGLSELDKAGFIKRQLVETRQITKHVAQILDSRMNTKYDENDKLIREVKVITLKSKLVSDFRKDFQFYKVREINNYHHAHDAYLNAVVGTALIKKYPKLESEFVYGDYKVYDVRKMIAKSEQEIGKATAKYFFYSNIMNFFKTEITLANGEIRKRPLIETNGETGEIVWDKGRDFATVRKVLSMPQVNIVKKTEVQTGGFSKESILPKRNSDKLIARKKDWDPKKYGGFDSPTVAYSVLVVAKVEKGKSKKLKSVKELLGITIMERSSFEKNPIDFLEAKGYKEVKKDLIIKLPKYSLFELENGRKRMLASAGELQKGNELALPSKYVNFLYLASHYEKLKGSPEDNEQKQLFVEQHKHYLDEIIEQISEFSKRVILADANLDKVLSAYNKHRDKPIREQAENIIHLFTLTNLGAPAAFKYFDTTIDRKRYTSTKEVLDATLIHQSITGLYETRIDLSQLGGDGGSGSETPGTSESATPESGGLATAVDILAPQRYADPITWKSDEPVWVDQWPLTQEKLAAAQQLVQEQLQAGHIIESNSPWNTPIFVIKKKSGKWRLLQDLRAVNATMVLMGALQPGLPSPVAIPQGYFKIVIDLKDCFFTIPLQPVDQKRFAFSLPSTNFKQPMKRYQWKVLPQGMANSPTLCQKYVAAAIEPVRKSWAQMYIIHYMDDILIAGKLGEQVLQCFAQLKQALTTTGLQIAPEKVQLQDPYTYLGFQINGPKITNQKAVIRRDKLQTLNDFQKLLGDINWLRPYLHLTTGDLKPLFDILKGDSNPNSPRSLSEAALASLQKVETAIAEQFVTQIDYTQPLTFLIFNTTLTPTGLFWQNNPVMWVHLPASPKKVLLPYYDAIADLIILGRDNSKKYFGLEPSTIIQPYSKSQIHWLMQNTETWPIACASYAGNIDNHYPPNKLIQFCKLHAVVFPRIISKTPLDNALLVFTDGSSTGIAAYTFEKTTVRFKTSHTSAQLVELQALIAVLSAFPHRALNVYTDSAYLAHSIPLLETVSHIKHISDTAKFFLQCQQLIYNRSIPFYLGHIRAHSGLPGPLSQGNHITDLATKVVATTLTTAGKRTADGSEFEKRTADGSEFESPKKKAKVE

SEQ ID NO: 753 - protein, 2010 aa, synthetic construct
MPAAKRVKLDGGDKKYSIGLDIGTNSVGWAVITDEYKVPSKKFKVLGNTDRHSIKKNLIGALLFDSGETAEATRLKRTARRRYTRRKNRICYLQEIFSNEMAKVDDSFFHRLEESFLVEEDKKHERHPIFGNIVDEVAYHEKYPTIYHLRKKLVDSTDKADLRLIYLALAHMIKFRGHFLIEGDLNPDNSDVDKLFIQLVQTYNQLFEENPINASGVDAKAILSARLSKSRRLENLIAQLPGEKKNGLFGNLIALSLGLTPNFKSNFDLAEDAKLQLSKDTYDDDLDNLLAQIGDQYADLFLAAKNLSDAILLSDILRVNTEITKAPLSASMIKRYDEHHQDLTLLKALVRQQLPEKYKEIFFDQSKNGYAGYIDGGASQEEFYKFIKPILEKMDGTEELLVKLNREDLLRKQRTFDNGSIPHQIHLGELHAILRRQEDFYPFLKDNREKIEKILTFRIPYYVGPLARGNSRFAWMTRKSEETITPWNFEEVVDKGASAQSFIERMTNFDKNLPNEKVLPKHSLLYEYFTVYNELTKVKYVTEGMRKPAFLSGEQKKAIVDLLFKTNRKVTVKQLKEDYFKKIECFDSVEISGVEDRFNASLGTYHDLLKIIKDKDFLDNEENEDILEDIVLTLTLFEDREMIEERLKTYAHLFDDKVMKQLKRRRYTGWGRLSRKLINGIRDKQSGKTILDFLKSDGFANRNFMQLIHDDSLTFKEDIQKAQVSGQGDSLHEHIANLAGSPAIKKGILQTVKVVDELVKVMGRHKPENIVIEMARENQTTQKGQKNSRERMKRIEEGIKELGSQILKEHPVENTQLQNEKLYLYYLQNGRDMYVDQELDINRLSDYDVDHIVPQSFLKDDSIDNKVLTRSDKARGKSDNVPSEEVVKKMKNYWRQLLNAKLITQRKFDNLTKAERGGLSELDKAGFIKRQLVETRQITKHVAQILDSRMNTKYDENDKLIREVKVITLKSKLVSDFRKDFQFYKVREINNYHHAHDAYLNAVVGTALIKKYPKLESEFVYGDYKVYDVRKMIAKSEQEIGKATAKYFFYSNIMNFFKTEITLANGEIRKRPLIETNGETGEIVWDKGRDFATVRKVLSMPQVNIVKKTEVQTGGFSKESILPKRNSDKLIARKKDWDPKKYGGFDSPTVAYSVLVVAKVEKGKSKKLKSVKELLGITIMERSSFEKNPIDFLEAKGYKEVKKDLIIKLPKYSLFELENGRKRMLASAGELQKGNELALPSKYVNFLYLASHYEKLKGSPEDNEQKQLFVEQHKHYLDEIIEQISEFSKRVILADANLDKVLSAYNKHRDKPIREQAENIIHLFTLTNLGAPAAFKYFDTTIDRKRYTSTKEVLDATLIHQSITGLYETRIDLSQLGGDGGGSSPAPEAAAKGGLATAVDILAPQRYADPITWKSDEPVWVDQWPLTQEKLAAAQQLVQEQLQAGHIIESNSPWNTPIFVIKKKSGKWRLLQDLRAVNATMVLMGALQPGLPSPVAIPQGYFKIVIDLKDCFFTIPLQPVDQKRFAFSLPSTNFKQPMKRYQWKVLPQGMANSPTLCQKYVAAAIEPVRKSWAQMYIIHYMDDILIAGKLGEQVLQCFAQLKQALTTTGLQIAPEKVQLQDPYTYLGFQINGPKITNQKAVIRRDKLQTLNDFQKLLGDINWLRPYLHLTTGDLKPLFDILKGDSNPNSPRSLSEAALASLQKVETAIAEQFVTQIDYTQPLTFLIFNTTLTPTGLFWQNNPVMWVHLPASPKKVLLPYYDAIADLIILGRDNSKKYFGLEPSTIIQPYSKSQIHWLMQNTETWPIACASYAGNIDNHYPPNKLIQFCKLHAVVFPRIISKTPLDNALLVFTDGSSTGIAAYTFEKTTVRFKTSHTSAQLVELQALIAVLSAFPHRALNVYTDSAYLAHSIPLLETVSHIKHISDTAKFFLQCQQLIYNRSIPFYLGHIRAHSGLPGPLSQGNHITDLATKVVATTLTTAGKRTADGSEFEKRTADGSEFESPKKKAKVE

SEQ ID NO: 754 - protein, 2010 aa, synthetic construct
MPAAKRVKLDGGDKKYSIGLDIGTNSVGWAVITDEYKVPSKKFKVLGNTDRHSIKKNLIGALLFDSGETAEATRLKRTARRRYTRRKNRICYLQEIFSNEMAKVDDSFFHRLEESFLVEEDKKHERHPIFGNIVDEVAYHEKYPTIYHLRKKLVDSTDKADLRLIYLALAHMIKFRGHFLIEGDLNPDNSDVDKLFIQLVQTYNQLFEENPINASGVDAKAILSARLSKSRRLENLIAQLPGEKKNGLFGNLIALSLGLTPNFKSNFDLAEDAKLQLSKDTYDDDLDNLLAQIGDQYADLFLAAKNLSDAILLSDILRVNTEITKAPLSASMIKRYDEHHQDLTLLKALVRQQLPEKYKEIFFDQSKNGYAGYIDGGASQEEFYKFIKPILEKMDGTEELLVKLNREDLLRKQRTFDNGSIPHQIHLGELHAILRRQEDFYPFLKDNREKIEKILTFRIPYYVGPLARGNSRFAWMTRKSEETITPWNFEEVVDKGASAQSFIERMTNFDKNLPNEKVLPKHSLLYEYFTVYNELTKVKYVTEGMRKPAFLSGEQKKAIVDLLFKTNRKVTVKQLKEDYFKKIECFDSVEISGVEDRFNASLGTYHDLLKIIKDKDFLDNEENEDILEDIVLTLTLFEDREMIEERLKTYAHLFDDKVMKQLKRRRYTGWGRLSRKLINGIRDKQSGKTILDFLKSDGFANRNFMQLIHDDSLTFKEDIQKAQVSGQGDSLHEHIANLAGSPAIKKGILQTVKVVDELVKVMGRHKPENIVIEMARENQTTQKGQKNSRERMKRIEEGIKELGSQILKEHPVENTQLQNEKLYLYYLQNGRDMYVDQELDINRLSDYDVDHIVPQSFLKDDSIDNKVLTRSDKARGKSDNVPSEEVVKKMKNYWRQLLNAKLITQRKFDNLTKAERGGLSELDKAGFIKRQLVETRQITKHVAQILDSRMNTKYDENDKLIREVKVITLKSKLVSDFRKDFQFYKVREINNYHHAHDAYLNAVVGTALIKKYPKLESEFVYGDYKVYDVRKMIAKSEQEIGKATAKYFFYSNIMNFFKTEITLANGEIRKRPLIETNGETGEIVWDKGRDFATVRKVLSMPQVNIVKKTEVQTGGFSKESILPKRNSDKLIARKKDWDPKKYGGFDSPTVAYSVLVVAKVEKGKSKKLKSVKELLGITIMERSSFEKNPIDFLEAKGYKEVKKDLIIKLPKYSLFELENGRKRMLASAGELQKGNELALPSKYVNFLYLASHYEKLKGSPEDNEQKQLFVEQHKHYLDEIIEQISEFSKRVILADANLDKVLSAYNKHRDKPIREQAENIIHLFTLTNLGAPAAFKYFDTTIDRKRYTSTKEVLDATLIHQSITGLYETRIDLSQLGGDGGGSSGGSEAAAKGGLATAVDILAPQRYADPITWKSDEPVWVDQWPLTQEKLAAAQQLVQEQLQAGHIIESNSPWNTPIFVIKKKSGKWRLLQDLRAVNATMVLMGALQPGLPSPVAIPQGYFKIVIDLKDCFFTIPLQPVDQKRFAFSLPSTNFKQPMKRYQWKVLPQGMANSPTLCQKYVAAAIEPVRKSWAQMYIIHYMDDILIAGKLGEQVLQCFAQLKQALTTTGLQIAPEKVQLQDPYTYLGFQINGPKITNQKAVIRRDKLQTLNDFQKLLGDINWLRPYLHLTTGDLKPLFDILKGDSNPNSPRSLSEAALASLQKVETAIAEQFVTQIDYTQPLTFLIFNTTLTPTGLFWQNNPVMWVHLPASPKKVLLPYYDAIADLIILGRDNSKKYFGLEPSTIIQPYSKSQIHWLMQNTETWPIACASYAGNIDNHYPPNKLIQFCKLHAVVFPRIISKTPLDNALLVFTDGSSTGIAAYTFEKTTVRFKTSHTSAQLVELQALIAVLSAFPHRALNVYTDSAYLAHSIPLLETVSHIKHISDTAKFFLQCQQLIYNRSIPFYLGHIRAHSGLPGPLSQGNHITDLATKVVATTLTTAGKRTADGSEFEKRTADGSEFESPKKKAKVE

SEQ ID NO: 755 - protein, 2008 aa, synthetic construct
MPAAKRVKLDGGDKKYSIGLDIGTNSVGWAVITDEYKVPSKKFKVLGNTDRHSIKKNLIGALLFDSGETAEATRLKRTARRRYTRRKNRICYLQEIFSNEMAKVDDSFFHRLEESFLVEEDKKHERHPIFGNIVDEVAYHEKYPTIYHLRKKLVDSTDKADLRLIYLALAHMIKFRGHFLIEGDLNPDNSDVDKLFIQLVQTYNQLFEENPINASGVDAKAILSARLSKSRRLENLIAQLPGEKKNGLFGNLIALSLGLTPNFKSNFDLAEDAKLQLSKDTYDDDLDNLLAQIGDQYADLFLAAKNLSDAILLSDILRVNTEITKAPLSASMIKRYDEHHQDLTLLKALVRQQLPEKYKEIFFDQSKNGYAGYIDGGASQEEFYKFIKPILEKMDGTEELLVKLNREDLLRKQRTFDNGSIPHQIHLGELHAILRRQEDFYPFLKDNREKIEKILTFRIPYYVGPLARGNSRFAWMTRKSEETITPWNFEEVVDKGASAQSFIERMTNFDKNLPNEKVLPKHSLLYEYFTVYNELTKVKYVTEGMRKPAFLSGEQKKAIVDLLFKTNRKVTVKQLKEDYFKKIECFDSVEISGVEDRFNASLGTYHDLLKIIKDKDFLDNEENEDILEDIVLTLTLFEDREMIEERLKTYAHLFDDKVMKQLKRRRYTGWGRLSRKLINGIRDKQSGKTILDFLKSDGFANRNFMQLIHDDSLTFKEDIQKAQVSGQGDSLHEHIANLAGSPAIKKGILQTVKVVDELVKVMGRHKPENIVIEMARENQTTQKGQKNSRERMKRIEEGIKELGSQILKEHPVENTQLQNEKLYLYYLQNGRDMYVDQELDINRLSDYDVDHIVPQSFLKDDSIDNKVLTRSDKARGKSDNVPSEEVVKKMKNYWRQLLNAKLITQRKFDNLTKAERGGLSELDKAGFIKRQLVETRQITKHVAQILDSRMNTKYDENDKLIREVKVITLKSKLVSDFRKDFQFYKVREINNYHHAHDAYLNAVVGTALIKKYPKLESEFVYGDYKVYDVRKMIAKSEQEIGKATAKYFFYSNIMNFFKTEITLANGEIRKRPLIETNGETGEIVWDKGRDFATVRKVLSMPQVNIVKKTEVQTGGFSKESILPKRNSDKLIARKKDWDPKKYGGFDSPTVAYSVLVVAKVEKGKSKKLKSVKELLGITIMERSSFEKNPIDFLEAKGYKEVKKDLIIKLPKYSLFELENGRKRMLASAGELQKGNELALPSKYVNFLYLASHYEKLKGSPEDNEQKQLFVEQHKHYLDEIIEQISEFSKRVILADANLDKVLSAYNKHRDKPIREQAENIIHLFTLTNLGAPAAFKYFDTTIDRKRYTSTKEVLDATLIHQSITGLYETRIDLSQLGGDGGPAPGGGGGSGGLATAVDILAPQRYADPITWKSDEPVWVDQWPLTQEKLAAAQQLVQEQLQAGHIIESNSPWNTPIFVIKKKSGKWRLLQDLRAVNATMVLMGALQPGLPSPVAIPQGYFKIVIDLKDCFFTIPLQPVDQKRFAFSLPSTNFKQPMKRYQWKVLPQGMANSPTLCQKYVAAAIEPVRKSWAQMYIIHYMDDILIAGKLGEQVLQCFAQLKQALTTTGLQIAPEKVQLQDPYTYLGFQINGPKITNQKAVIRRDKLQTLNDFQKLLGDINWLRPYLHLTTGDLKPLFDILKGDSNPNSPRSLSEAALASLQKVETAIAEQFVTQIDYTQPLTFLIFNTTLTPTGLFWQNNPVMWVHLPASPKKVLLPYYDAIADLIILGRDNSKKYFGLEPSTIIQPYSKSQIHWLMQNTETWPIACASYAGNIDNHYPPNKLIQFCKLHAVVFPRIISKTPLDNALLVFTDGSSTGIAAYTFEKTTVRFKTSHTSAQLVELQALIAVLSAFPHRALNVYTDSAYLAHSIPLLETVSHIKHISDTAKFFLQCQQLIYNRSIPFYLGHIRAHSGLPGPLSQGNHITDLATKVVATTLTTAGKRTADGSEFEKRTADGSEFESPKKKAKVE

SEQ ID NO: 756 - protein, 2005 aa, synthetic construct
MPAAKRVKLDGGDKKYSIGLDIGTNSVGWAVITDEYKVPSKKFKVLGNTDRHSIKKNLIGALLFDSGETAEATRLKRTARRRYTRRKNRICYLQEIFSNEMAKVDDSFFHRLEESFLVEEDKKHERHPIFGNIVDEVAYHEKYPTIYHLRKKLVDSTDKADLRLIYLALAHMIKFRGHFLIEGDLNPDNSDVDKLFIQLVQTYNQLFEENPINASGVDAKAILSARLSKSRRLENLIAQLPGEKKNGLFGNLIALSLGLTPNFKSNFDLAEDAKLQLSKDTYDDDLDNLLAQIGDQYADLFLAAKNLSDAILLSDILRVNTEITKAPLSASMIKRYDEHHQDLTLLKALVRQQLPEKYKEIFFDQSKNGYAGYIDGGASQEEFYKFIKPILEKMDGTEELLVKLNREDLLRKQRTFDNGSIPHQIHLGELHAILRRQEDFYPFLKDNREKIEKILTFRIPYYVGPLARGNSRFAWMTRKSEETITPWNFEEVVDKGASAQSFIERMTNFDKNLPNEKVLPKHSLLYEYFTVYNELTKVKYVTEGMRKPAFLSGEQKKAIVDLLFKTNRKVTVKQLKEDYFKKIECFDSVEISGVEDRFNASLGTYHDLLKIIKDKDFLDNEENEDILEDIVLTLTLFEDREMIEERLKTYAHLFDDKVMKQLKRRRYTGWGRLSRKLINGIRDKQSGKTILDFLKSDGFANRNFMQLIHDDSLTFKEDIQKAQVSGQGDSLHEHIANLAGSPAIKKGILQTVKVVDELVKVMGRHKPENIVIEMARENQTTQKGQKNSRERMKRIEEGIKELGSQILKEHPVENTQLQNEKLYLYYLQNGRDMYVDQELDINRLSDYDVDHIVPQSFLKDDSIDNKVLTRSDKARGKSDNVPSEEVVKKMKNYWRQLLNAKLITQRKFDNLTKAERGGLSELDKAGFIKRQLVETRQITKHVAQILDSRMNTKYDENDKLIREVKVITLKSKLVSDFRKDFQFYKVREINNYHHAHDAYLNAVVGTALIKKYPKLESEFVYGDYKVYDVRKMIAKSEQEIGKATAKYFFYSNIMNFFKTEITLANGEIRKRPLIETNGETGEIVWDKGRDFATVRKVLSMPQVNIVKKTEVQTGGFSKESILPKRNSDKLIARKKDWDPKKYGGFDSPTVAYSVLVVAKVEKGKSKKLKSVKELLGITIMERSSFEKNPIDFLEAKGYKEVKKDLIIKLPKYSLFELENGRKRMLASAGELQKGNELALPSKYVNFLYLASHYEKLKGSPEDNEQKQLFVEQHKHYLDEIIEQISEFSKRVILADANLDKVLSAYNKHRDKPIREQAENIIHLFTLTNLGAPAAFKYFDTTIDRKRYTSTKEVLDATLIHQSITGLYETRIDLSQLGGDGGGGGGGSGGLATAVDILAPQRYADPITWKSDEPVWVDQWPLTQEKLAAAQQLVQEQLQAGHIIESNSPWNTPIFVIKKKSGKWRLLQDLRAVNATMVLMGALQPGLPSPVAIPQGYFKIVIDLKDCFFTIPLQPVDQKRFAFSLPSTNFKQPMKRYQWKVLPQGMANSPTLCQKYVAAAIEPVRKSWAQMYIIHYMDDILIAGKLGEQVLQCFAQLKQALTTTGLQIAPEKVQLQDPYTYLGFQINGPKITNQKAVIRRDKLQTLNDFQKLLGDINWLRPYLHLTTGDLKPLFDILKGDSNPNSPRSLSEAALASLQKVETAIAEQFVTQIDYTQPLTFLIFNTTLTPTGLFWQNNPVMWVHLPASPKKVLLPYYDAIADLIILGRDNSKKYFGLEPSTIIQPYSKSQIHWLMQNTETWPIACASYAGNIDNHYPPNKLIQFCKLHAVVFPRIISKTPLDNALLVFTDGSSTGIAAYTFEKTTVRFKTSHTSAQLVELQALIAVLSAFPHRALNVYTDSAYLAHSIPLLETVSHIKHISDTAKFFLQCQQLIYNRSIPFYLGHIRAHSGLPGPLSQGNHITDLATKVVATTLTTAGKRTADGSEFEKRTADGSEFESPKKKAKVE

SEQ ID NO: 757 - protein, 2014 aa, synthetic construct
MPAAKRVKLDGGDKKYSIGLDIGTNSVGWAVITDEYKVPSKKFKVLGNTDRHSIKKNLIGALLFDSGETAEATRLKRTARRRYTRRKNRICYLQEIFSNEMAKVDDSFFHRLEESFLVEEDKKHERHPIFGNIVDEVAYHEKYPTIYHLRKKLVDSTDKADLRLIYLALAHMIKFRGHFLIEGDLNPDNSDVDKLFIQLVQTYNQLFEENPINASGVDAKAILSARLSKSRRLENLIAQLPGEKKNGLFGNLIALSLGLTPNFKSNFDLAEDAKLQLSKDTYDDDLDNLLAQIGDQYADLFLAAKNLSDAILLSDILRVNTEITKAPLSASMIKRYDEHHQDLTLLKALVRQQLPEKYKEIFFDQSKNGYAGYIDGGASQEEFYKFIKPILEKMDGTEELLVKLNREDLLRKQRTFDNGSIPHQIHLGELHAILRRQEDFYPFLKDNREKIEKILTFRIPYYVGPLARGNSRFAWMTRKSEETITPWNFEEVVDKGASAQSFIERMTNFDKNLPNEKVLPKHSLLYEYFTVYNELTKVKYVTEGMRKPAFLSGEQKKAIVDLLFKTNRKVTVKQLKEDYFKKIECFDSVEISGVEDRFNASLGTYHDLLKIIKDKDFLDNEENEDILEDIVLTLTLFEDREMIEERLKTYAHLFDDKVMKQLKRRRYTGWGRLSRKLINGIRDKQSGKTILDFLKSDGFANRNFMQLIHDDSLTFKEDIQKAQVSGQGDSLHEHIANLAGSPAIKKGILQTVKVVDELVKVMGRHKPENIVIEMARENQTTQKGQKNSRERMKRIEEGIKELGSQILKEHPVENTQLQNEKLYLYYLQNGRDMYVDQELDINRLSDYDVDHIVPQSFLKDDSIDNKVLTRSDKARGKSDNVPSEEVVKKMKNYWRQLLNAKLITQRKFDNLTKAERGGLSELDKAGFIKRQLVETRQITKHVAQILDSRMNTKYDENDKLIREVKVITLKSKLVSDFRKDFQFYKVREINNYHHAHDAYLNAVVGTALIKKYPKLESEFVYGDYKVYDVRKMIAKSEQEIGKATAKYFFYSNIMNFFKTEITLANGEIRKRPLIETNGETGEIVWDKGRDFATVRKVLSMPQVNIVKKTEVQTGGFSKESILPKRNSDKLIARKKDWDPKKYGGFDSPTVAYSVLVVAKVEKGKSKKLKSVKELLGITIMERSSFEKNPIDFLEAKGYKEVKKDLIIKLPKYSLFELENGRKRMLASAGELQKGNELALPSKYVNFLYLASHYEKLKGSPEDNEQKQLFVEQHKHYLDEIIEQISEFSKRVILADANLDKVLSAYNKHRDKPIREQAENIIHLFTLTNLGAPAAFKYFDTTIDRKRYTSTKEVLDATLIHQSITGLYETRIDLSQLGGDGGGSSGSSGSSGSSGSSGGLATAVDILAPQRYADPITWKSDEPVWVDQWPLTQEKLAAAQQLVQEQLQAGHIIESNSPWNTPIFVIKKKSGKWRLLQDLRAVNATMVLMGALQPGLPSPVAPPQGYFKIVIDLKDCFFTIPLQPVDQKRFAFSLPSTNFKQPMKRYQWKVLPQGMANSPTLCQKYVAAAIEPVRKSWAQMYIIHYMDDILIAGKLGEQVLQCFAQLKQALTTTGLQIAPEKVQLQDPYTYLGFQINGPKITNQKAVIRRDKLQTLNDFQKLLGDINWLRPYLHLTTGDLKPLFDILKGDSNPNSPRSLSEAALASLQKVETAIAEQFVTQIDYTQPLTFLIFNTTLTPTGLFWQNNPVMWVHLPASPKKVLLPYYDAIADLIILGRDNSKKYFGLEPSTIIQPYSKSQIHWLMQNTETWPIACASYAGNIDNHYPPNKLIQFCKLHAVVFPRIISKTPLDNALLVFTDGSSTGIAAYTFEKTTVRFKTSHTSAQLVELQALIAVLSAFPHRALNVYTDSAYLAHSIPLLETVSHIKHISDTAKFFLQCQQLIYNRSIPFYLGHIRAHSGLPGPLSQGNHITDLATKVVATTLTTAGKRTADGSEFEKRTADGSEFESPKKKAKVE

SEQ ID NO: 758 - protein, 2010 aa, synthetic construct
MPAAKRVKLDGGDKKYSIGLDIGTNSVGWAVITDEYKVPSKKFKVLGNTDRHSIKKNLIGALLFDSGETAEATRLKRTARRRYTRRKNRICYLQEIFSNEMAKVDDSFFHRLEESFLVEEDKKHERHPIFGNIVDEVAYHEKYPTIYHLRKKLVDSTDKADLRLIYLALAHMIKFRGHFLIEGDLNPDNSDVDKLFIQLVQTYNQLFEENPINASGVDAKAILSARLSKSRRLENLIAQLPGEKKNGLFGNLIALSLGLTPNFKSNFDLAEDAKLQLSKDTYDDDLDNLLAQIGDQYADLFLAAKNLSDAILLSDILRVNTEITKAPLSASMIKRYDEHHQDLTLLKALVRQQLPEKYKEIFFDQSKNGYAGYIDGGASQEEFYKFIKPILEKMDGTEELLVKLNREDLLRKQRTFDNGSIPHQIHLGELHAILRRQEDFYPFLKDNREKIEKILTFRIPYYVGPLARGNSRFAWMTRKSEETITPWNFEEVVDKGASAQSFIERMTNFDKNLPNEKVLPKHSLLYEYFTVYNELTKVKYVTEGMRKPAFLSGEQKKAIVDLLFKTNRKVTVKQLKEDYFKKIECFDSVEISGVEDRFNASLGTYHDLLKIIKDKDFLDNEENEDILEDIVLTLTLFEDREMIEERLKTYAHLFDDKVMKQLKRRRYTGWGRLSRKLINGIRDKQSGKTILDFLKSDGFANRNFMQLIHDDSLTFKEDIQKAQVSGQGDSLHEHIANLAGSPAIKKGILQTVKVVDELVKVMGRHKPENIVIEMARENQTTQKGQKNSRERMKRIEEGIKELGSQILKEHPVENTQLQNEKLYLYYLQNGRDMYVDQELDINRLSDYDVDHIVPQSFLKDDSIDNKVLTRSDKARGKSDNVPSEEVVKKMKNYWRQLLNAKLITQRKFDNLTKAERGGLSELDKAGFIKRQLVETRQITKHVAQILDSRMNTKYDENDKLIREVKVITLKSKLVSDFRKDFQFYKVREINNYHHAHDAYLNAVVGTALIKKYPKLESEFVYGDYKVYDVRKMIAKSEQEIGKATAKYFFYSNIMNFFKTEITLANGEIRKRPLIETNGETGEIVWDKGRDFATVRKVLSMPQVNIVKKTEVQTGGFSKESILPKRNSDKLIARKKDWDPKKYGGFDSPTVAYSVLVVAKVEKGKSKKLKSVKELLGITIMERSSFEKNPIDFLEAKGYKEVKKDLIIKLPKYSLFELENGRKRMLASAGELQKGNELALPSKYVNFLYLASHYEKLKGSPEDNEQKQLFVEQHKHYLDEIIEQISEFSKRVILADANLDKVLSAYNKHRDKPIREQAENIIHLFTLTNLGAPAAFKYFDTTIDRKRYTSTKEVLDATLIHQSITGLYETRIDLSQLGGDGGGSSPAPEAAAKGGLATAVDILAPQRYADPITWKSDEPVWVDQWPLTQEKLAAAQQLVQEQLQAGHIIESNSPWNTPIFVIKKKSGKWRLLQDLRAVNATMVLMGALQPGLPSPVAPPQGYFKIVIDLKDCFFTIPLQPVDQKRFAFSLPSTNFKQPMKRYQWKVLPQGMANSPTLCQKYVAAAIEPVRKSWAQMYIIHYMDDILIAGKLGEQVLQCFAQLKQALTTTGLQIAPEKVQLQDPYTYLGFQINGPKITNQKAVIRRDKLQTLNDFQKLLGDINWLRPYLHLTTGDLKPLFDILKGDSNPNSPRSLSEAALASLQKVETAIAEQFVTQIDYTQPLTFLIFNTTLTPTGLFWQNNPVMWVHLPASPKKVLLPYYDAIADLIILGRDNSKKYFGLEPSTIIQPYSKSQIHWLMQNTETWPIACASYAGNIDNHYPPNKLIQFCKLHAVVFPRIISKTPLDNALLVFTDGSSTGIAAYTFEKTTVRFKTSHTSAQLVELQALIAVLSAFPHRALNVYTDSAYLAHSIPLLETVSHIKHISDTAKFFLQCQQLIYNRSIPFYLGHIRAHSGLPGPLSQGNHITDLATKVVATTLTTAGKRTADGSEFEKRTADGSEFESPKKKAKVE

SEQ ID NO: 759 - protein, 2072 aa, synthetic construct
MPAAKRVKLDGGDKKYSIGLDIGTNSVGWAVITDEYKVPSKKFKVLGNTDRHSIKKNLIGALLFDSGETAEATRLKRTARRRYTRRKNRICYLQEIFSNEMAKVDDSFFHRLEESFLVEEDKKHERHPIFGNIVDEVAYHEKYPTIYHLRKKLVDSTDKADLRLIYLALAHMIKFRGHFLIEGDLNPDNSDVDKLFIQLVQTYNQLFEENPINASGVDAKAILSARLSKSRRLENLIAQLPGEKKNGLFGNLIALSLGLTPNFKSNFDLAEDAKLQLSKDTYDDDLDNLLAQIGDQYADLFLAAKNLSDAILLSDILRVNTEITKAPLSASMIKRYDEHHQDLTLLKALVRQQLPEKYKEIFFDQSKNGYAGYIDGGASQEEFYKFIKPILEKMDGTEELLVKLNREDLLRKQRTFDNGSIPHQIHLGELHAILRRQEDFYPFLKDNREKIEKILTFRIPYYVGPLARGNSRFAWMTRKSEETITPWNFEEVVDKGASAQSFIERMTNFDKNLPNEKVLPKHSLLYEYFTVYNELTKVKYVTEGMRKPAFLSGEQKKAIVDLLFKTNRKVTVKQLKEDYFKKIECFDSVEISGVEDRFNASLGTYHDLLKIIKDKDFLDNEENEDILEDIVLTLTLFEDREMIEERLKTYAHLFDDKVMKQLKRRRYTGWGRLSRKLINGIRDKQSGKTILDFLKSDGFANRNFMQLIHDDSLTFKEDIQKAQVSGQGDSLHEHIANLAGSPAIKKGILQTVKVVDELVKVMGRHKPENIVIEMARENQTTQKGQKNSRERMKRIEEGIKELGSQILKEHPVENTQLQNEKLYLYYLQNGRDMYVDQELDINRLSDYDVDHIVPQSFLKDDSIDNKVLTRSDKARGKSDNVPSEEVVKKMKNYWRQLLNAKLITQRKFDNLTKAERGGLSELDKAGFIKRQLVETRQITKHVAQILDSRMNTKYDENDKLIREVKVITLKSKLVSDFRKDFQFYKVREINNYHHAHDAYLNAVVGTALIKKYPKLESEFVYGDYKVYDVRKMIAKSEQEIGKATAKYFFYSNIMNFFKTEITLANGEIRKRPLIETNGETGEIVWDKGRDFATVRKVLSMPQVNIVKKTEVQTGGFSKESILPKRNSDKLIARKKDWDPKKYGGFDSPTVAYSVLVVAKVEKGKSKKLKSVKELLGITIMERSSFEKNPIDFLEAKGYKEVKKDLIIKLPKYSLFELENGRKRMLASAGELQKGNELALPSKYVNFLYLASHYEKLKGSPEDNEQKQLFVEQHKHYLDEIIEQISEFSKRVILADANLDKVLSAYNKHRDKPIREQAENIIHLFTLTNLGAPAAFKYFDTTIDRKRYTSTKEVLDATLIHQSITGLYETRIDLSQLGGDGGPAPEAAAKGGSCQTKNTLNIDEYLLQFPDQLWASLPTDIGRMLVPPITIKIKDNASLPSIRQYPLPKDKTEGLRPLISSLENQGILIKCHSPCNTPIFPIKKAGRDEYRMIHDLRAINNIVAPLTAVVASPTTVLSNLAPSLHWFTVIDLSNAFFSVPIHKDSQYLFAFTFEGHQYTWTVLPQGFIHSPTLFSQALYQSLHKIKFKISSEICIYMDDVLIASKDRDTNLKDTAVMLQHLASEGHKVSKKKLQLCQQEVVYLGQLLTPEGRKILPDRKVTVSQFQQPTTIRQIRAFLGLVGYCRHWIPEFSIHSKFLEKQLKKDTAEPFQLDDQQVEAFNKLKHAITTAPVLVVPDPAKPFQLYTSHSEHASIAVLTQKHAGRTRPIAFLSSKFDAIESGLPPCLKACASIHRSLTQADSFILGAPLIIYTTHAICTLLQRDRSQLVTASRFSKWEADLLRPELTFVACSAVSPAHLYMQSCENNIPPHDCVLLTHTISRPRPDLSDLPIPDPDMTLFSDGSYTTGRGGAAVVMHRPVTDDFIIIHQQPGGASAQTAELLALAAACHLATDKTVNIYTDSRYAYGVVHDFGHLWMHRGFVTSAGTPIKNHKEIEYLLKQIMKPKQVSVIKIEAHTKGVSMEVRGNAAADEAAKNAVFLVQRAGKRTADGSEFEKRTADGSEFESPKKKAKVE

SEQ ID NO: 760 - protein, 2070 aa, synthetic construct
MPAAKRVKLDGGDKKYSIGLDIGTNSVGWAVITDEYKVPSKKFKVLGNTDRHSIKKNLIGALLFDSGETAEATRLKRTARRRYTRRKNRICYLQEIFSNEMAKVDDSFFHRLEESFLVEEDKKHERHPIFGNIVDEVAYHEKYPTIYHLRKKLVDSTDKADLRLIYLALAHMIKFRGHFLIEGDLNPDNSDVDKLFIQLVQTYNQLFEENPINASGVDAKAILSARLSKSRRLENLIAQLPGEKKNGLFGNLIALSLGLTPNFKSNFDLAEDAKLQLSKDTYDDDLDNLLAQIGDQYADLFLAAKNLSDAILLSDILRVNTEITKAPLSASMIKRYDEHHQDLTLLKALVRQQLPEKYKEIFFDQSKNGYAGYIDGGASQEEFYKFIKPILEKMDGTEELLVKLNREDLLRKQRTFDNGSIPHQIHLGELHAILRRQEDFYPFLKDNREKIEKILTFRIPYYVGPLARGNSRFAWMTRKSEETITPWNFEEVVDKGASAQSFIERMTNFDKNLPNEKVLPKHSLLYEYFTVYNELTKVKYVTEGMRKPAFLSGEQKKAIVDLLFKTNRKVTVKQLKEDYFKKIECFDSVEISGVEDRFNASLGTYHDLLKIIKDKDFLDNEENEDILEDIVLTLTLFEDREMIEERLKTYAHLFDDKVMKQLKRRRYTGWGRLSRKLINGIRDKQSGKTILDFLKSDGFANRNFMQLIHDDSLTFKEDIQKAQVSGQGDSLHEHIANLAGSPAIKKGILQTVKVVDELVKVMGRHKPENIVIEMARENQTTQKGQKNSRERMKRIEEGIKELGSQILKEHPVENTQLQNEKLYLYYLQNGRDMYVDQELDINRLSDYDVDHIVPQSFLKDDSIDNKVLTRSDKARGKSDNVPSEEVVKKMKNYWRQLLNAKLITQRKFDNLTKAERGGLSELDKAGFIKRQLVETRQITKHVAQILDSRMNTKYDENDKLIREVKVITLKSKLVSDFRKDFQFYKVREINNYHHAHDAYLNAVVGTALIKKYPKLESEFVYGDYKVYDVRKMIAKSEQEIGKATAKYFFYSNIMNFFKTEITLANGEIRKRPLIETNGETGEIVWDKGRDFATVRKVLSMPQVNIVKKTEVQTGGFSKESILPKRNSDKLIARKKDWDPKKYGGFDSPTVAYSVLVVAKVEKGKSKKLKSVKELLGITIMERSSFEKNPIDFLEAKGYKEVKKDLIIKLPKYSLFELENGRKRMLASAGELQKGNELALPSKYVNFLYLASHYEKLKGSPEDNEQKQLFVEQHKHYLDEIIEQISEFSKRVILADANLDKVLSAYNKHRDKPIREQAENIIHLFTLTNLGAPAAFKYFDTTIDRKRYTSTKEVLDATLIHQSITGLYETRIDLSQLGGDGGGGGGGGGGSCQTKNTLNIDEYLLQFPDQLWASLPTDIGRMLVPPITIKIKDNASLPSIRQYPLPKDKTEGLRPLISSLENQGILIKCHSPCNTPIFPIKKAGRDEYRMIHDLRAINNIVAPLTAVVASPTTVLSNLAPSLHWFTVIDLSNAFFSVPIHKDSQYLFAFTFEGHQYTWTVLPQGFIHSPTLFSQALYQSLHKIKFKISSEICIYMDDVLIASKDRDTNLKDTAVMLQHLASEGHKVSKKKLQLCQQEVVYLGQLLTPEGRKILPDRKVTVSQFQQPTTIRQIRAFLGLVGYCRHWIPEFSIHSKFLEKQLKKDTAEPFQLDDQQVEAFNKLKHAITTAPVLVVPDPAKPFQLYTSHSEHASIAVLTQKHAGRTRPIAFLSSKFDAIESGLPPCLKACASIHRSLTQADSFILGAPLIIYTTHAICTLLQRDRSQLVTASRFSKWEADLLRPELTFVACSAVSPAHLYMQSCENNIPPHDCVLLTHTISRPRPDLSDLPIPDPDMTLFSDGSYTTGRGGAAVVMHRPVTDDFIIIHQQPGGASAQTAELLALAAACHLATDKTVNIYTDSRYAYGVVHDFGHLWMHRGFVTSAGTPIKNHKEIEYLLKQIMKPKQVSVIKIEAHTKGVSMEVRGNAAADEAAKNAVFLVQRAGKRTADGSEFEKRTADGSEFESPKKKAKVE

SEQ ID NO: 761 - protein, 2077 aa, synthetic construct
MPAAKRVKLDGGDKKYSIGLDIGTNSVGWAVITDEYKVPSKKFKVLGNTDRHSIKKNLIGALLFDSGETAEATRLKRTARRRYTRRKNRICYLQEIFSNEMAKVDDSFFHRLEESFLVEEDKKHERHPIFGNIVDEVAYHEKYPTIYHLRKKLVDSTDKADLRLIYLALAHMIKFRGHFLIEGDLNPDNSDVDKLFIQLVQTYNQLFEENPINASGVDAKAILSARLSKSRRLENLIAQLPGEKKNGLFGNLIALSLGLTPNFKSNFDLAEDAKLQLSKDTYDDDLDNLLAQIGDQYADLFLAAKNLSDAILLSDILRVNTEITKAPLSASMIKRYDEHHQDLTLLKALVRQQLPEKYKEIFFDQSKNGYAGYIDGGASQEEFYKFIKPILEKMDGTEELLVKLNREDLLRKQRTFDNGSIPHQIHLGELHAILRRQEDFYPFLKDNREKIEKILTFRIPYYVGPLARGNSRFAWMTRKSEETITPWNFEEVVDKGASAQSFIERMTNFDKNLPNEKVLPKHSLLYEYFTVYNELTKVKYVTEGMRKPAFLSGEQKKAIVDLLFKTNRKVTVKQLKEDYFKKIECFDSVEISGVEDRFNASLGTYHDLLKIIKDKDFLDNEENEDILEDIVLTLTLFEDREMIEERLKTYAHLFDDKVMKQLKRRRYTGWGRLSRKLINGIRDKQSGKTILDFLKSDGFANRNFMQLIHDDSLTFKEDIQKAQVSGQGDSLHEHIANLAGSPAIKKGILQTVKVVDELVKVMGRHKPENIVIEMARENQTTQKGQKNSRERMKRIEEGIKELGSQILKEHPVENTQLQNEKLYLYYLQNGRDMYVDQELDINRLSDYDVDHIVPQSFLKDDSIDNKVLTRSDKARGKSDNVPSEEVVKKMKNYWRQLLNAKLITQRKFDNLTKAERGGLSELDKAGFIKRQLVETRQITKHVAQILDSRMNTKYDENDKLIREVKVITLKSKLVSDFRKDFQFYKVREINNYHHAHDAYLNAVVGTALIKKYPKLESEFVYGDYKVYDVRKMIAKSEQEIGKATAKYFFYSNIMNFFKTEITLANGEIRKRPLIETNGETGEIVWDKGRDFATVRKVLSMPQVNIVKKTEVQTGGFSKESILPKRNSDKLIARKKDWDPKKYGGFDSPTVAYSVLVVAKVEKGKSKKLKSVKELLGITIMERSSFEKNPIDFLEAKGYKEVKKDLIIKLPKYSLFELENGRKRMLASAGELQKGNELALPSKYVNFLYLASHYEKLKGSPEDNEQKQLFVEQHKHYLDEIIEQISEFSKRVILADANLDKVLSAYNKHRDKPIREQAENIIHLFTLTNLGAPAAFKYFDTTIDRKRYTSTKEVLDATLIHQSITGLYETRIDLSQLGGDGGPAPAPAPAPAPAPGGSCQTKNTLNIDEYLLQFPDQLWASLPTDIGRMLVPPITIKIKDNASLPSIRQYPLPKDKTEGLRPLISSLENQGILIKCHSPCNTPIFPIKKAGRDEYRMIHDLRAINNIVAPLTAVVASPTTVLSNLAPSLHWFTVIDLSNAFFSVPIHKDSQYLFAFTFEGHQYTWTVLPQGFIHSPTLFSQALYQSLHKIKFKISSEICIYMDDVLIASKDRDTNLKDTAVMLQHLASEGHKVSKKKLQLCQQEVVYLGQLLTPEGRKILPDRKVTVSQFQQPTTIRQIRAFLGLVGYCRHWIPEFSIHSKFLEKQLKKDTAEPFQLDDQQVEAFNKLKHAITTAPVLVVPDPAKPFQLYTSHSEHASIAVLTQKHAGRTRPIAFLSSKFDAIESGLPPCLKACASIHRSLTQADSFILGAPLIIYTTHAICTLLQRDRSQLVTASRFSKWEADLLRPELTFVACSAVSPAHLYMQSCENNIPPHDCVLLTHTISRPRPDLSDLPIPDPDMTLFSDGSYTTGRGGAAVVMHRPVTDDFIIIHQQPGGASAQTAELLALAAACHLATDKTVNIYTDSRYAYGVVHDFGHLWMHRGFVTSAGTPIKNHKEIEYLLKQIMKPKQVSVIKIEAHTKGVSMEVRGNAAADEAAKNAVFLVQRAGKRTADGSEFEKRTADGSEFESPKKKAKVE

SEQ ID NO: 762 - protein, 2079 aa, synthetic construct
MPAAKRVKLDGGDKKYSIGLDIGTNSVGWAVITDEYKVPSKKFKVLGNTDRHSIKKNLIGALLFDSGETAEATRLKRTARRRYTRRKNRICYLQEIFSNEMAKVDDSFFHRLEESFLVEEDKKHERHPIFGNIVDEVAYHEKYPTIYHLRKKLVDSTDKADLRLIYLALAHMIKFRGHFLIEGDLNPDNSDVDKLFIQLVQTYNQLFEENPINASGVDAKAILSARLSKSRRLENLIAQLPGEKKNGLFGNLIALSLGLTPNFKSNFDLAEDAKLQLSKDTYDDDLDNLLAQIGDQYADLFLAAKNLSDAILLSDILRVNTEITKAPLSASMIKRYDEHHQDLTLLKALVRQQLPEKYKEIFFDQSKNGYAGYIDGGASQEEFYKFIKPILEKMDGTEELLVKLNREDLLRKQRTFDNGSIPHQIHLGELHAILRRQEDFYPFLKDNREKIEKILTFRIPYYVGPLARGNSRFAWMTRKSEETITPWNFEEVVDKGASAQSFIERMTNFDKNLPNEKVLPKHSLLYEYFTVYNELTKVKYVTEGMRKPAFLSGEQKKAIVDLLFKTNRKVTVKQLKEDYFKKIECFDSVEISGVEDRFNASLGTYHDLLKIIKDKDFLDNEENEDILEDIVLTLTLFEDREMIEERLKTYAHLFDDKVMKQLKRRRYTGWGRLSRKLINGIRDKQSGKTILDFLKSDGFANRNFMQLIHDDSLTFKEDIQKAQVSGQGDSLHEHIANLAGSPAIKKGILQTVKVVDELVKVMGRHKPENIVIEMARENQTTQKGQKNSRERMKRIEEGIKELGSQILKEHPVENTQLQNEKLYLYYLQNGRDMYVDQELDINRLSDYDVDHIVPQSFLKDDSIDNKVLTRSDKARGKSDNVPSEEVVKKMKNYWRQLLNAKLITQRKFDNLTKAERGGLSELDKAGFIKRQLVETRQITKHVAQILDSRMNTKYDENDKLIREVKVITLKSKLVSDFRKDFQFYKVREINNYHHAHDAYLNAVVGTALIKKYPKLESEFVYGDYKVYDVRKMIAKSEQEIGKATAKYFFYSNIMNFFKTEITLANGEIRKRPLIETNGETGEIVWDKGRDFATVRKVLSMPQVNIVKKTEVQTGGFSKESILPKRNSDKLIARKKDWDPKKYGGFDSPTVAYSVLVVAKVEKGKSKKLKSVKELLGITIMERSSFEKNPIDFLEAKGYKEVKKDLIIKLPKYSLFELENGRKRMLASAGELQKGNELALPSKYVNFLYLASHYEKLKGSPEDNEQKQLFVEQHKHYLDEIIEQISEFSKRVILADANLDKVLSAYNKHRDKPIREQAENIIHLFTLTNLGAPAAFKYFDTTIDRKRYTSTKEVLDATLIHQSITGLYETRIDLSQLGGDGGGGGGSEAAAKGGGGSGGSCQTKNTLNIDEYLLQFPDQLWASLPTDIGRMLVPPITIKIKDNASLPSIRQYPLPKDKTEGLRPLISSLENQGILIKCHSPCNTPIFPIKKAGRDEYRMIHDLRAINNIVAPLTAVVASPTTVLSNLAPSLHWFTVIDLSNAFFSVPIHKDSQYLFAFTFEGHQYTWTVLPQGFIHSPTLFNQALYQSLHKIKFKISSEICIYMDDVLIASKDRDTNLKDTAVMLQHLASEGHKVSKKKLQLCQQEVVYLGQLLTPEGRKILPDRKVTVSQFQQPTTIRQIRAFLGLVGYCRHWIPEFSIHSKFLEKQLKPDTAEPFQLDDQQVEAFNKLKHAITTAPVLVVPDPAKPFQLYTSHSEHASIAVLTQKHAGRTRPIAFLSSKFDAIESGLPPCLKACASIHRSLTQADSFILGAPLIIYTTHAICTLLQRDRSQLVTASRFSKWEADLLRPELTFVACSAVSPAHLYMQSCENNIPPHDCVLLTHTISRPRPDLSDLPIPDPDMTLFSDGSYTTGRGGAAVVMHRPVTDDFIIIHQQPGGASAQTAELLALAAACHLATDKTVNIYTDSRYAYGVVHDFGHLWMHRGFVTSAGTPIKNHKEIEYLLKQIMKPKQVSVIKIEAHTKGVSMEVRGNAAADEAAKNAVFLVQRAGKRTADGSEFEKRTADGSEFESPKKKAKVE

SEQ ID NO: 763 - protein, 2110 aa, synthetic construct
MPAAKRVKLDGGDKKYSIGLDIGTNSVGWAVITDEYKVPSKKFKVLGNTDRHSIKKNLIGALLFDSGETAEATRLKRTARRRYTRRKNRICYLQEIFSNEMAKVDDSFFHRLEESFLVEEDKKHERHPIFGNIVDEVAYHEKYPTIYHLRKKLVDSTDKADLRLIYLALAHMIKFRGHFLIEGDLNPDNSDVDKLFIQLVQTYNQLFEENPINASGVDAKAILSARLSKSRRLENLIAQLPGEKKNGLFGNLIALSLGLTPNFKSNFDLAEDAKLQLSKDTYDDDLDNLLAQIGDQYADLFLAAKNLSDAILLSDILRVNTEITKAPLSASMIKRYDEHHQDLTLLKALVRQQLPEKYKEIFFDQSKNGYAGYIDGGASQEEFYKFIKPILEKMDGTEELLVKLNREDLLRKQRTFDNGSIPHQIHLGELHAILRRQEDFYPFLKDNREKIEKILTFRIPYYVGPLARGNSRFAWMTRKSEETITPWNFEEVVDKGASAQSFIERMTNFDKNLPNEKVLPKHSLLYEYFTVYNELTKVKYVTEGMRKPAFLSGEQKKAIVDLLFKTNRKVTVKQLKEDYFKKIECFDSVEISGVEDRFNASLGTYHDLLKIIKDKDFLDNEENEDILEDIVLTLTLFEDREMIEERLKTYAHLFDDKVMKQLKRRRYTGWGRLSRKLINGIRDKQSGKTILDFLKSDGFANRNFMQLIHDDSLTFKEDIQKAQVSGQGDSLHEHIANLAGSPAIKKGILQTVKVVDELVKVMGRHKPENIVIEMARENQTTQKGQKNSRERMKRIEEGIKELGSQILKEHPVENTQLQNEKLYLYYLQNGRDMYVDQELDINRLSDYDVDHIVPQSFLKDDSIDNKVLTRSDKARGKSDNVPSEEVVKKMKNYWRQLLNAKLITQRKFDNLTKAERGGLSELDKAGFIKRQLVETRQITKHVAQILDSRMNTKYDENDKLIREVKVITLKSKLVSDFRKDFQFYKVREINNYHHAHDAYLNAVVGTALIKKYPKLESEFVYGDYKVYDVRKMIAKSEQEIGKATAKYFFYSNIMNFFKTEITLANGEIRKRPLIETNGETGEIVWDKGRDFATVRKVLSMPQVNIVKKTEVQTGGFSKESILPKRNSDKLIARKKDWDPKKYGGFDSPTVAYSVLVVAKVEKGKSKKLKSVKELLGITIMERSSFEKNPIDFLEAKGYKEVKKDLIIKLPKYSLFELENGRKRMLASAGELQKGNELALPSKYVNFLYLASHYEKLKGSPEDNEQKQLFVEQHKHYLDEIIEQISEFSKRVILADANLDKVLSAYNKHRDKPIREQAENIIHLFTLTNLGAPAAFKYFDTTIDRKRYTSTKEVLDATLIHQSITGLYETRIDLSQLGGDGGAEAAAKEAAAKEAAAKEAAAKALEAEAAAKEAAAKEAAAKEAAAKAGGSCQTKNTLNIDEYLLQFPDQLWASLPTDIGRMLVPPITIKIKDNASLPSIRQYPLPKDKTEGLRPLISSLENQGILIKCHSPCNTPIFPIKKAGRDEYRMIHDLRAINNIVAPLTAVVASPTTVLSNLAPSLHWFTVIDLSNAFFSVPIHKDSQYLFAFTFEGHQYTWTVLPQGFIHSPTLFNQALYQSLHKIKFKISSEICIYMDDVLIASKDRDTNLKDTAVMLQHLASEGHKVSKKKLQLCQQEVVYLGQLLTPEGRKILPDRKVTVSQFQQPTTIRQIRAFLGLVGYCRHWIPEFSIHSKFLEKQLKPDTAEPFQLDDQQVEAFNKLKHAITTAPVLVVPDPAKPFQLYTSHSEHASIAVLTQKHAGRTRPIAFLSSKFDAIESGLPPCLKACASIHRSLTQADSFILGAPLIIYTTHAICTLLQRDRSQLVTASRFSKWEADLLRPELTFVACSAVSPAHLYMQSCENNIPPHDCVLLTHTISRPRPDLSDLPIPDPDMTLFSDGSYTTGRGGAAVVMHRPVTDDFIIIHQQPGGASAQTAELLALAAACHLATDKTVNIYTDSRYAYGVVHDFGHLWMHRGFVTSAGTPIKNHKEIEYLLKQIMKPKQVSVIKIEAHTKGVSMEVRGNAAADEAAKNAVFLVQRAGKRTADGSEFEKRTADGSEFESPKKKAKVE

SEQ ID NO: 764 - protein, 2073 aa, synthetic construct
MPAAKRVKLDGGDKKYSIGLDIGTNSVGWAVITDEYKVPSKKFKVLGNTDRHSIKKNLIGALLFDSGETAEATRLKRTARRRYTRRKNRICYLQEIFSNEMAKVDDSFFHRLEESFLVEEDKKHERHPIFGNIVDEVAYHEKYPTIYHLRKKLVDSTDKADLRLIYLALAHMIKFRGHFLIEGDLNPDNSDVDKLFIQLVQTYNQLFEENPINASGVDAKAILSARLSKSRRLENLIAQLPGEKKNGLFGNLIALSLGLTPNFKSNFDLAEDAKLQLSKDTYDDDLDNLLAQIGDQYADLFLAAKNLSDAILLSDILRVNTEITKAPLSASMIKRYDEHHQDLTLLKALVRQQLPEKYKEIFFDQSKNGYAGYIDGGASQEEFYKFIKPILEKMDGTEELLVKLNREDLLRKQRTFDNGSIPHQIHLGELHAILRRQEDFYPFLKDNREKIEKILTFRIPYYVGPLARGNSRFAWMTRKSEETITPWNFEEVVDKGASAQSFIERMTNFDKNLPNEKVLPKHSLLYEYFTVYNELTKVKYVTEGMRKPAFLSGEQKKAIVDLLFKTNRKVTVKQLKEDYFKKIECFDSVEISGVEDRFNASLGTYHDLLKIIKDKDFLDNEENEDILEDIVLTLTLFEDREMIEERLKTYAHLFDDKVMKQLKRRRYTGWGRLSRKLINGIRDKQSGKTILDFLKSDGFANRNFMQLIHDDSLTFKEDIQKAQVSGQGDSLHEHIANLAGSPAIKKGILQTVKVVDELVKVMGRHKPENIVIEMARENQTTQKGQKNSRERMKRIEEGIKELGSQILKEHPVENTQLQNEKLYLYYLQNGRDMYVDQELDINRLSDYDVDHIVPQSFLKDDSIDNKVLTRSDKARGKSDNVPSEEVVKKMKNYWRQLLNAKLITQRKFDNLTKAERGGLSELDKAGFIKRQLVETRQITKHVAQILDSRMNTKYDENDKLIREVKVITLKSKLVSDFRKDFQFYKVREINNYHHAHDAYLNAVVGTALIKKYPKLESEFVYGDYKVYDVRKMIAKSEQEIGKATAKYFFYSNIMNFFKTEITLANGEIRKRPLIETNGETGEIVWDKGRDFATVRKVLSMPQVNIVKKTEVQTGGFSKESILPKRNSDKLIARKKDWDPKKYGGFDSPTVAYSVLVVAKVEKGKSKKLKSVKELLGITIMERSSFEKNPIDFLEAKGYKEVKKDLIIKLPKYSLFELENGRKRMLASAGELQKGNELALPSKYVNFLYLASHYEKLKGSPEDNEQKQLFVEQHKHYLDEIIEQISEFSKRVILADANLDKVLSAYNKHRDKPIREQAENIIHLFTLTNLGAPAAFKYFDTTIDRKRYTSTKEVLDATLIHQSITGLYETRIDLSQLGGDGGGSSGGSGGGGGSCQTKNTLNIDEYLLQFPDQLWASLPTDIGRMLVPPITIKIKDNASLPSIRQYPLPKDKTEGLRPLISSLENQGILIKCHSPCNTPIFPIKKAGRDEYRMIHDLRAINNIVAPLTAVVASPTTVLSNLAPSLHWFTVIDLSNAFFSVPIHKDSQYLFAFTFEGHQYTWTVLPQGFIHSPTLFNQALYQSLHKIKFKISSEICIYMDDVLIASKDRDTNLKDTAVMLQHLASEGHKVSKKKLQLCQQEVVYLGQLLTPEGRKILPDRKVTVSQFQQPTTIRQIRAFLGLVGYCRHWIPEFSIHSKFLEKQLKPDTAEPFQLDDQQVEAFNKLKHAITTAPVLVVPDPAKPFQLYTSHSEHASIAVLTQKHAGRTRPIAFLSSKFDAIESGLPPCLKACASIHRSLTQADSFILGAPLIIYTTHAICTLLQRDRSQLVTASRFSKWEADLLRPELTFVACSAVSPAHLYMQSCENNIPPHDCVLLTHTISRPRPDLSDLPIPDPDMTLFSDGSYTTGRGGAAVVMHRPVTDDFIIIHQQPGGASAQTAELLALAAACHLATDKTVNIYTDSRYAYGVVHDFGHLWMHRGFVTSAGTPIKNHKEIEYLLKQIMKPKQVSVIKIEAHTKGVSMEVRGNAAADEAAKNAVFLVQRAGKRTADGSEFEKRTADGSEFESPKKKAKVE

SEQ ID NO: 765 - protein, 2087 aa, synthetic construct
MPAAKRVKLDGGDKKYSIGLDIGTNSVGWAVITDEYKVPSKKFKVLGNTDRHSIKKNLIGALLFDSGETAEATRLKRTARRRYTRRKNRICYLQEIFSNEMAKVDDSFFHRLEESFLVEEDKKHERHPIFGNIVDEVAYHEKYPTIYHLRKKLVDSTDKADLRLIYLALAHMIKFRGHFLIEGDLNPDNSDVDKLFIQLVQTYNQLFEENPINASGVDAKAILSARLSKSRRLENLIAQLPGEKKNGLFGNLIALSLGLTPNFKSNFDLAEDAKLQLSKDTYDDDLDNLLAQIGDQYADLFLAAKNLSDAILLSDILRVNTEITKAPLSASMIKRYDEHHQDLTLLKALVRQQLPEKYKEIFFDQSKNGYAGYIDGGASQEEFYKFIKPILEKMDGTEELLVKLNREDLLRKQRTFDNGSIPHQIHLGELHAILRRQEDFYPFLKDNREKIEKILTFRIPYYVGPLARGNSRFAWMTRKSEETITPWNFEEVVDKGASAQSFIERMTNFDKNLPNEKVLPKHSLLYEYFTVYNELTKVKYVTEGMRKPAFLSGEQKKAIVDLLFKTNRKVTVKQLKEDYFKKIECFDSVEISGVEDRFNASLGTYHDLLKIIKDKDFLDNEENEDILEDIVLTLTLFEDREMIEERLKTYAHLFDDKVMKQLKRRRYTGWGRLSRKLINGIRDKQSGKTILDFLKSDGFANRNFMQLIHDDSLTFKEDIQKAQVSGQGDSLHEHIANLAGSPAIKKGILQTVKVVDELVKVMGRHKPENIVIEMARENQTTQKGQKNSRERMKRIEEGIKELGSQILKEHPVENTQLQNEKLYLYYLQNGRDMYVDQELDINRLSDYDVDHIVPQSFLKDDSIDNKVLTRSDKARGKSDNVPSEEVVKKMKNYWRQLLNAKLITQRKFDNLTKAERGGLSELDKAGFIKRQLVETRQITKHVAQILDSRMNTKYDENDKLIREVKVITLKSKLVSDFRKDFQFYKVREINNYHHAHDAYLNAVVGTALIKKYPKLESEFVYGDYKVYDVRKMIAKSEQEIGKATAKYFFYSNIMNFFKTEITLANGEIRKRPLIETNGETGEIVWDKGRDFATVRKVLSMPQVNIVKKTEVQTGGFSKESILPKRNSDKLIARKKDWDPKKYGGFDSPTVAYSVLVVAKVEKGKSKKLKSVKELLGITIMERSSFEKNPIDFLEAKGYKEVKKDLIIKLPKYSLFELENGRKRMLASAGELQKGNELALPSKYVNFLYLASHYEKLKGSPEDNEQKQLFVEQHKHYLDEIIEQISEFSKRVILADANLDKVLSAYNKHRDKPIREQAENIIHLFTLTNLGAPAAFKYFDTTIDRKRYTSTKEVLDATLIHQSITGLYETRIDLSQLGGDGGEAAAKGGSPAPGGVPWILKKPLELTIKLDLEEQQGTLLNNSILSKKGKEELKQLFEKYSALWQSWENQVGHRRIRPHKIATGTVKPTPQKQYHINPKAKPDIQIVINDLLKQGVLIQKESTMNTPVYPVPKPNGRWRMVLDYRAVNKVTPLIAVQNQHSYGILGSLFKGRYKTTIDLSNGFWAHPIVPEDYWITAFTWQGKQYCWTVLPQGFLNSPGLFTGDVVDLLQGIPNVEVYVDDVYISHDSEKEHLEYLDILFNRLKEAGYIISLKKSNIANSIVDFLGFQITNEGRGLTDTFKEKLENITAPTTLKQLQSILGLLNFARNFIPDFTELIAPLYALIPKSTKNYVPWQIEHSTTLETLITKLNGAEYLQGRKGDKTLIMKVNASYTTGYIRYYNEGEKKPISYVSIVFSKTELKFTELEKLLTTVHKGLLKALDLSMGQNIHVYSPIVSMQNIQKTPQTAKKALASRWLSWLSYLEDPRIRFFYDPQMPALKDLPAVDTGKDNKKHPSNFQHIFYTDGSAITSPTKEGHLNAGMGIVYFINKDGNLQKQQEWSISLGNHTAQFAEIAAFEFALKKCLPLGGNILVVTDSNYVAKAYNEELDVWASNGFVNNRKKPLKHISKWKSVADLKRLRPDVVVTHEPGHQKLDSSPHAYGNNLADQLATQASFKVHAGKRTADGSEFEKRTADGSEFESPKKKAKVE

SEQ ID NO: 766 - protein, 2085 aa, synthetic construct
MPAAKRVKLDGGDKKYSIGLDIGTNSVGWAVITDEYKVPSKKFKVLGNTDRHSIKKNLIGALLFDSGETAEATRLKRTARRRYTRRKNRICYLQEIFSNEMAKVDDSFFHRLEESFLVEEDKKHERHPIFGNIVDEVAYHEKYPTIYHLRKKLVDSTDKADLRLIYLALAHMIKFRGHFLIEGDLNPDNSDVDKLFIQLVQTYNQLFEENPINASGVDAKAILSARLSKSRRLENLIAQLPGEKKNGLFGNLIALSLGLTPNFKSNFDLAEDAKLQLSKDTYDDDLDNLLAQIGDQYADLFLAAKNLSDAILLSDILRVNTEITKAPLSASMIKRYDEHHQDLTLLKALVRQQLPEKYKEIFFDQSKNGYAGYIDGGASQEEFYKFIKPILEKMDGTEELLVKLNREDLLRKQRTFDNGSIPHQIHLGELHAILRRQEDFYPFLKDNREKIEKILTFRIPYYVGPLARGNSRFAWMTRKSEETITPWNFEEVVDKGASAQSFIERMTNFDKNLPNEKVLPKHSLLYEYFTVYNELTKVKYVTEGMRKPAFLSGEQKKAIVDLLFKTNRKVTVKQLKEDYFKKIECFDSVEISGVEDRFNASLGTYHDLLKIIKDKDFLDNEENEDILEDIVLTLTLFEDREMIEERLKTYAHLFDDKVMKQLKRRRYTGWGRLSRKLINGIRDKQSGKTILDFLKSDGFANRNFMQLIHDDSLTFKEDIQKAQVSGQGDSLHEHIANLAGSPAIKKGILQTVKVVDELVKVMGRHKPENIVIEMARENQTTQKGQKNSRERMKRIEEGIKELGSQILKEHPVENTQLQNEKLYLYYLQNGRDMYVDQELDINRLSDYDVDHIVPQSFLKDDSIDNKVLTRSDKARGKSDNVPSEEVVKKMKNYWRQLLNAKLITQRKFDNLTKAERGGLSELDKAGFIKRQLVETRQITKHVAQILDSRMNTKYDENDKLIREVKVITLKSKLVSDFRKDFQFYKVREINNYHHAHDAYLNAVVGTALIKKYPKLESEFVYGDYKVYDVRKMIAKSEQEIGKATAKYFFYSNIMNFFKTEITLANGEIRKRPLIETNGETGEIVWDKGRDFATVRKVLSMPQVNIVKKTEVQTGGFSKESILPKRNSDKLIARKKDWDPKKYGGFDSPTVAYSVLVVAKVEKGKSKKLKSVKELLGITIMERSSFEKNPIDFLEAKGYKEVKKDLIIKLPKYSLFELENGRKRMLASAGELQKGNELALPSKYVNFLYLASHYEKLKGSPEDNEQKQLFVEQHKHYLDEIIEQISEFSKRVILADANLDKVLSAYNKHRDKPIREQAENIIHLFTLTNLGAPAAFKYFDTTIDRKRYTSTKEVLDATLIHQSITGLYETRIDLSQLGGDGGGSSGGGGGSGGVPWILKKPLELTIKLDLEEQQGTLLNNSILSKKGKEELKQLFEKYSALWQSWENQVGHRRIRPHKIATGTVKPTPQKQYHINPKAKPDIQIVINDLLKQGVLIQKESTMNTPVYPVPKPNGRWRMVLDYRAVNKVTPLIAVQNQHSYGILGSLFKGRYKTTIDLSNGFWAHPIVPEDYWITAFTWQGKQYCWTVLPQGFLNSPGLFTGDVVDLLQGIPNVEVYVDDVYISHDSEKEHLEYLDILFNRLKEAGYIISLKKSNIANSIVDFLGFQITNEGRGLTDTFKEKLENITAPTTLKQLQSILGLLNFARNFIPDFTELIAPLYALIPKSTKNYVPWQIEHSTTLETLITKLNGAEYLQGRKGDKTLIMKVNASYTTGYIRYYNEGEKKPISYVSIVFSKTELKFTELEKLLTTVHKGLLKALDLSMGQNIHVYSPIVSMQNIQKTPQTAKKALASRWLSWLSYLEDPRIRFFYDPQMPALKDLPAVDTGKDNKKHPSNFQHIFYTDGSAITSPTKEGHLNAGMGIVYFINKDGNLQKQQEWSISLGNHTAQFAEIAAFEFALKKCLPLGGNILVVTDSNYVAKAYNEELDVWASNGFVNNRKKPLKHISKWKSVADLKRLRPDVVVTHEPGHQKLDSSPHAYGNNLADQLATQASFKVHAGKRTADGSEFEKRTADGSEFESPKKKAKVE

SEQ ID NO: 767 - protein, 2087 aa, synthetic construct
MPAAKRVKLDGGDKKYSIGLDIGTNSVGWAVITDEYKVPSKKFKVLGNTDRHSIKKNLIGALLFDSGETAEATRLKRTARRRYTRRKNRICYLQEIFSNEMAKVDDSFFHRLEESFLVEEDKKHERHPIFGNIVDEVAYHEKYPTIYHLRKKLVDSTDKADLRLIYLALAHMIKFRGHFLIEGDLNPDNSDVDKLFIQLVQTYNQLFEENPINASGVDAKAILSARLSKSRRLENLIAQLPGEKKNGLFGNLIALSLGLTPNFKSNFDLAEDAKLQLSKDTYDDDLDNLLAQIGDQYADLFLAAKNLSDAILLSDILRVNTEITKAPLSASMIKRYDEHHQDLTLLKALVRQQLPEKYKEIFFDQSKNGYAGYIDGGASQEEFYKFIKPILEKMDGTEELLVKLNREDLLRKQRTFDNGSIPHQIHLGELHAILRRQEDFYPFLKDNREKIEKILTFRIPYYVGPLARGNSRFAWMTRKSEETITPWNFEEVVDKGASAQSFIERMTNFDKNLPNEKVLPKHSLLYEYFTVYNELTKVKYVTEGMRKPAFLSGEQKKAIVDLLFKTNRKVTVKQLKEDYFKKIECFDSVEISGVEDRFNASLGTYHDLLKIIKDKDFLDNEENEDILEDIVLTLTLFEDREMIEERLKTYAHLFDDKVMKQLKRRRYTGWGRLSRKLINGIRDKQSGKTILDFLKSDGFANRNFMQLIHDDSLTFKEDIQKAQVSGQGDSLHEHIANLAGSPAIKKGILQTVKVVDELVKVMGRHKPENIVIEMARENQTTQKGQKNSRERMKRIEEGIKELGSQILKEHPVENTQLQNEKLYLYYLQNGRDMYVDQELDINRLSDYDVDHIVPQSFLKDDSIDNKVLTRSDKARGKSDNVPSEEVVKKMKNYWRQLLNAKLITQRKFDNLTKAERGGLSELDKAGFIKRQLVETRQITKHVAQILDSRMNTKYDENDKLIREVKVITLKSKLVSDFRKDFQFYKVREINNYHHAHDAYLNAVVGTALIKKYPKLESEFVYGDYKVYDVRKMIAKSEQEIGKATAKYFFYSNIMNFFKTEITLANGEIRKRPLIETNGETGEIVWDKGRDFATVRKVLSMPQVNIVKKTEVQTGGFSKESILPKRNSDKLIARKKDWDPKKYGGFDSPTVAYSVLVVAKVEKGKSKKLKSVKELLGITIMERSSFEKNPIDFLEAKGYKEVKKDLIIKLPKYSLFELENGRKRMLASAGELQKGNELALPSKYVNFLYLASHYEKLKGSPEDNEQKQLFVEQHKHYLDEIIEQISEFSKRVILADANLDKVLSAYNKHRDKPIREQAENIIHLFTLTNLGAPAAFKYFDTTIDRKRYTSTKEVLDATLIHQSITGLYETRIDLSQLGGDGGPAPEAAAKGSSGGVPWILKKPLELTIKLDLEEQQGTLLNNSILSKKGKEELKQLFEKYSALWQSWENQVGHRRIRPHKIATGTVKPTPQKQYHINPKAKPDIQIVINDLLKQGVLIQKESTMNTPVYPVPKPNGRWRMVLDYRAVNKVTPLIAVQNQHSYGILGSLFKGRYKTTIDLSNGFWAHPIVPEDYWITAFTWQGKQYCWTVLPQGFLNSPGLFTGDVVDLLQGIPNVEVYVDDVYISHDSEKEHLEYLDILFNRLKEAGYIISLKKSNIANSIVDFLGFQITNEGRGLTDTFKEKLENITAPTTLKQLQSILGLLNFARNFIPDFTELIAPLYALIPKSTKNYVPWQIEHSTTLETLITKLNGAEYLQGRKGDKTLIMKVNASYTTGYIRYYNEGEKKPISYVSIVFSKTELKFTELEKLLTTVHKGLLKALDLSMGQNIHVYSPIVSMQNIQKTPQTAKKALASRWLSWLSYLEDPRIRFFYDPQMPALKDLPAVDTGKDNKKHPSNFQHIFYTDGSAITSPTKEGHLNAGMGIVYFINKDGNLQKQQEWSISLGNHTAQFAEIAAFEFALKKCLPLGGNILVVTDSNYVAKAYNEELDVWASNGFVNNRKKPLKHISKWKSVADLKRLRPDVVVTHEPGHQKLDSSPHAYGNNLADQLATQASFKVHAGKRTADGSEFEKRTADGSEFESPKKKAKVE

SEQ ID NO: 768 - protein, 2091 aa, synthetic construct
MPAAKRVKLDGGDKKYSIGLDIGTNSVGWAVITDEYKVPSKKFKVLGNTDRHSIKKNLIGALLFDSGETAEATRLKRTARRRYTRRKNRICYLQEIFSNEMAKVDDSFFHRLEESFLVEEDKKHERHPIFGNIVDEVAYHEKYPTIYHLRKKLVDSTDKADLRLIYLALAHMIKFRGHFLIEGDLNPDNSDVDKLFIQLVQTYNQLFEENPINASGVDAKAILSARLSKSRRLENLIAQLPGEKKNGLFGNLIALSLGLTPNFKSNFDLAEDAKLQLSKDTYDDDLDNLLAQIGDQYADLFLAAKNLSDAILLSDILRVNTEITKAPLSASMIKRYDEHHQDLTLLKALVRQQLPEKYKEIFFDQSKNGYAGYIDGGASQEEFYKFIKPILEKMDGTEELLVKLNREDLLRKQRTFDNGSIPHQIHLGELHAILRRQEDFYPFLKDNREKIEKILTFRIPYYVGPLARGNSRFAWMTRKSEETITPWNFEEVVDKGASAQSFIERMTNFDKNLPNEKVLPKHSLLYEYFTVYNELTKVKYVTEGMRKPAFLSGEQKKAIVDLLFKTNRKVTVKQLKEDYFKKIECFDSVEISGVEDRFNASLGTYHDLLKIIKDKDFLDNEENEDILEDIVLTLTLFEDREMIEERLKTYAHLFDDKVMKQLKRRRYTGWGRLSRKLINGIRDKQSGKTILDFLKSDGFANRNFMQLIHDDSLTFKEDIQKAQVSGQGDSLHEHIANLAGSPAIKKGILQTVKVVDELVKVMGRHKPENIVIEMARENQTTQKGQKNSRERMKRIEEGIKELGSQILKEHPVENTQLQNEKLYLYYLQNGRDMYVDQELDINRLSDYDVDHIVPQSFLKDDSIDNKVLTRSDKARGKSDNVPSEEVVKKMKNYWRQLLNAKLITQRKFDNLTKAERGGLSELDKAGFIKRQLVETRQITKHVAQILDSRMNTKYDENDKLIREVKVITLKSKLVSDFRKDFQFYKVREINNYHHAHDAYLNAVVGTALIKKYPKLESEFVYGDYKVYDVRKMIAKSEQEIGKATAKYFFYSNIMNFFKTEITLANGEIRKRPLIETNGETGEIVWDKGRDFATVRKVLSMPQVNIVKKTEVQTGGFSKESILPKRNSDKLIARKKDWDPKKYGGFDSPTVAYSVLVVAKVEKGKSKKLKSVKELLGITIMERSSFEKNPIDFLEAKGYKEVKKDLIIKLPKYSLFELENGRKRMLASAGELQKGNELALPSKYVNFLYLASHYEKLKGSPEDNEQKQLFVEQHKHYLDEIIEQISEFSKRVILADANLDKVLSAYNKHRDKPIREQAENIIHLFTLTNLGAPAAFKYFDTTIDRKRYTSTKEVLDATLIHQSITGLYETRIDLSQLGGDGGGGGGSEAAAKGGGGSGGVPWILKKPLELTIKLDLEEQQGTLLNNSILSKKGKEELKQLFEKYSALWQSWENQVGHRRIRPHKIATGTVKPTPQKQYHINPKAKPDIQIVINDLLKQGVLIQKESTMNTPVYPVPKPNGRWRMVLDYRAVNKVTPLIAVQNQHSYGILGSLFKGRYKTTIDLSNGFWAHPIVPEDYWITAFTWQGKQYCWTVLPQGFLNSPGLFTGDVVDLLQGIPNVEVYVDDVYISHDSEKEHLEYLDILFNRLKEAGYIISLKKSNIANSIVDFLGFQITNEGRGLTDTFKEKLENITAPTTLKQLQSILGLLNFARNFIPDFTELIAPLYALIPKSTKNYVPWQIEHSTTLETLITKLNGAEYLQGRKGDKTLIMKVNASYTTGYIRYYNEGEKKPISYVSIVFSKTELKFTELEKLLTTVHKGLLKALDLSMGQNIHVYSPIVSMQNIQKTPQTAKKALASRWLSWLSYLEDPRIRFFYDPQMPALKDLPAVDTGKDNKKHPSNFQHIFYTDGSAITSPTKEGHLNAGMGIVYFINKDGNLQKQQEWSISLGNHTAQFAEIAAFEFALKKCLPLGGNILVVTDSNYVAKAYNEELDVWASNGFVNNRKKPLKHISKWKSVADLKRLRPDVVVTHEPGHQKLDSSPHAYGNNLADQLATQASFKVHAGKRTADGSEFEKRTADGSEFESPKKKAKVE

SEQ ID NO: 769 - protein, 2087 aa, synthetic construct
MPAAKRVKLDGGDKKYSIGLDIGTNSVGWAVITDEYKVPSKKFKVLGNTDRHSIKKNLIGALLFDSGETAEATRLKRTARRRYTRRKNRICYLQEIFSNEMAKVDDSFFHRLEESFLVEEDKKHERHPIFGNIVDEVAYHEKYPTIYHLRKKLVDSTDKADLRLIYLALAHMIKFRGHFLIEGDLNPDNSDVDKLFIQLVQTYNQLFEENPINASGVDAKAILSARLSKSRRLENLIAQLPGEKKNGLFGNLIALSLGLTPNFKSNFDLAEDAKLQLSKDTYDDDLDNLLAQIGDQYADLFLAAKNLSDAILLSDILRVNTEITKAPLSASMIKRYDEHHQDLTLLKALVRQQLPEKYKEIFFDQSKNGYAGYIDGGASQEEFYKFIKPILEKMDGTEELLVKLNREDLLRKQRTFDNGSIPHQIHLGELHAILRRQEDFYPFLKDNREKIEKILTFRIPYYVGPLARGNSRFAWMTRKSEETITPWNFEEVVDKGASAQSFIERMTNFDKNLPNEKVLPKHSLLYEYFTVYNELTKVKYVTEGMRKPAFLSGEQKKAIVDLLFKTNRKVTVKQLKEDYFKKIECFDSVEISGVEDRFNASLGTYHDLLKIIKDKDFLDNEENEDILEDIVLTLTLFEDREMIEERLKTYAHLFDDKVMKQLKRRRYTGWGRLSRKLINGIRDKQSGKTILDFLKSDGFANRNFMQLIHDDSLTFKEDIQKAQVSGQGDSLHEHIANLAGSPAIKKGILQTVKVVDELVKVMGRHKPENIVIEMARENQTTQKGQKNSRERMKRIEEGIKELGSQILKEHPVENTQLQNEKLYLYYLQNGRDMYVDQELDINRLSDYDVDHIVPQSFLKDDSIDNKVLTRSDKARGKSDNVPSEEVVKKMKNYWRQLLNAKLITQRKFDNLTKAERGGLSELDKAGFIKRQLVETRQITKHVAQILDSRMNTKYDENDKLIREVKVITLKSKLVSDFRKDFQFYKVREINNYHHAHDAYLNAVVGTALIKKYPKLESEFVYGDYKVYDVRKMIAKSEQEIGKATAKYFFYSNIMNFFKTEITLANGEIRKRPLIETNGETGEIVWDKGRDFATVRKVLSMPQVNIVKKTEVQTGGFSKESILPKRNSDKLIARKKDWDPKKYGGFDSPTVAYSVLVVAKVEKGKSKKLKSVKELLGITIMERSSFEKNPIDFLEAKGYKEVKKDLIIKLPKYSLFELENGRKRMLASAGELQKGNELALPSKYVNFLYLASHYEKLKGSPEDNEQKQLFVEQHKHYLDEIIEQISEFSKRVILADANLDKVLSAYNKHRDKPIREQAENIIHLFTLTNLGAPAAFKYFDTTIDRKRYTSTKEVLDATLIHQSITGLYETRIDLSQLGGDGGGGGGSSEAAAKGGVPWILKKPLELTIKLDLEEQQGTLLNNSILSKKGKEELKQLFEKYSALWQSWENQVGHRRIRPHKIATGTVKPTPQKQYHINPKAKPDIQIVINDLLKQGVLIQKESTMNTPVYPVPKPNGRWRMVLDYRAVNKVTPLIAVQNQHSYGILGSLFKGRYKTTIDLSNGFWAHPIVPEDYWITAFTWQGKQYCWTVLPQGFLNSPGLFTGDVVDLLQGIPNVEVYVDDVYISHDSEKEHLEYLDILFNRLKEAGYIISLKKSNIANSIVDFLGFQITNEGRGLTDTFKEKLENITAPTTLKQLQSILGLLNFARNFIPDFTELIAPLYALIPKSTKNYVPWQIEHSTTLETLITKLNGAEYLQGRKGDKTLIMKVNASYTTGYIRYYNEGEKKPISYVSIVFSKTELKFTELEKLLTTVHKGLLKALDLSMGQNIHVYSPIVSMQNIQKTPQTAKKALASRWLSWLSYLEDPRIRFFYDPQMPALKDLPAVDTGKDNKKHPSNFQHIFYTDGSAITSPTKEGHLNAGMGIVYFINKDGNLQKQQEWSISLGNHTAQFAEIAAFEFALKKCLPLGGNILVVTDSNYVAKAYNEELDVWASNGFVNNRKKPLKHISKWKSVADLKRLRPDVVVTHEPGHQKLDSSPHAYGNNLADQLATQASFKVHAGKRTADGSEFEKRTADGSEFESPKKKAKVE

SEQ ID NO: 770 - protein, 2087 aa, synthetic construct
MPAAKRVKLDGGDKKYSIGLDIGTNSVGWAVITDEYKVPSKKFKVLGNTDRHSIKKNLIGALLFDSGETAEATRLKRTARRRYTRRKNRICYLQEIFSNEMAKVDDSFFHRLEESFLVEEDKKHERHPIFGNIVDEVAYHEKYPTIYHLRKKLVDSTDKADLRLIYLALAHMIKFRGHFLIEGDLNPDNSDVDKLFIQLVQTYNQLFEENPINASGVDAKAILSARLSKSRRLENLIAQLPGEKKNGLFGNLIALSLGLTPNFKSNFDLAEDAKLQLSKDTYDDDLDNLLAQIGDQYADLFLAAKNLSDAILLSDILRVNTEITKAPLSASMIKRYDEHHQDLTLLKALVRQQLPEKYKEIFFDQSKNGYAGYIDGGASQEEFYKFIKPILEKMDGTEELLVKLNREDLLRKQRTFDNGSIPHQIHLGELHAILRRQEDFYPFLKDNREKIEKILTFRIPYYVGPLARGNSRFAWMTRKSEETITPWNFEEVVDKGASAQSFIERMTNFDKNLPNEKVLPKHSLLYEYFTVYNELTKVKYVTEGMRKPAFLSGEQKKAIVDLLFKTNRKVTVKQLKEDYFKKIECFDSVEISGVEDRFNASLGTYHDLLKIIKDKDFLDNEENEDILEDIVLTLTLFEDREMIEERLKTYAHLFDDKVMKQLKRRRYTGWGRLSRKLINGIRDKQSGKTILDFLKSDGFANRNFMQLIHDDSLTFKEDIQKAQVSGQGDSLHEHIANLAGSPAIKKGILQTVKVVDELVKVMGRHKPENIVIEMARENQTTQKGQKNSRERMKRIEEGIKELGSQILKEHPVENTQLQNEKLYLYYLQNGRDMYVDQELDINRLSDYDVDHIVPQSFLKDDSIDNKVLTRSDKARGKSDNVPSEEVVKKMKNYWRQLLNAKLITQRKFDNLTKAERGGLSELDKAGFIKRQLVETRQITKHVAQILDSRMNTKYDENDKLIREVKVITLKSKLVSDFRKDFQFYKVREINNYHHAHDAYLNAVVGTALIKKYPKLESEFVYGDYKVYDVRKMIAKSEQEIGKATAKYFFYSNIMNFFKTEITLANGEIRKRPLIETNGETGEIVWDKGRDFATVRKVLSMPQVNIVKKTEVQTGGFSKESILPKRNSDKLIARKKDWDPKKYGGFDSPTVAYSVLVVAKVEKGKSKKLKSVKELLGITIMERSSFEKNPIDFLEAKGYKEVKKDLIIKLPKYSLFELENGRKRMLASAGELQKGNELALPSKYVNFLYLASHYEKLKGSPEDNEQKQLFVEQHKHYLDEIIEQISEFSKRVILADANLDKVLSAYNKHRDKPIREQAENIIHLFTLTNLGAPAAFKYFDTTIDRKRYTSTKEVLDATLIHQSITGLYETRIDLSQLGGDGGGGGEAAAKGSSGGVPWILKKPLELTIKLDLEEQQGTLLNNSILSKKGKEELKQLFEKYSALWQSWENQVGHRRIRPHKIATGTVKPTPQKQYHINPKAKPDIQIVINDLLKQGVLIQKESTMNTPVYPVPKPNGRWRMVLDYRAVNKVTPLIAVQNQHSYGILGSLFKGRYKTTIDLSNGFWAHPIVPEDYWITAFTWQGKQYCWTVLPQGFLNSPGLFTGDVVDLLQGIPNVEVYVDDVYISHDSEKEHLEYLDILFNRLKEAGYIISLKKSNIANSIVDFLGFQITNEGRGLTDTFKEKLENITAPTTLKQLQSILGLLNFARNFIPDFTELIAPLYALIPKSTKNYVPWQIEHSTTLETLITKLNGAEYLQGRKGDKTLIMKVNASYTTGYIRYYNEGEKKPISYVSIVFSKTELKFTELEKLLTTVHKGLLKALDLSMGQNIHVYSPIVSMQNIQKTPQTAKKALASRWLSWLSYLEDPRIRFFYDPQMPALKDLPAVDTGKDNKKHPSNFQHIFYTDGSAITSPTKEGHLNAGMGIVYFINKDGNLQKQQEWSISLGNHTAQFAEIAAFEFALKKCLPLGGNILVVTDSNYVAKAYNEELDVWASNGFVNNRKKPLKHISKWKSVADLKRLRPDVVVTHEPGHQKLDSSPHAYGNNLADQLATQASFKVHAGKRTADGSEFEKRTADGSEFESPKKKAKVE

SEQ ID NO: 771 - protein, 2082 aa, synthetic construct
MPAAKRVKLDGGDKKYSIGLDIGTNSVGWAVITDEYKVPSKKFKVLGNTDRHSIKKNLIGALLFDSGETAEATRLKRTARRRYTRRKNRICYLQEIFSNEMAKVDDSFFHRLEESFLVEEDKKHERHPIFGNIVDEVAYHEKYPTIYHLRKKLVDSTDKADLRLIYLALAHMIKFRGHFLIEGDLNPDNSDVDKLFIQLVQTYNQLFEENPINASGVDAKAILSARLSKSRRLENLIAQLPGEKKNGLFGNLIALSLGLTPNFKSNFDLAEDAKLQLSKDTYDDDLDNLLAQIGDQYADLFLAAKNLSDAILLSDILRVNTEITKAPLSASMIKRYDEHHQDLTLLKALVRQQLPEKYKEIFFDQSKNGYAGYIDGGASQEEFYKFIKPILEKMDGTEELLVKLNREDLLRKQRTFDNGSIPHQIHLGELHAILRRQEDFYPFLKDNREKIEKILTFRIPYYVGPLARGNSRFAWMTRKSEETITPWNFEEVVDKGASAQSFIERMTNFDKNLPNEKVLPKHSLLYEYFTVYNELTKVKYVTEGMRKPAFLSGEQKKAIVDLLFKTNRKVTVKQLKEDYFKKIECFDSVEISGVEDRFNASLGTYHDLLKIIKDKDFLDNEENEDILEDIVLTLTLFEDREMIEERLKTYAHLFDDKVMKQLKRRRYTGWGRLSRKLINGIRDKQSGKTILDFLKSDGFANRNFMQLIHDDSLTFKEDIQKAQVSGQGDSLHEHIANLAGSPAIKKGILQTVKVVDELVKVMGRHKPENIVIEMARENQTTQKGQKNSRERMKRIEEGIKELGSQILKEHPVENTQLQNEKLYLYYLQNGRDMYVDQELDINRLSDYDVDHIVPQSFLKDDSIDNKVLTRSDKARGKSDNVPSEEVVKKMKNYWRQLLNAKLITQRKFDNLTKAERGGLSELDKAGFIKRQLVETRQITKHVAQILDSRMNTKYDENDKLIREVKVITLKSKLVSDFRKDFQFYKVREINNYHHAHDAYLNAVVGTALIKKYPKLESEFVYGDYKVYDVRKMIAKSEQEIGKATAKYFFYSNIMNFFKTEITLANGEIRKRPLIETNGETGEIVWDKGRDFATVRKVLSMPQVNIVKKTEVQTGGFSKESILPKRNSDKLIARKKDWDPKKYGGFDSPTVAYSVLVVAKVEKGKSKKLKSVKELLGITIMERSSFEKNPIDFLEAKGYKEVKKDLIIKLPKYSLFELENGRKRMLASAGELQKGNELALPSKYVNFLYLASHYEKLKGSPEDNEQKQLFVEQHKHYLDEIIEQISEFSKRVILADANLDKVLSAYNKHRDKPIREQAENIIHLFTLTNLGAPAAFKYFDTTIDRKRYTSTKEVLDATLIHQSITGLYETRIDLSQLGGDGGGSSGGGGGVPWILKKPLELTIKLDLEEQQGTLLNNSILSKKGKEELKQLFEKYSALWQSWENQVGHRRIRPHKIATGTVKPTPQKQYHINPKAKPDIQIVINDLLKQGVLIQKESTMNTPVYPVPKPNGRWRMVLDYRAVNKVTPLIAVQNQHSYGILGSLFKGRYKTTIDLSNGFWAHPIVPEDYWITAFTWQGKQYCWTVLPQGFLNSPGLFTGDVVDLLQGIPNVEVYVDDVYISHDSEKEHLEYLDILFNRLKEAGYIISLKKSNIANSIVDFLGFQITNEGRGLTDTFKEKLENITAPTTLKQLQSILGLLNFARNFIPDFTELIAPLYALIPKSTKNYVPWQIEHSTTLETLITKLNGAEYLQGRKGDKTLIMKVNASYTTGYIRYYNEGEKKPISYVSIVFSKTELKFTELEKLLTTVHKGLLKALDLSMGQNIHVYSPIVSMQNIQKTPQTAKKALASRWLSWLSYLEDPRIRFFYDPQMPALKDLPAVDTGKDNKKHPSNFQHIFYTDGSAITSPTKEGHLNAGMGIVYFINKDGNLQKQQEWSISLGNHTAQFAEIAAFEFALKKCLPLGGNILVVTDSNYVAKAYNEELDVWASNGFVNNRKKPLKHISKWKSVADLKRLRPDVVVTHEPGHQKLDSSPHAYGNNLADQLATQASFKVHAGKRTADGSEFEKRTADGSEFESPKKKAKVE

SEQ ID NO: 772 - protein, 2087 aa, synthetic construct
MPAAKRVKLDGGDKKYSIGLDIGTNSVGWAVITDEYKVPSKKFKVLGNTDRHSIKKNLIGALLFDSGETAEATRLKRTARRRYTRRKNRICYLQEIFSNEMAKVDDSFFHRLEESFLVEEDKKHERHPIFGNIVDEVAYHEKYPTIYHLRKKLVDSTDKADLRLIYLALAHMIKFRGHFLIEGDLNPDNSDVDKLFIQLVQTYNQLFEENPINASGVDAKAILSARLSKSRRLENLIAQLPGEKKNGLFGNLIALSLGLTPNFKSNFDLAEDAKLQLSKDTYDDDLDNLLAQIGDQYADLFLAAKNLSDAILLSDILRVNTEITKAPLSASMIKRYDEHHQDLTLLKALVRQQLPEKYKEIFFDQSKNGYAGYIDGGASQEEFYKFIKPILEKMDGTEELLVKLNREDLLRKQRTFDNGSIPHQIHLGELHAILRRQEDFYPFLKDNREKIEKILTFRIPYYVGPLARGNSRFAWMTRKSEETITPWNFEEVVDKGASAQSFIERMTNFDKNLPNEKVLPKHSLLYEYFTVYNELTKVKYVTEGMRKPAFLSGEQKKAIVDLLFKTNRKVTVKQLKEDYFKKIECFDSVEISGVEDRFNASLGTYHDLLKIIKDKDFLDNEENEDILEDIVLTLTLFEDREMIEERLKTYAHLFDDKVMKQLKRRRYTGWGRLSRKLINGIRDKQSGKTILDFLKSDGFANRNFMQLIHDDSLTFKEDIQKAQVSGQGDSLHEHIANLAGSPAIKKGILQTVKVVDELVKVMGRHKPENIVIEMARENQTTQKGQKNSRERMKRIEEGIKELGSQILKEHPVENTQLQNEKLYLYYLQNGRDMYVDQELDINRLSDYDVDHIVPQSFLKDDSIDNKVLTRSDKARGKSDNVPSEEVVKKMKNYWRQLLNAKLITQRKFDNLTKAERGGLSELDKAGFIKRQLVETRQITKHVAQILDSRMNTKYDENDKLIREVKVITLKSKLVSDFRKDFQFYKVREINNYHHAHDAYLNAVVGTALIKKYPKLESEFVYGDYKVYDVRKMIAKSEQEIGKATAKYFFYSNIMNFFKTEITLANGEIRKRPLIETNGETGEIVWDKGRDFATVRKVLSMPQVNIVKKTEVQTGGFSKESILPKRNSDKLIARKKDWDPKKYGGFDSPTVAYSVLVVAKVEKGKSKKLKSVKELLGITIMERSSFEKNPIDFLEAKGYKEVKKDLIIKLPKYSLFELENGRKRMLASAGELQKGNELALPSKYVNFLYLASHYEKLKGSPEDNEQKQLFVEQHKHYLDEIIEQISEFSKRVILADANLDKVLSAYNKHRDKPIREQAENIIHLFTLTNLGAPAAFKYFDTTIDRKRYTSTKEVLDATLIHQSITGLYETRIDLSQLGGDGGEAAAKPAPGGSGGVPWILKKPLELTIKLDLEEQQGTLLNNSILSKKGKEELKQLFEKYSALWQSWENQVGHRRIRPHKIATGTVKPTPQKQYHINPKAKPDIQIVINDLLKQGVLIQKESTMNTPVYPVPKPNGRWRMVLDYRAVNKVTPLIAVQNQHSYGILGSLFKGRYKTTIDLSNGFWAHPIVPEDYWITAFTWQGKQYCWTVLPQGFLNSPGLFTGDVVDLLQGIPNVEVYVDDVYISHDSEKEHLEYLDILFNRLKEAGYIISLKKSNIANSIVDFLGFQITNEGRGLTDTFKEKLENITAPTTLKQLQSILGLLNFARNFIPDFTELIAPLYALIPKSTKNYVPWQIEHSTTLETLITKLNGAEYLQGRKGDKTLIMKVNASYTTGYIRYYNEGEKKPISYVSIVFSKTELKFTELEKLLTTVHKGLLKALDLSMGQNIHVYSPIVSMQNIQKTPQTAKKALASRWLSWLSYLEDPRIRFFYDPQMPALKDLPAVDTGKDNKKHPSNFQHIFYTDGSAITSPTKEGHLNAGMGIVYFINKDGNLQKQQEWSISLGNHTAQFAEIAAFEFALKKCLPLGGNILVVTDSNYVAKAYNEELDVWASNGFVNNRKKPLKHISKWKSVADLKRLRPDVVVTHEPGHQKLDSSPHAYGNNLADQLATQASFKVHAGKRTADGSEFEKRTADGSEFESPKKKAKVE

SEQ ID NO: 773 - protein, 2088 aa, synthetic construct
MPAAKRVKLDGGDKKYSIGLDIGTNSVGWAVITDEYKVPSKKFKVLGNTDRHSIKKNLIGALLFDSGETAEATRLKRTARRRYTRRKNRICYLQEIFSNEMAKVDDSFFHRLEESFLVEEDKKHERHPIFGNIVDEVAYHEKYPTIYHLRKKLVDSTDKADLRLIYLALAHMIKFRGHFLIEGDLNPDNSDVDKLFIQLVQTYNQLFEENPINASGVDAKAILSARLSKSRRLENLIAQLPGEKKNGLFGNLIALSLGLTPNFKSNFDLAEDAKLQLSKDTYDDDLDNLLAQIGDQYADLFLAAKNLSDAILLSDILRVNTEITKAPLSASMIKRYDEHHQDLTLLKALVRQQLPEKYKEIFFDQSKNGYAGYIDGGASQEEFYKFIKPILEKMDGTEELLVKLNREDLLRKQRTFDNGSIPHQIHLGELHAILRRQEDFYPFLKDNREKIEKILTFRIPYYVGPLARGNSRFAWMTRKSEETITPWNFEEVVDKGASAQSFIERMTNFDKNLPNEKVLPKHSLLYEYFTVYNELTKVKYVTEGMRKPAFLSGEQKKAIVDLLFKTNRKVTVKQLKEDYFKKIECFDSVEISGVEDRFNASLGTYHDLLKIIKDKDFLDNEENEDILEDIVLTLTLFEDREMIEERLKTYAHLFDDKVMKQLKRRRYTGWGRLSRKLINGIRDKQSGKTILDFLKSDGFANRNFMQLIHDDSLTFKEDIQKAQVSGQGDSLHEHIANLAGSPAIKKGILQTVKVVDELVKVMGRHKPENIVIEMARENQTTQKGQKNSRERMKRIEEGIKELGSQILKEHPVENTQLQNEKLYLYYLQNGRDMYVDQELDINRLSDYDVDHIVPQSFLKDDSIDNKVLTRSDKARGKSDNVPSEEVVKKMKNYWRQLLNAKLITQRKFDNLTKAERGGLSELDKAGFIKRQLVETRQITKHVAQILDSRMNTKYDENDKLIREVKVITLKSKLVSDFRKDFQFYKVREINNYHHAHDAYLNAVVGTALIKKYPKLESEFVYGDYKVYDVRKMIAKSEQEIGKATAKYFFYSNIMNFFKTEITLANGEIRKRPLIETNGETGEIVWDKGRDFATVRKVLSMPQVNIVKKTEVQTGGFSKESILPKRNSDKLIARKKDWDPKKYGGFDSPTVAYSVLVVAKVEKGKSKKLKSVKELLGITIMERSSFEKNPIDFLEAKGYKEVKKDLIIKLPKYSLFELENGRKRMLASAGELQKGNELALPSKYVNFLYLASHYEKLKGSPEDNEQKQLFVEQHKHYLDEIIEQISEFSKRVILADANLDKVLSAYNKHRDKPIREQAENIIHLFTLTNLGAPAAFKYFDTTIDRKRYTSTKEVLDATLIHQSITGLYETRIDLSQLGGDGGGSSGSSGSSGSSGGVPWILKKPLELTIKLDLEEQQGTLLNNSILSKKGKEELKQLFEKYSALWQSWENQVGHRRIRPHKIATGTVKPTPQKQYHINPKAKPDIQIVINDLLKQGVLIQKESTMNTPVYPVPKPNGRWRMVLDYRAVNKVTPLIAVQNQHSYGILGSLFKGRYKTTIDLSNGFWAHPIVPEDYWITAFTWQGKQYCWTVLPQGFLNSPGLFTGDVVDLLQGIPNVEVYVDDVYISHDSEKEHLEYLDILFNRLKEAGYIISLKKSNIANSIVDFLGFQITNEGRGLTDTFKEKLENITAPTTLKQLQSILGLLNFARNFIPDFTELIAPLYALIPKSTKNYVPWQIEHSTTLETLITKLNGAEYLQGRKGDKTLIMKVNASYTTGYIRYYNEGEKKPISYVSIVFSKTELKFTELEKLLTTVHKGLLKALDLSMGQNIHVYSPIVSMQNIQKTPQTAKKALASRWLSWLSYLEDPRIRFFYDPQMPALKDLPAVDTGKDNKKHPSNFQHIFYTDGSAITSPTKEGHLNAGMGIVYFINKDGNLQKQQEWSISLGNHTAQFAEIAAFEFALKKCLPLGGNILVVTDSNYVAKAYNEELDVWASNGFVNNRKKPLKHISKWKSVADLKRLRPDVVVTHEPGHQKLDSSPHAYGNNLADQLATQASFKVHAGKRTADGSEFEKRTADGSEFESPKKKAKVE

SEQ ID NO: 774 - protein, 2085 aa, synthetic construct
MPAAKRVKLDGGDKKYSIGLDIGTNSVGWAVITDEYKVPSKKFKVLGNTDRHSIKKNLIGALLFDSGETAEATRLKRTARRRYTRRKNRICYLQEIFSNEMAKVDDSFFHRLEESFLVEEDKKHERHPIFGNIVDEVAYHEKYPTIYHLRKKLVDSTDKADLRLIYLALAHMIKFRGHFLIEGDLNPDNSDVDKLFIQLVQTYNQLFEENPINASGVDAKAILSARLSKSRRLENLIAQLPGEKKNGLFGNLIALSLGLTPNFKSNFDLAEDAKLQLSKDTYDDDLDNLLAQIGDQYADLFLAAKNLSDAILLSDILRVNTEITKAPLSASMIKRYDEHHQDLTLLKALVRQQLPEKYKEIFFDQSKNGYAGYIDGGASQEEFYKFIKPILEKMDGTEELLVKLNREDLLRKQRTFDNGSIPHQIHLGELHAILRRQEDFYPFLKDNREKIEKILTFRIPYYVGPLARGNSRFAWMTRKSEETITPWNFEEVVDKGASAQSFIERMTNFDKNLPNEKVLPKHSLLYEYFTVYNELTKVKYVTEGMRKPAFLSGEQKKAIVDLLFKTNRKVTVKQLKEDYFKKIECFDSVEISGVEDRFNASLGTYHDLLKIIKDKDFLDNEENEDILEDIVLTLTLFEDREMIEERLKTYAHLFDDKVMKQLKRRRYTGWGRLSRKLINGIRDKQSGKTILDFLKSDGFANRNFMQLIHDDSLTFKEDIQKAQVSGQGDSLHEHIANLAGSPAIKKGILQTVKVVDELVKVMGRHKPENIVIEMARENQTTQKGQKNSRERMKRIEEGIKELGSQILKEHPVENTQLQNEKLYLYYLQNGRDMYVDQELDINRLSDYDVDHIVPQSFLKDDSIDNKVLTRSDKARGKSDNVPSEEVVKKMKNYWRQLLNAKLITQRKFDNLTKAERGGLSELDKAGFIKRQLVETRQITKHVAQILDSRMNTKYDENDKLIREVKVITLKSKLVSDFRKDFQFYKVREINNYHHAHDAYLNAVVGTALIKKYPKLESEFVYGDYKVYDVRKMIAKSEQEIGKATAKYFFYSNIMNFFKTEITLANGEIRKRPLIETNGETGEIVWDKGRDFATVRKVLSMPQVNIVKKTEVQTGGFSKESILPKRNSDKLIARKKDWDPKKYGGFDSPTVAYSVLVVAKVEKGKSKKLKSVKELLGITIMERSSFEKNPIDFLEAKGYKEVKKDLIIKLPKYSLFELENGRKRMLASAGELQKGNELALPSKYVNFLYLASHYEKLKGSPEDNEQKQLFVEQHKHYLDEIIEQISEFSKRVILADANLDKVLSAYNKHRDKPIREQAENIIHLFTLTNLGAPAAFKYFDTTIDRKRYTSTKEVLDATLIHQSITGLYETRIDLSQLGGDGGGGGGGSGSSGGVPWILKKPLELTIKLDLEEQQGTLLNNSILSKKGKEELKQLFEKYSALWQSWENQVGHRRIRPHKIATGTVKPTPQKQYHINPKAKPDIQIVINDLLKQGVLIQKESTMNTPVYPVPKPNGRWRMVLDYRAVNKVTPLIAVQNQHSYGILGSLFKGRYKTTIDLSNGFWAHPIVPEDYWITAFTWQGKQYCWTVLPQGFLNSPGLFTGDVVDLLQGIPNVEVYVDDVYISHDSEKEHLEYLDILFNRLKEAGYIISLKKSNIANSIVDFLGFQITNEGRGLTDTFKEKLENITAPTTLKQLQSILGLLNFARNFIPDFTELIAPLYALIPKSTKNYVPWQIEHSTTLETLITKLNGAEYLQGRKGDKTLIMKVNASYTTGYIRYYNEGEKKPISYVSIVFSKTELKFTELEKLLTTVHKGLLKALDLSMGQNIHVYSPIVSMQNIQKTPQTAKKALASRWLSWLSYLEDPRIRFFYDPQMPALKDLPAVDTGKDNKKHPSNFQHIFYTDGSAITSPTKEGHLNAGMGIVYFINKDGNLQKQQEWSISLGNHTAQFAEIAAFEFALKKCLPLGGNILVVTDSNYVAKAYNEELDVWASNGFVNNRKKPLKHISKWKSVADLKRLRPDVVVTHEPGHQKLDSSPHAYGNNLADQLATQASFKVHAGKRTADGSEFEKRTADGSEFESPKKKAKVE

SEQ ID NO: 775 - protein, 2085 aa, synthetic construct
MPAAKRVKLDGGDKKYSIGLDIGTNSVGWAVITDEYKVPSKKFKVLGNTDRHSIKKNLIGALLFDSGETAEATRLKRTARRRYTRRKNRICYLQEIFSNEMAKVDDSFFHRLEESFLVEEDKKHERHPIFGNIVDEVAYHEKYPTIYHLRKKLVDSTDKADLRLIYLALAHMIKFRGHFLIEGDLNPDNSDVDKLFIQLVQTYNQLFEENPINASGVDAKAILSARLSKSRRLENLIAQLPGEKKNGLFGNLIALSLGLTPNFKSNFDLAEDAKLQLSKDTYDDDLDNLLAQIGDQYADLFLAAKNLSDAILLSDILRVNTEITKAPLSASMIKRYDEHHQDLTLLKALVRQQLPEKYKEIFFDQSKNGYAGYIDGGASQEEFYKFIKPILEKMDGTEELLVKLNREDLLRKQRTFDNGSIPHQIHLGELHAILRRQEDFYPFLKDNREKIEKILTFRIPYYVGPLARGNSRFAWMTRKSEETITPWNFEEVVDKGASAQSFIERMTNFDKNLPNEKVLPKHSLLYEYFTVYNELTKVKYVTEGMRKPAFLSGEQKKAIVDLLFKTNRKVTVKQLKEDYFKKIECFDSVEISGVEDRFNASLGTYHDLLKIIKDKDFLDNEENEDILEDIVLTLTLFEDREMIEERLKTYAHLFDDKVMKQLKRRRYTGWGRLSRKLINGIRDKQSGKTILDFLKSDGFANRNFMQLIHDDSLTFKEDIQKAQVSGQGDSLHEHIANLAGSPAIKKGILQTVKVVDELVKVMGRHKPENIVIEMARENQTTQKGQKNSRERMKRIEEGIKELGSQILKEHPVENTQLQNEKLYLYYLQNGRDMYVDQELDINRLSDYDVDHIVPQSFLKDDSIDNKVLTRSDKARGKSDNVPSEEVVKKMKNYWRQLLNAKLITQRKFDNLTKAERGGLSELDKAGFIKRQLVETRQITKHVAQILDSRMNTKYDENDKLIREVKVITLKSKLVSDFRKDFQFYKVREINNYHHAHDAYLNAVVGTALIKKYPKLESEFVYGDYKVYDVRKMIAKSEQEIGKATAKYFFYSNIMNFFKTEITLANGEIRKRPLIETNGETGEIVWDKGRDFATVRKVLSMPQVNIVKKTEVQTGGFSKESILPKRNSDKLIARKKDWDPKKYGGFDSPTVAYSVLVVAKVEKGKSKKLKSVKELLGITIMERSSFEKNPIDFLEAKGYKEVKKDLIIKLPKYSLFELENGRKRMLASAGELQKGNELALPSKYVNFLYLASHYEKLKGSPEDNEQKQLFVEQHKHYLDEIIEQISEFSKRVILADANLDKVLSAYNKHRDKPIREQAENIIHLFTLTNLGAPAAFKYFDTTIDRKRYTSTKEVLDATLIHQSITGLYETRIDLSQLGGDGGGSSGGSPAPGGVPWILKKPLELTIKLDLEEQQGTLLNNSILSKKGKEELKQLFEKYSALWQSWENQVGHRRIRPHKIATGTVKPTPQKQYHINPKAKPDIQIVINDLLKQGVLIQKESTMNTPVYPVPKPNGRWRMVLDYRAVNKVTPLIAVQNQHSYGILGSLFKGRYKTTIDLSNGFWAHPIVPEDYWITAFTWQGKQYCWTVLPQGFLNSPGLFTGDVVDLLQGIPNVEVYVDDVYISHDSEKEHLEYLDILFNRLKEAGYIISLKKSNIANSIVDFLGFQITNEGRGLTDTFKEKLENITAPTTLKQLQSILGLLNFARNFIPDFTELIAPLYALIPKSTKNYVPWQIEHSTTLETLITKLNGAEYLQGRKGDKTLIMKVNASYTTGYIRYYNEGEKKPISYVSIVFSKTELKFTELEKLLTTVHKGLLKALDLSMGQNIHVYSPIVSMQNIQKTPQTAKKALASRWLSWLSYLEDPRIRFFYDPQMPALKDLPAVDTGKDNKKHPSNFQHIFYTDGSAITSPTKEGHLNAGMGIVYFINKDGNLQKQQEWSISLGNHTAQFAEIAAFEFALKKCLPLGGNILVVTDSNYVAKAYNEELDVWASNGFVNNRKKPLKHISKWKSVADLKRLRPDVVVTHEPGHQKLDSSPHAYGNNLADQLATQASFKVHAGKRTADGSEFEKRTADGSEFESPKKKAKVE

SEQ ID NO: 776 - protein, 2084 aa, synthetic construct
MPAAKRVKLDGGDKKYSIGLDIGTNSVGWAVITDEYKVPSKKFKVLGNTDRHSIKKNLIGALLFDSGETAEATRLKRTARRRYTRRKNRICYLQEIFSNEMAKVDDSFFHRLEESFLVEEDKKHERHPIFGNIVDEVAYHEKYPTIYHLRKKLVDSTDKADLRLIYLALAHMIKFRGHFLIEGDLNPDNSDVDKLFIQLVQTYNQLFEENPINASGVDAKAILSARLSKSRRLENLIAQLPGEKKNGLFGNLIALSLGLTPNFKSNFDLAEDAKLQLSKDTYDDDLDNLLAQIGDQYADLFLAAKNLSDAILLSDILRVNTEITKAPLSASMIKRYDEHHQDLTLLKALVRQQLPEKYKEIFFDQSKNGYAGYIDGGASQEEFYKFIKPILEKMDGTEELLVKLNREDLLRKQRTFDNGSIPHQIHLGELHAILRRQEDFYPFLKDNREKIEKILTFRIPYYVGPLARGNSRFAWMTRKSEETITPWNFEEVVDKGASAQSFIERMTNFDKNLPNEKVLPKHSLLYEYFTVYNELTKVKYVTEGMRKPAFLSGEQKKAIVDLLFKTNRKVTVKQLKEDYFKKIECFDSVEISGVEDRFNASLGTYHDLLKIIKDKDFLDNEENEDILEDIVLTLTLFEDREMIEERLKTYAHLFDDKVMKQLKRRRYTGWGRLSRKLINGIRDKQSGKTILDFLKSDGFANRNFMQLIHDDSLTFKEDIQKAQVSGQGDSLHEHIANLAGSPAIKKGILQTVKVVDELVKVMGRHKPENIVIEMARENQTTQKGQKNSRERMKRIEEGIKELGSQILKEHPVENTQLQNEKLYLYYLQNGRDMYVDQELDINRLSDYDVDHIVPQSFLKDDSIDNKVLTRSDKARGKSDNVPSEEVVKKMKNYWRQLLNAKLITQRKFDNLTKAERGGLSELDKAGFIKRQLVETRQITKHVAQILDSRMNTKYDENDKLIREVKVITLKSKLVSDFRKDFQFYKVREINNYHHAHDAYLNAVVGTALIKKYPKLESEFVYGDYKVYDVRKMIAKSEQEIGKATAKYFFYSNIMNFFKTEITLANGEIRKRPLIETNGETGEIVWDKGRDFATVRKVLSMPQVNIVKKTEVQTGGFSKESILPKRNSDKLIARKKDWDPKKYGGFDSPTVAYSVLVVAKVEKGKSKKLKSVKELLGITIMERSSFEKNPIDFLEAKGYKEVKKDLIIKLPKYSLFELENGRKRMLASAGELQKGNELALPSKYVNFLYLASHYEKLKGSPEDNEQKQLFVEQHKHYLDEIIEQISEFSKRVILADANLDKVLSAYNKHRDKPIREQAENIIHLFTLTNLGAPAAFKYFDTTIDRKRYTSTKEVLDATLIHQSITGLYETRIDLSQLGGDGGGGSEAAAKGGVPWILKKPLELTIKLDLEEQQGTLLNNSILSKKGKEELKQLFEKYSALWQSWENQVGHRRIRPHKIATGTVKPTPQKQYHINPKAKPDIQIVINDLLKQGVLIQKESTMNTPVYPVPKPNGRWRMVLDYRAVNKVTPLIAVQNQHSYGILGSLFKGRYKTTIDLSNGFWAHPIVPEDYWITAFTWQGKQYCWTVLPQGFLNSPGLFTGDVVDLLQGIPNVEVYVDDVYISHDSEKEHLEYLDILFNRLKEAGYIISLKKSNIANSIVDFLGFQITNEGRGLTDTFKEKLENITAPTTLKQLQSILGLLNFARNFIPDFTELIAPLYALIPKSTKNYVPWQIEHSTTLETLITKLNGAEYLQGRKGDKTLIMKVNASYTTGYIRYYNEGEKKPISYVSIVFSKTELKFTELEKLLTTVHKGLLKALDLSMGQNIHVYSPIVSMQNIQKTPQTAKKALASRWLSWLSYLEDPRIRFFYDPQMPALKDLPAVDTGKDNKKHPSNFQHIFYTDGSAITSPTKEGHLNAGMGIVYFINKDGNLQKQQEWSISLGNHTAQFAEIAAFEFALKKCLPLGGNILVVTDSNYVAKAYNEELDVWASNGFVNNRKKPLKHISKWKSVADLKRLRPDVVVTHEPGHQKLDSSPHAYGNNLADQLATQASFKVHAGKRTADGSEFEKRTADGSEFESPKKKAKVE

SEQ ID NO: 777 - protein, 2085 aa, synthetic construct
MPAAKRVKLDGGDKKYSIGLDIGTNSVGWAVITDEYKVPSKKFKVLGNTDRHSIKKNLIGALLFDSGETAEATRLKRTARRRYTRRKNRICYLQEIFSNEMAKVDDSFFHRLEESFLVEEDKKHERHPIFGNIVDEVAYHEKYPTIYHLRKKLVDSTDKADLRLIYLALAHMIKFRGHFLIEGDLNPDNSDVDKLFIQLVQTYNQLFEENPINASGVDAKAILSARLSKSRRLENLIAQLPGEKKNGLFGNLIALSLGLTPNFKSNFDLAEDAKLQLSKDTYDDDLDNLLAQIGDQYADLFLAAKNLSDAILLSDILRVNTEITKAPLSASMIKRYDEHHQDLTLLKALVRQQLPEKYKEIFFDQSKNGYAGYIDGGASQEEFYKFIKPILEKMDGTEELLVKLNREDLLRKQRTFDNGSIPHQIHLGELHAILRRQEDFYPFLKDNREKIEKILTFRIPYYVGPLARGNSRFAWMTRKSEETITPWNFEEVVDKGASAQSFIERMTNFDKNLPNEKVLPKHSLLYEYFTVYNELTKVKYVTEGMRKPAFLSGEQKKAIVDLLFKTNRKVTVKQLKEDYFKKIECFDSVEISGVEDRFNASLGTYHDLLKIIKDKDFLDNEENEDILEDIVLTLTLFEDREMIEERLKTYAHLFDDKVMKQLKRRRYTGWGRLSRKLINGIRDKQSGKTILDFLKSDGFANRNFMQLIHDDSLTFKEDIQKAQVSGQGDSLHEHIANLAGSPAIKKGILQTVKVVDELVKVMGRHKPENIVIEMARENQTTQKGQKNSRERMKRIEEGIKELGSQILKEHPVENTQLQNEKLYLYYLQNGRDMYVDQELDINRLSDYDVDHIVPQSFLKDDSIDNKVLTRSDKARGKSDNVPSEEVVKKMKNYWRQLLNAKLITQRKFDNLTKAERGGLSELDKAGFIKRQLVETRQITKHVAQILDSRMNTKYDENDKLIREVKVITLKSKLVSDFRKDFQFYKVREINNYHHAHDAYLNAVVGTALIKKYPKLESEFVYGDYKVYDVRKMIAKSEQEIGKATAKYFFYSNIMNFFKTEITLANGEIRKRPLIETNGETGEIVWDKGRDFATVRKVLSMPQVNIVKKTEVQTGGFSKESILPKRNSDKLIARKKDWDPKKYGGFDSPTVAYSVLVVAKVEKGKSKKLKSVKELLGITIMERSSFEKNPIDFLEAKGYKEVKKDLIIKLPKYSLFELENGRKRMLASAGELQKGNELALPSKYVNFLYLASHYEKLKGSPEDNEQKQLFVEQHKHYLDEIIEQISEFSKRVILADANLDKVLSAYNKHRDKPIREQAENIIHLFTLTNLGAPAAFKYFDTTIDRKRYTSTKEVLDATLIHQSITGLYETRIDLSQLGGDGGGGGGSSPAPGGVPWILKKPLELTIKLDLEEQQGTLLNNSILSKKGKEELKQLFEKYSALWQSWENQVGHRRIRPHKIATGTVKPTPQKQYHINPKAKPDIQIVINDLLKQGVLIQKESTMNTPVYPVPKPNGRWRMVLDYRAVNKVTPLIAVQNQHSYGILGSLFKGRYKTTIDLSNGFWAHPIVPEDYWITAFTWQGKQYCWTVLPQGFLNSPGLFTGDVVDLLQGIPNVEVYVDDVYISHDSEKEHLEYLDILFNRLKEAGYIISLKKSNIANSIVDFLGFQITNEGRGLTDTFKEKLENITAPTTLKQLQSILGLLNFARNFIPDFTELIAPLYALIPKSTKNYVPWQIEHSTTLETLITKLNGAEYLQGRKGDKTLIMKVNASYTTGYIRYYNEGEKKPISYVSIVFSKTELKFTELEKLLTTVHKGLLKALDLSMGQNIHVYSPIVSMQNIQKTPQTAKKALASRWLSWLSYLEDPRIRFFYDPQMPALKDLPAVDTGKDNKKHPSNFQHIFYTDGSAITSPTKEGHLNAGMGIVYFINKDGNLQKQQEWSISLGNHTAQFAEIAAFEFALKKCLPLGGNILVVTDSNYVAKAYNEELDVWASNGFVNNRKKPLKHISKWKSVADLKRLRPDVVVTHEPGHQKLDSSPHAYGNNLADQLATQASFKVHAGKRTADGSEFEKRTADGSEFESPKKKAKVE

SEQ ID NO: 778 - protein, 2091 aa, synthetic construct
MPAAKRVKLDGGDKKYSIGLDIGTNSVGWAVITDEYKVPSKKFKVLGNTDRHSIKKNLIGALLFDSGETAEATRLKRTARRRYTRRKNRICYLQEIFSNEMAKVDDSFFHRLEESFLVEEDKKHERHPIFGNIVDEVAYHEKYPTIYHLRKKLVDSTDKADLRLIYLALAHMIKFRGHFLIEGDLNPDNSDVDKLFIQLVQTYNQLFEENPINASGVDAKAILSARLSKSRRLENLIAQLPGEKKNGLFGNLIALSLGLTPNFKSNFDLAEDAKLQLSKDTYDDDLDNLLAQIGDQYADLFLAAKNLSDAILLSDILRVNTEITKAPLSASMIKRYDEHHQDLTLLKALVRQQLPEKYKEIFFDQSKNGYAGYIDGGASQEEFYKFIKPILEKMDGTEELLVKLNREDLLRKQRTFDNGSIPHQIHLGELHAILRRQEDFYPFLKDNREKIEKILTFRIPYYVGPLARGNSRFAWMTRKSEETITPWNFEEVVDKGASAQSFIERMTNFDKNLPNEKVLPKHSLLYEYFTVYNELTKVKYVTEGMRKPAFLSGEQKKAIVDLLFKTNRKVTVKQLKEDYFKKIECFDSVEISGVEDRFNASLGTYHDLLKIIKDKDFLDNEENEDILEDIVLTLTLFEDREMIEERLKTYAHLFDDKVMKQLKRRRYTGWGRLSRKLINGIRDKQSGKTILDFLKSDGFANRNFMQLIHDDSLTFKEDIQKAQVSGQGDSLHEHIANLAGSPAIKKGILQTVKVVDELVKVMGRHKPENIVIEMARENQTTQKGQKNSRERMKRIEEGIKELGSQILKEHPVENTQLQNEKLYLYYLQNGRDMYVDQELDINRLSDYDVDHIVPQSFLKDDSIDNKVLTRSDKARGKSDNVPSEEVVKKMKNYWRQLLNAKLITQRKFDNLTKAERGGLSELDKAGFIKRQLVETRQITKHVAQILDSRMNTKYDENDKLIREVKVITLKSKLVSDFRKDFQFYKVREINNYHHAHDAYLNAVVGTALIKKYPKLESEFVYGDYKVYDVRKMIAKSEQEIGKATAKYFFYSNIMNFFKTEITLANGEIRKRPLIETNGETGEIVWDKGRDFATVRKVLSMPQVNIVKKTEVQTGGFSKESILPKRNSDKLIARKKDWDPKKYGGFDSPTVAYSVLVVAKVEKGKSKKLKSVKELLGITIMERSSFEKNPIDFLEAKGYKEVKKDLIIKLPKYSLFELENGRKRMLASAGELQKGNELALPSKYVNFLYLASHYEKLKGSPEDNEQKQLFVEQHKHYLDEIIEQISEFSKRVILADANLDKVLSAYNKHRDKPIREQAENIIHLFTLTNLGAPAAFKYFDTTIDRKRYTSTKEVLDATLIHQSITGLYETRIDLSQLGGDGGEAAAKGGGGSEAAAKGGVPWILKKPLELTIKLDLEEQQGTLLNNSILSKKGKEELKQLFEKYSALWQSWENQVGHRRIRPHKIATGTVKPTPQKQYHINPKAKPDIQIVINDLLKQGVLIQKESTMNTPVYPVPKPNGRWRMVLDYRAVNKVTPLIAVQNQHSYGILGSLFKGRYKTTIDLSNGFWAHPIVPEDYWITAFTWQGKQYCWTVLPQGFLNSPGLFTGDVVDLLQGIPNVEVYVDDVYISHDSEKEHLEYLDILFNRLKEAGYIISLKKSNIANSIVDFLGFQITNEGRGLTDTFKEKLENITAPTTLKQLQSILGLLNFARNFIPDFTELIAPLYALIPKSTKNYVPWQIEHSTTLETLITKLNGAEYLQGRKGDKTLIMKVNASYTTGYIRYYNEGEKKPISYVSIVFSKTELKFTELEKLLTTVHKGLLKALDLSMGQNIHVYSPIVSMQNIQKTPQTAKKALASRWLSWLSYLEDPRIRFFYDPQMPALKDLPAVDTGKDNKKHPSNFQHIFYTDGSAITSPTKEGHLNAGMGIVYFINKDGNLQKQQEWSISLGNHTAQFAEIAAFEFALKKCLPLGGNILVVTDSNYVAKAYNEELDVWASNGFVNNRKKPLKHISKWKSVADLKRLRPDVVVTHEPGHQKLDSSPHAYGNNLADQLATQASFKVHAGKRTADGSEFEKRTADGSEFESPKKKAKVE

SEQ ID NO: 779 - protein, 2087 aa, synthetic construct
MPAAKRVKLDGGDKKYSIGLDIGTNSVGWAVITDEYKVPSKKFKVLGNTDRHSIKKNLIGALLFDSGETAEATRLKRTARRRYTRRKNRICYLQEIFSNEMAKVDDSFFHRLEESFLVEEDKKHERHPIFGNIVDEVAYHEKYPTIYHLRKKLVDSTDKADLRLIYLALAHMIKFRGHFLIEGDLNPDNSDVDKLFIQLVQTYNQLFEENPINASGVDAKAILSARLSKSRRLENLIAQLPGEKKNGLFGNLIALSLGLTPNFKSNFDLAEDAKLQLSKDTYDDDLDNLLAQIGDQYADLFLAAKNLSDAILLSDILRVNTEITKAPLSASMIKRYDEHHQDLTLLKALVRQQLPEKYKEIFFDQSKNGYAGYIDGGASQEEFYKFIKPILEKMDGTEELLVKLNREDLLRKQRTFDNGSIPHQIHLGELHAILRRQEDFYPFLKDNREKIEKILTFRIPYYVGPLARGNSRFAWMTRKSEETITPWNFEEVVDKGASAQSFIERMTNFDKNLPNEKVLPKHSLLYEYFTVYNELTKVKYVTEGMRKPAFLSGEQKKAIVDLLFKTNRKVTVKQLKEDYFKKIECFDSVEISGVEDRFNASLGTYHDLLKIIKDKDFLDNEENEDILEDIVLTLTLFEDREMIEERLKTYAHLFDDKVMKQLKRRRYTGWGRLSRKLINGIRDKQSGKTILDFLKSDGFANRNFMQLIHDDSLTFKEDIQKAQVSGQGDSLHEHIANLAGSPAIKKGILQTVKVVDELVKVMGRHKPENIVIEMARENQTTQKGQKNSRERMKRIEEGIKELGSQILKEHPVENTQLQNEKLYLYYLQNGRDMYVDQELDINRLSDYDVDHIVPQSFLKDDSIDNKVLTRSDKARGKSDNVPSEEVVKKMKNYWRQLLNAKLITQRKFDNLTKAERGGLSELDKAGFIKRQLVETRQITKHVAQILDSRMNTKYDENDKLIREVKVITLKSKLVSDFRKDFQFYKVREINNYHHAHDAYLNAVVGTALIKKYPKLESEFVYGDYKVYDVRKMIAKSEQEIGKATAKYFFYSNIMNFFKTEITLANGEIRKRPLIETNGETGEIVWDKGRDFATVRKVLSMPQVNIVKKTEVQTGGFSKESILPKRNSDKLIARKKDWDPKKYGGFDSPTVAYSVLVVAKVEKGKSKKLKSVKELLGITIMERSSFEKNPIDFLEAKGYKEVKKDLIIKLPKYSLFELENGRKRMLASAGELQKGNELALPSKYVNFLYLASHYEKLKGSPEDNEQKQLFVEQHKHYLDEIIEQISEFSKRVILADANLDKVLSAYNKHRDKPIREQAENIIHLFTLTNLGAPAAFKYFDTTIDRKRYTSTKEVLDATLIHQSITGLYETRIDLSQLGGDGGEAAAKGGSGSSGGVPWILKKPLELTIKLDLEEQQGTLLNNSILSKKGKEELKQLFEKYSALWQSWENQVGHRRIRPHKIATGTVKPTPQKQYHINPKAKPDIQIVINDLLKQGVLIQKESTMNTPVYPVPKPNGRWRMVLDYRAVNKVTPLIAVQNQHSYGILGSLFKGRYKTTIDLSNGFWAHPIVPEDYWITAFTWQGKQYCWTVLPQGFLNSPGLFTGDVVDLLQGIPNVEVYVDDVYISHDSEKEHLEYLDILFNRLKEAGYIISLKKSNIANSIVDFLGFQITNEGRGLTDTFKEKLENITAPTTLKQLQSILGLLNFARNFIPDFTELIAPLYALIPKSTKNYVPWQIEHSTTLETLITKLNGAEYLQGRKGDKTLIMKVNASYTTGYIRYYNEGEKKPISYVSIVFSKTELKFTELEKLLTTVHKGLLKALDLSMGQNIHVYSPIVSMQNIQKTPQTAKKALASRWLSWLSYLEDPRIRFFYDPQMPALKDLPAVDTGKDNKKHPSNFQHIFYTDGSAITSPTKEGHLNAGMGIVYFINKDGNLQKQQEWSISLGNHTAQFAEIAAFEFALKKCLPLGGNILVVTDSNYVAKAYNEELDVWASNGFVNNRKKPLKHISKWKSVADLKRLRPDVVVTHEPGHQKLDSSPHAYGNNLADQLATQASFKVHAGKRTADGSEFEKRTADGSEFESPKKKAKVE

SEQ ID NO: 780 - protein, 2085 aa, synthetic construct
MPAAKRVKLDGGDKKYSIGLDIGTNSVGWAVITDEYKVPSKKFKVLGNTDRHSIKKNLIGALLFDSGETAEATRLKRTARRRYTRRKNRICYLQEIFSNEMAKVDDSFFHRLEESFLVEEDKKHERHPIFGNIVDEVAYHEKYPTIYHLRKKLVDSTDKADLRLIYLALAHMIKFRGHFLIEGDLNPDNSDVDKLFIQLVQTYNQLFEENPINASGVDAKAILSARLSKSRRLENLIAQLPGEKKNGLFGNLIALSLGLTPNFKSNFDLAEDAKLQLSKDTYDDDLDNLLAQIGDQYADLFLAAKNLSDAILLSDILRVNTEITKAPLSASMIKRYDEHHQDLTLLKALVRQQLPEKYKEIFFDQSKNGYAGYIDGGASQEEFYKFIKPILEKMDGTEELLVKLNREDLLRKQRTFDNGSIPHQIHLGELHAILRRQEDFYPFLKDNREKIEKILTFRIPYYVGPLARGNSRFAWMTRKSEETITPWNFEEVVDKGASAQSFIERMTNFDKNLPNEKVLPKHSLLYEYFTVYNELTKVKYVTEGMRKPAFLSGEQKKAIVDLLFKTNRKVTVKQLKEDYFKKIECFDSVEISGVEDRFNASLGTYHDLLKIIKDKDFLDNEENEDILEDIVLTLTLFEDREMIEERLKTYAHLFDDKVMKQLKRRRYTGWGRLSRKLINGIRDKQSGKTILDFLKSDGFANRNFMQLIHDDSLTFKEDIQKAQVSGQGDSLHEHIANLAGSPAIKKGILQTVKVVDELVKVMGRHKPENIVIEMARENQTTQKGQKNSRERMKRIEEGIKELGSQILKEHPVENTQLQNEKLYLYYLQNGRDMYVDQELDINRLSDYDVDHIVPQSFLKDDSIDNKVLTRSDKARGKSDNVPSEEVVKKMKNYWRQLLNAKLITQRKFDNLTKAERGGLSELDKAGFIKRQLVETRQITKHVAQILDSRMNTKYDENDKLIREVKVITLKSKLVSDFRKDFQFYKVREINNYHHAHDAYLNAVVGTALIKKYPKLESEFVYGDYKVYDVRKMIAKSEQEIGKATAKYFFYSNIMNFFKTEITLANGEIRKRPLIETNGETGEIVWDKGRDFATVRKVLSMPQVNIVKKTEVQTGGFSKESILPKRNSDKLIARKKDWDPKKYGGFDSPTVAYSVLVVAKVEKGKSKKLKSVKELLGITIMERSSFEKNPIDFLEAKGYKEVKKDLIIKLPKYSLFELENGRKRMLASAGELQKGNELALPSKYVNFLYLASHYEKLKGSPEDNEQKQLFVEQHKHYLDEIIEQISEFSKRVILADANLDKVLSAYNKHRDKPIREQAENIIHLFTLTNLGAPAAFKYFDTTIDRKRYTSTKEVLDATLIHQSITGLYETRIDLSQLGGDGGGGSGGGPAPGGVPWILKKPLELTIKLDLEEQQGTLLNNSILSKKGKEELKQLFEKYSALWQSWENQVGHRRIRPHKIATGTVKPTPQKQYHINPKAKPDIQIVINDLLKQGVLIQKESTMNTPVYPVPKPNGRWRMVLDYRAVNKVTPLIAVQNQHSYGILGSLFKGRYKTTIDLSNGFWAHPIVPEDYWITAFTWQGKQYCWTVLPQGFLNSPGLFTGDVVDLLQGIPNVEVYVDDVYISHDSEKEHLEYLDILFNRLKEAGYIISLKKSNIANSIVDFLGFQITNEGRGLTDTFKEKLENITAPTTLKQLQSILGLLNFARNFIPDFTELIAPLYALIPKSTKNYVPWQIEHSTTLETLITKLNGAEYLQGRKGDKTLIMKVNASYTTGYIRYYNEGEKKPISYVSIVFSKTELKFTELEKLLTTVHKGLLKALDLSMGQNIHVYSPIVSMQNIQKTPQTAKKALASRWLSWLSYLEDPRIRFFYDPQMPALKDLPAVDTGKDNKKHPSNFQHIFYTDGSAITSPTKEGHLNAGMGIVYFINKDGNLQKQQEWSISLGNHTAQFAEIAAFEFALKKCLPLGGNILVVTDSNYVAKAYNEELDVWASNGFVNNRKKPLKHISKWKSVADLKRLRPDVVVTHEPGHQKLDSSPHAYGNNLADQLATQASFKVHAGKRTADGSEFEKRTADGSEFESPKKKAKVE

SEQ ID NO: 781 - protein, 2086 aa, synthetic construct
MPAAKRVKLDGGDKKYSIGLDIGTNSVGWAVITDEYKVPSKKFKVLGNTDRHSIKKNLIGALLFDSGETAEATRLKRTARRRYTRRKNRICYLQEIFSNEMAKVDDSFFHRLEESFLVEEDKKHERHPIFGNIVDEVAYHEKYPTIYHLRKKLVDSTDKADLRLIYLALAHMIKFRGHFLIEGDLNPDNSDVDKLFIQLVQTYNQLFEENPINASGVDAKAILSARLSKSRRLENLIAQLPGEKKNGLFGNLIALSLGLTPNFKSNFDLAEDAKLQLSKDTYDDDLDNLLAQIGDQYADLFLAAKNLSDAILLSDILRVNTEITKAPLSASMIKRYDEHHQDLTLLKALVRQQLPEKYKEIFFDQSKNGYAGYIDGGASQEEFYKFIKPILEKMDGTEELLVKLNREDLLRKQRTFDNGSIPHQIHLGELHAILRRQEDFYPFLKDNREKIEKILTFRIPYYVGPLARGNSRFAWMTRKSEETITPWNFEEVVDKGASAQSFIERMTNFDKNLPNEKVLPKHSLLYEYFTVYNELTKVKYVTEGMRKPAFLSGEQKKAIVDLLFKTNRKVTVKQLKEDYFKKIECFDSVEISGVEDRFNASLGTYHDLLKIIKDKDFLDNEENEDILEDIVLTLTLFEDREMIEERLKTYAHLFDDKVMKQLKRRRYTGWGRLSRKLINGIRDKQSGKTILDFLKSDGFANRNFMQLIHDDSLTFKEDIQKAQVSGQGDSLHEHIANLAGSPAIKKGILQTVKVVDELVKVMGRHKPENIVIEMARENQTTQKGQKNSRERMKRIEEGIKELGSQILKEHPVENTQLQNEKLYLYYLQNGRDMYVDQELDINRLSDYDVDHIVPQSFLKDDSIDNKVLTRSDKARGKSDNVPSEEVVKKMKNYWRQLLNAKLITQRKFDNLTKAERGGLSELDKAGFIKRQLVETRQITKHVAQILDSRMNTKYDENDKLIREVKVITLKSKLVSDFRKDFQFYKVREINNYHHAHDAYLNAVVGTALIKKYPKLESEFVYGDYKVYDVRKMIAKSEQEIGKATAKYFFYSNIMNFFKTEITLANGEIRKRPLIETNGETGEIVWDKGRDFATVRKVLSMPQVNIVKKTEVQTGGFSKESILPKRNSDKLIARKKDWDPKKYGGFDSPTVAYSVLVVAKVEKGKSKKLKSVKELLGITIMERSSFEKNPIDFLEAKGYKEVKKDLIIKLPKYSLFELENGRKRMLASAGELQKGNELALPSKYVNFLYLASHYEKLKGSPEDNEQKQLFVEQHKHYLDEIIEQISEFSKRVILADANLDKVLSAYNKHRDKPIREQAENIIHLFTLTNLGAPAAFKYFDTTIDRKRYTSTKEVLDATLIHQSITGLYETRIDLSQLGGDGGGGGGSGGGGSGGVPWILKKPLELTIKLDLEEQQGTLLNNSILSKKGKEELKQLFEKYSALWQSWENQVGHRRIRPHKIATGTVKPTPQKQYHINPKAKPDIQIVINDLLKQGVLIQKESTMNTPVYPVPKPNGRWRMVLDYRAVNKVTPLIAVQNQHSYGILGSLFKGRYKTTIDLSNGFWAHPIVPEDYWITAFTWQGKQYCWTVLPQGFLNSPGLFTGDVVDLLQGIPNVEVYVDDVYISHDSEKEHLEYLDILFNRLKEAGYIISLKKSNIANSIVDFLGFQITNEGRGLTDTFKEKLENITAPTTLKQLQSILGLLNFARNFIPDFTELIAPLYALIPKSTKNYVPWQIEHSTTLETLITKLNGAEYLQGRKGDKTLIMKVNASYTTGYIRYYNEGEKKPISYVSIVFSKTELKFTELEKLLTTVHKGLLKALDLSMGQNIHVYSPIVSMQNIQKTPQTAKKALASRWLSWLSYLEDPRIRFFYDPQMPALKDLPAVDTGKDNKKHPSNFQHIFYTDGSAITSPTKEGHLNAGMGIVYFINKDGNLQKQQEWSISLGNHTAQFAEIAAFEFALKKCLPLGGNILVVTDSNYVAKAYNEELDVWASNGFVNNRKKPLKHISKWKSVADLKRLRPDVVVTHEPGHQKLDSSPHAYGNNLADQLATQASFKVHAGKRTADGSEFEKRTADGSEFESPKKKAKVE

SEQ ID NO: 782 - protein, 2085 aa, synthetic construct
MPAAKRVKLDGGDKKYSIGLDIGTNSVGWAVITDEYKVPSKKFKVLGNTDRHSIKKNLIGALLFDSGETAEATRLKRTARRRYTRRKNRICYLQEIFSNEMAKVDDSFFHRLEESFLVEEDKKHERHPIFGNIVDEVAYHEKYPTIYHLRKKLVDSTDKADLRLIYLALAHMIKFRGHFLIEGDLNPDNSDVDKLFIQLVQTYNQLFEENPINASGVDAKAILSARLSKSRRLENLIAQLPGEKKNGLFGNLIALSLGLTPNFKSNFDLAEDAKLQLSKDTYDDDLDNLLAQIGDQYADLFLAAKNLSDAILLSDILRVNTEITKAPLSASMIKRYDEHHQDLTLLKALVRQQLPEKYKEIFFDQSKNGYAGYIDGGASQEEFYKFIKPILEKMDGTEELLVKLNREDLLRKQRTFDNGSIPHQIHLGELHAILRRQEDFYPFLKDNREKIEKILTFRIPYYVGPLARGNSRFAWMTRKSEETITPWNFEEVVDKGASAQSFIERMTNFDKNLPNEKVLPKHSLLYEYFTVYNELTKVKYVTEGMRKPAFLSGEQKKAIVDLLFKTNRKVTVKQLKEDYFKKIECFDSVEISGVEDRFNASLGTYHDLLKIIKDKDFLDNEENEDILEDIVLTLTLFEDREMIEERLKTYAHLFDDKVMKQLKRRRYTGWGRLSRKLINGIRDKQSGKTILDFLKSDGFANRNFMQLIHDDSLTFKEDIQKAQVSGQGDSLHEHIANLAGSPAIKKGILQTVKVVDELVKVMGRHKPENIVIEMARENQTTQKGQKNSRERMKRIEEGIKELGSQILKEHPVENTQLQNEKLYLYYLQNGRDMYVDQELDINRLSDYDVDHIVPQSFLKDDSIDNKVLTRSDKARGKSDNVPSEEVVKKMKNYWRQLLNAKLITQRKFDNLTKAERGGLSELDKAGFIKRQLVETRQITKHVAQILDSRMNTKYDENDKLIREVKVITLKSKLVSDFRKDFQFYKVREINNYHHAHDAYLNAVVGTALIKKYPKLESEFVYGDYKVYDVRKMIAKSEQEIGKATAKYFFYSNIMNFFKTEITLANGEIRKRPLIETNGETGEIVWDKGRDFATVRKVLSMPQVNIVKKTEVQTGGFSKESILPKRNSDKLIARKKDWDPKKYGGFDSPTVAYSVLVVAKVEKGKSKKLKSVKELLGITIMERSSFEKNPIDFLEAKGYKEVKKDLIIKLPKYSLFELENGRKRMLASAGELQKGNELALPSKYVNFLYLASHYEKLKGSPEDNEQKQLFVEQHKHYLDEIIEQISEFSKRVILADANLDKVLSAYNKHRDKPIREQAENIIHLFTLTNLGAPAAFKYFDTTIDRKRYTSTKEVLDATLIHQSITGLYETRIDLSQLGGDGGPAPAPAPAPGGVPWILKKPLELTIKLDLEEQQGTLLNNSILSKKGKEELKQLFEKYSALWQSWENQVGHRRIRPHKIATGTVKPTPQKQYHINPKAKPDIQIVINDLLKQGVLIQKESTMNTPVYPVPKPNGRWRMVLDYRAVNKVTPLIAVQNQHSYGILGSLFKGRYKTTIDLSNGFWAHPIVPEDYWITAFTWQGKQYCWTVLPQGFLNSPGLFTGDVVDLLQGIPNVEVYVDDVYISHDSEKEHLEYLDILFNRLKEAGYIISLKKSNIANSIVDFLGFQITNEGRGLTDTFKEKLENITAPTTLKQLQSILGLLNFARNFIPDFTELIAPLYALIPKSTKNYVPWQIEHSTTLETLITKLNGAEYLQGRKGDKTLIMKVNASYTTGYIRYYNEGEKKPISYVSIVFSKTELKFTELEKLLTTVHKGLLKALDLSMGQNIHVYSPIVSMQNIQKTPQTAKKALASRWLSWLSYLEDPRIRFFYDPQMPALKDLPAVDTGKDNKKHPSNFQHIFYTDGSAITSPTKEGHLNAGMGIVYFINKDGNLQKQQEWSISLGNHTAQFAEIAAFEFALKKCLPLGGNILVVTDSNYVAKAYNEELDVWASNGFVNNRKKPLKHISKWKSVADLKRLRPDVVVTHEPGHQKLDSSPHAYGNNLADQLATQASFKVHAGKRTADGSEFEKRTADGSEFESPKKKAKVE

SEQ ID NO: 783 - protein, 2091 aa, synthetic construct
MPAAKRVKLDGGDKKYSIGLDIGTNSVGWAVITDEYKVPSKKFKVLGNTDRHSIKKNLIGALLFDSGETAEATRLKRTARRRYTRRKNRICYLQEIFSNEMAKVDDSFFHRLEESFLVEEDKKHERHPIFGNIVDEVAYHEKYPTIYHLRKKLVDSTDKADLRLIYLALAHMIKFRGHFLIEGDLNPDNSDVDKLFIQLVQTYNQLFEENPINASGVDAKAILSARLSKSRRLENLIAQLPGEKKNGLFGNLIALSLGLTPNFKSNFDLAEDAKLQLSKDTYDDDLDNLLAQIGDQYADLFLAAKNLSDAILLSDILRVNTEITKAPLSASMIKRYDEHHQDLTLLKALVRQQLPEKYKEIFFDQSKNGYAGYIDGGASQEEFYKFIKPILEKMDGTEELLVKLNREDLLRKQRTFDNGSIPHQIHLGELHAILRRQEDFYPFLKDNREKIEKILTFRIPYYVGPLARGNSRFAWMTRKSEETITPWNFEEVVDKGASAQSFIERMTNFDKNLPNEKVLPKHSLLYEYFTVYNELTKVKYVTEGMRKPAFLSGEQKKAIVDLLFKTNRKVTVKQLKEDYFKKIECFDSVEISGVEDRFNASLGTYHDLLKIIKDKDFLDNEENEDILEDIVLTLTLFEDREMIEERLKTYAHLFDDKVMKQLKRRRYTGWGRLSRKLINGIRDKQSGKTILDFLKSDGFANRNFMQLIHDDSLTFKEDIQKAQVSGQGDSLHEHIANLAGSPAIKKGILQTVKVVDELVKVMGRHKPENIVIEMARENQTTQKGQKNSRERMKRIEEGIKELGSQILKEHPVENTQLQNEKLYLYYLQNGRDMYVDQELDINRLSDYDVDHIVPQSFLKDDSIDNKVLTRSDKARGKSDNVPSEEVVKKMKNYWRQLLNAKLITQRKFDNLTKAERGGLSELDKAGFIKRQLVETRQITKHVAQILDSRMNTKYDENDKLIREVKVITLKSKLVSDFRKDFQFYKVREINNYHHAHDAYLNAVVGTALIKKYPKLESEFVYGDYKVYDVRKMIAKSEQEIGKATAKYFFYSNIMNFFKTEITLANGEIRKRPLIETNGETGEIVWDKGRDFATVRKVLSMPQVNIVKKTEVQTGGFSKESILPKRNSDKLIARKKDWDPKKYGGFDSPTVAYSVLVVAKVEKGKSKKLKSVKELLGITIMERSSFEKNPIDFLEAKGYKEVKKDLIIKLPKYSLFELENGRKRMLASAGELQKGNELALPSKYVNFLYLASHYEKLKGSPEDNEQKQLFVEQHKHYLDEIIEQISEFSKRVILADANLDKVLSAYNKHRDKPIREQAENIIHLFTLTNLGAPAAFKYFDTTIDRKRYTSTKEVLDATLIHQSITGLYETRIDLSQLGGDGGGGSGGSGGSGGSGGSGGVPWILKKPLELTIKLDLEEQQGTLLNNSILSKKGKEELKQLFEKYSALWQSWENQVGHRRIRPHKIATGTVKPTPQKQYHINPKAKPDIQIVINDLLKQGVLIQKESTMNTPVYPVPKPNGRWRMVLDYRAVNKVTPLIAVQNQHSYGILGSLFKGRYKTTIDLSNGFWAHPIVPEDYWITAFTWQGKQYCWTVLPQGFLNSPGLFTGDVVDLLQGIPNVEVYVDDVYISHDSEKEHLEYLDILFNRLKEAGYIISLKKSNIANSIVDFLGFQITNEGRGLTDTFKEKLENITAPTTLKQLQSILGLLNFARNFIPDFTELIAPLYALIPKSTKNYVPWQIEHSTTLETLITKLNGAEYLQGRKGDKTLIMKVNASYTTGYIRYYNEGEKKPISYVSIVFSKTELKFTELEKLLTTVHKGLLKALDLSMGQNIHVYSPIVSMQNIQKTPQTAKKALASRWLSWLSYLEDPRIRFFYDPQMPALKDLPAVDTGKDNKKHPSNFQHIFYTDGSAITSPTKEGHLNAGMGIVYFINKDGNLQKQQEWSISLGNHTAQFAEIAAFEFALKKCLPLGGNILVVTDSNYVAKAYNEELDVWASNGFVNNRKKPLKHISKWKSVADLKRLRPDVVVTHEPGHQKLDSSPHAYGNNLADQLATQASFKVHAGKRTADGSEFEKRTADGSEFESPKKKAKVE

SEQ ID NO: 784 - protein, 2084 aa, synthetic construct
MPAAKRVKLDGGDKKYSIGLDIGTNSVGWAVITDEYKVPSKKFKVLGNTDRHSIKKNLIGALLFDSGETAEATRLKRTARRRYTRRKNRICYLQEIFSNEMAKVDDSFFHRLEESFLVEEDKKHERHPIFGNIVDEVAYHEKYPTIYHLRKKLVDSTDKADLRLIYLALAHMIKFRGHFLIEGDLNPDNSDVDKLFIQLVQTYNQLFEENPINASGVDAKAILSARLSKSRRLENLIAQLPGEKKNGLFGNLIALSLGLTPNFKSNFDLAEDAKLQLSKDTYDDDLDNLLAQIGDQYADLFLAAKNLSDAILLSDILRVNTEITKAPLSASMIKRYDEHHQDLTLLKALVRQQLPEKYKEIFFDQSKNGYAGYIDGGASQEEFYKFIKPILEKMDGTEELLVKLNREDLLRKQRTFDNGSIPHQIHLGELHAILRRQEDFYPFLKDNREKIEKILTFRIPYYVGPLARGNSRFAWMTRKSEETITPWNFEEVVDKGASAQSFIERMTNFDKNLPNEKVLPKHSLLYEYFTVYNELTKVKYVTEGMRKPAFLSGEQKKAIVDLLFKTNRKVTVKQLKEDYFKKIECFDSVEISGVEDRFNASLGTYHDLLKIIKDKDFLDNEENEDILEDIVLTLTLFEDREMIEERLKTYAHLFDDKVMKQLKRRRYTGWGRLSRKLINGIRDKQSGKTILDFLKSDGFANRNFMQLIHDDSLTFKEDIQKAQVSGQGDSLHEHIANLAGSPAIKKGILQTVKVVDELVKVMGRHKPENIVIEMARENQTTQKGQKNSRERMKRIEEGIKELGSQILKEHPVENTQLQNEKLYLYYLQNGRDMYVDQELDINRLSDYDVDHIVPQSFLKDDSIDNKVLTRSDKARGKSDNVPSEEVVKKMKNYWRQLLNAKLITQRKFDNLTKAERGGLSELDKAGFIKRQLVETRQITKHVAQILDSRMNTKYDENDKLIREVKVITLKSKLVSDFRKDFQFYKVREINNYHHAHDAYLNAVVGTALIKKYPKLESEFVYGDYKVYDVRKMIAKSEQEIGKATAKYFFYSNIMNFFKTEITLANGEIRKRPLIETNGETGEIVWDKGRDFATVRKVLSMPQVNIVKKTEVQTGGFSKESILPKRNSDKLIARKKDWDPKKYGGFDSPTVAYSVLVVAKVEKGKSKKLKSVKELLGITIMERSSFEKNPIDFLEAKGYKEVKKDLIIKLPKYSLFELENGRKRMLASAGELQKGNELALPSKYVNFLYLASHYEKLKGSPEDNEQKQLFVEQHKHYLDEIIEQISEFSKRVILADANLDKVLSAYNKHRDKPIREQAENIIHLFTLTNLGAPAAFKYFDTTIDRKRYTSTKEVLDATLIHQSITGLYETRIDLSQLGGDGGEAAAKGGGGGVPWILKKPLELTIKLDLEEQQGTLLNNSILSKKGKEELKQLFEKYSALWQSWENQVGHRRIRPHKIATGTVKPTPQKQYHINPKAKPDIQIVINDLLKQGVLIQKESTMNTPVYPVPKPNGRWRMVLDYRAVNKVTPLIAVQNQHSYGILGSLFKGRYKTTIDLSNGFWAHPIVPEDYWITAFTWQGKQYCWTVLPQGFLNSPGLFTGDVVDLLQGIPNVEVYVDDVYISHDSEKEHLEYLDILFNRLKEAGYIISLKKSNIANSIVDFLGFQITNEGRGLTDTFKEKLENITAPTTLKQLQSILGLLNFARNFIPDFTELIAPLYALIPKSTKNYVPWQIEHSTTLETLITKLNGAEYLQGRKGDKTLIMKVNASYTTGYIRYYNEGEKKPISYVSIVFSKTELKFTELEKLLTTVHKGLLKALDLSMGQNIHVYSPIVSMQNIQKTPQTAKKALASRWLSWLSYLEDPRIRFFYDPQMPALKDLPAVDTGKDNKKHPSNFQHIFYTDGSAITSPTKEGHLNAGMGIVYFINKDGNLQKQQEWSISLGNHTAQFAEIAAFEFALKKCLPLGGNILVVTDSNYVAKAYNEELDVWASNGFVNNRKKPLKHISKWKSVADLKRLRPDVVVTHEPGHQKLDSSPHAYGNNLADQLATQASFKVHAGKRTADGSEFEKRTADGSEFESPKKKAKVE

SEQ ID NO: 785 - protein, 2087 aa, synthetic construct
MPAAKRVKLDGGDKKYSIGLDIGTNSVGWAVITDEYKVPSKKFKVLGNTDRHSIKKNLIGALLFDSGETAEATRLKRTARRRYTRRKNRICYLQEIFSNEMAKVDDSFFHRLEESFLVEEDKKHERHPIFGNIVDEVAYHEKYPTIYHLRKKLVDSTDKADLRLIYLALAHMIKFRGHFLIEGDLNPDNSDVDKLFIQLVQTYNQLFEENPINASGVDAKAILSARLSKSRRLENLIAQLPGEKKNGLFGNLIALSLGLTPNFKSNFDLAEDAKLQLSKDTYDDDLDNLLAQIGDQYADLFLAAKNLSDAILLSDILRVNTEITKAPLSASMIKRYDEHHQDLTLLKALVRQQLPEKYKEIFFDQSKNGYAGYIDGGASQEEFYKFIKPILEKMDGTEELLVKLNREDLLRKQRTFDNGSIPHQIHLGELHAILRRQEDFYPFLKDNREKIEKILTFRIPYYVGPLARGNSRFAWMTRKSEETITPWNFEEVVDKGASAQSFIERMTNFDKNLPNEKVLPKHSLLYEYFTVYNELTKVKYVTEGMRKPAFLSGEQKKAIVDLLFKTNRKVTVKQLKEDYFKKIECFDSVEISGVEDRFNASLGTYHDLLKIIKDKDFLDNEENEDILEDIVLTLTLFEDREMIEERLKTYAHLFDDKVMKQLKRRRYTGWGRLSRKLINGIRDKQSGKTILDFLKSDGFANRNFMQLIHDDSLTFKEDIQKAQVSGQGDSLHEHIANLAGSPAIKKGILQTVKVVDELVKVMGRHKPENIVIEMARENQTTQKGQKNSRERMKRIEEGIKELGSQILKEHPVENTQLQNEKLYLYYLQNGRDMYVDQELDINRLSDYDVDHIVPQSFLKDDSIDNKVLTRSDKARGKSDNVPSEEVVKKMKNYWRQLLNAKLITQRKFDNLTKAERGGLSELDKAGFIKRQLVETRQITKHVAQILDSRMNTKYDENDKLIREVKVITLKSKLVSDFRKDFQFYKVREINNYHHAHDAYLNAVVGTALIKKYPKLESEFVYGDYKVYDVRKMIAKSEQEIGKATAKYFFYSNIMNFFKTEITLANGEIRKRPLIETNGETGEIVWDKGRDFATVRKVLSMPQVNIVKKTEVQTGGFSKESILPKRNSDKLIARKKDWDPKKYGGFDSPTVAYSVLVVAKVEKGKSKKLKSVKELLGITIMERSSFEKNPIDFLEAKGYKEVKKDLIIKLPKYSLFELENGRKRMLASAGELQKGNELALPSKYVNFLYLASHYEKLKGSPEDNEQKQLFVEQHKHYLDEIIEQISEFSKRVILADANLDKVLSAYNKHRDKPIREQAENIIHLFTLTNLGAPAAFKYFDTTIDRKRYTSTKEVLDATLIHQSITGLYETRIDLSQLGGDGGPAPAPAPAPAPGGVPWILKKPLELTIKLDLEEQQGTLLNNSILSKKGKEELKQLFEKYSALWQSWENQVGHRRIRPHKIATGTVKPTPQKQYHINPKAKPDIQIVINDLLKQGVLIQKESTMNTPVYPVPKPNGRWRMVLDYRAVNKVTPLIAVQNQHSYGILGSLFKGRYKTTIDLSNGFWAHPIVPEDYWITAFTWQGKQYCWTVLPQGFLNSPGLFTGDVVDLLQGIPNVEVYVDDVYISHDSEKEHLEYLDILFNRLKEAGYIISLKKSNIANSIVDFLGFQITNEGRGLTDTFKEKLENITAPTTLKQLQSILGLLNFARNFIPDFTELIAPLYALIPKSTKNYVPWQIEHSTTLETLITKLNGAEYLQGRKGDKTLIMKVNASYTTGYIRYYNEGEKKPISYVSIVFSKTELKFTELEKLLTTVHKGLLKALDLSMGQNIHVYSPIVSMQNIQKTPQTAKKALASRWLSWLSYLEDPRIRFFYDPQMPALKDLPAVDTGKDNKKHPSNFQHIFYTDGSAITSPTKEGHLNAGMGIVYFINKDGNLQKQQEWSISLGNHTAQFAEIAAFEFALKKCLPLGGNILVVTDSNYVAKAYNEELDVWASNGFVNNRKKPLKHISKWKSVADLKRLRPDVVVTHEPGHQKLDSSPHAYGNNLADQLATQASFKVHAGKRTADGSEFEKRTADGSEFESPKKKAKVE

SEQ ID NO: 786 - protein, 2085 aa, synthetic construct
MPAAKRVKLDGGDKKYSIGLDIGTNSVGWAVITDEYKVPSKKFKVLGNTDRHSIKKNLIGALLFDSGETAEATRLKRTARRRYTRRKNRICYLQEIFSNEMAKVDDSFFHRLEESFLVEEDKKHERHPIFGNIVDEVAYHEKYPTIYHLRKKLVDSTDKADLRLIYLALAHMIKFRGHFLIEGDLNPDNSDVDKLFIQLVQTYNQLFEENPINASGVDAKAILSARLSKSRRLENLIAQLPGEKKNGLFGNLIALSLGLTPNFKSNFDLAEDAKLQLSKDTYDDDLDNLLAQIGDQYADLFLAAKNLSDAILLSDILRVNTEITKAPLSASMIKRYDEHHQDLTLLKALVRQQLPEKYKEIFFDQSKNGYAGYIDGGASQEEFYKFIKPILEKMDGTEELLVKLNREDLLRKQRTFDNGSIPHQIHLGELHAILRRQEDFYPFLKDNREKIEKILTFRIPYYVGPLARGNSRFAWMTRKSEETITPWNFEEVVDKGASAQSFIERMTNFDKNLPNEKVLPKHSLLYEYFTVYNELTKVKYVTEGMRKPAFLSGEQKKAIVDLLFKTNRKVTVKQLKEDYFKKIECFDSVEISGVEDRFNASLGTYHDLLKIIKDKDFLDNEENEDILEDIVLTLTLFEDREMIEERLKTYAHLFDDKVMKQLKRRRYTGWGRLSRKLINGIRDKQSGKTILDFLKSDGFANRNFMQLIHDDSLTFKEDIQKAQVSGQGDSLHEHIANLAGSPAIKKGILQTVKVVDELVKVMGRHKPENIVIEMARENQTTQKGQKNSRERMKRIEEGIKELGSQILKEHPVENTQLQNEKLYLYYLQNGRDMYVDQELDINRLSDYDVDHIVPQSFLKDDSIDNKVLTRSDKARGKSDNVPSEEVVKKMKNYWRQLLNAKLITQRKFDNLTKAERGGLSELDKAGFIKRQLVETRQITKHVAQILDSRMNTKYDENDKLIREVKVITLKSKLVSDFRKDFQFYKVREINNYHHAHDAYLNAVVGTALIKKYPKLESEFVYGDYKVYDVRKMIAKSEQEIGKATAKYFFYSNIMNFFKTEITLANGEIRKRPLIETNGETGEIVWDKGRDFATVRKVLSMPQVNIVKKTEVQTGGFSKESILPKRNSDKLIARKKDWDPKKYGGFDSPTVAYSVLVVAKVEKGKSKKLKSVKELLGITIMERSSFEKNPIDFLEAKGYKEVKKDLIIKLPKYSLFELENGRKRMLASAGELQKGNELALPSKYVNFLYLASHYEKLKGSPEDNEQKQLFVEQHKHYLDEIIEQISEFSKRVILADANLDKVLSAYNKHRDKPIREQAENIIHLFTLTNLGAPAAFKYFDTTIDRKRYTSTKEVLDATLIHQSITGLYETRIDLSQLGGDGGGGSGGSGGSGGVPWILKKPLELTIKLDLEEQQGTLLNNSILSKKGKEELKQLFEKYSALWQSWENQVGHRRIRPHKIATGTVKPTPQKQYHINPKAKPDIQIVINDLLKQGVLIQKESTMNTPVYPVPKPNGRWRMVLDYRAVNKVTPLIAVQNQHSYGILGSLFKGRYKTTIDLSNGFWAHPIVPEDYWITAFTWQGKQYCWTVLPQGFLNSPGLFTGDVVDLLQGIPNVEVYVDDVYISHDSEKEHLEYLDILFNRLKEAGYIISLKKSNIANSIVDFLGFQITNEGRGLTDTFKEKLENITAPTTLKQLQSILGLLNFARNFIPDFTELIAPLYALIPKSTKNYVPWQIEHSTTLETLITKLNGAEYLQGRKGDKTLIMKVNASYTTGYIRYYNEGEKKPISYVSIVFSKTELKFTELEKLLTTVHKGLLKALDLSMGQNIHVYSPIVSMQNIQKTPQTAKKALASRWLSWLSYLEDPRIRFFYDPQMPALKDLPAVDTGKDNKKHPSNFQHIFYTDGSAITSPTKEGHLNAGMGIVYFINKDGNLQKQQEWSISLGNHTAQFAEIAAFEFALKKCLPLGGNILVVTDSNYVAKAYNEELDVWASNGFVNNRKKPLKHISKWKSVADLKRLRPDVVVTHEPGHQKLDSSPHAYGNNLADQLATQASFKVHAGKRTADGSEFEKRTADGSEFESPKKKAKVE

SEQ ID NO: 787 - protein, 2085 aa, synthetic construct
MPAAKRVKLDGGDKKYSIGLDIGTNSVGWAVITDEYKVPSKKFKVLGNTDRHSIKKNLIGALLFDSGETAEATRLKRTARRRYTRRKNRICYLQEIFSNEMAKVDDSFFHRLEESFLVEEDKKHERHPIFGNIVDEVAYHEKYPTIYHLRKKLVDSTDKADLRLIYLALAHMIKFRGHFLIEGDLNPDNSDVDKLFIQLVQTYNQLFEENPINASGVDAKAILSARLSKSRRLENLIAQLPGEKKNGLFGNLIALSLGLTPNFKSNFDLAEDAKLQLSKDTYDDDLDNLLAQIGDQYADLFLAAKNLSDAILLSDILRVNTEITKAPLSASMIKRYDEHHQDLTLLKALVRQQLPEKYKEIFFDQSKNGYAGYIDGGASQEEFYKFIKPILEKMDGTEELLVKLNREDLLRKQRTFDNGSIPHQIHLGELHAILRRQEDFYPFLKDNREKIEKILTFRIPYYVGPLARGNSRFAWMTRKSEETITPWNFEEVVDKGASAQSFIERMTNFDKNLPNEKVLPKHSLLYEYFTVYNELTKVKYVTEGMRKPAFLSGEQKKAIVDLLFKTNRKVTVKQLKEDYFKKIECFDSVEISGVEDRFNASLGTYHDLLKIIKDKDFLDNEENEDILEDIVLTLTLFEDREMIEERLKTYAHLFDDKVMKQLKRRRYTGWGRLSRKLINGIRDKQSGKTILDFLKSDGFANRNFMQLIHDDSLTFKEDIQKAQVSGQGDSLHEHIANLAGSPAIKKGILQTVKVVDELVKVMGRHKPENIVIEMARENQTTQKGQKNSRERMKRIEEGIKELGSQILKEHPVENTQLQNEKLYLYYLQNGRDMYVDQELDINRLSDYDVDHIVPQSFLKDDSIDNKVLTRSDKARGKSDNVPSEEVVKKMKNYWRQLLNAKLITQRKFDNLTKAERGGLSELDKAGFIKRQLVETRQITKHVAQILDSRMNTKYDENDKLIREVKVITLKSKLVSDFRKDFQFYKVREINNYHHAHDAYLNAVVGTALIKKYPKLESEFVYGDYKVYDVRKMIAKSEQEIGKATAKYFFYSNIMNFFKTEITLANGEIRKRPLIETNGETGEIVWDKGRDFATVRKVLSMPQVNIVKKTEVQTGGFSKESILPKRNSDKLIARKKDWDPKKYGGFDSPTVAYSVLVVAKVEKGKSKKLKSVKELLGITIMERSSFEKNPIDFLEAKGYKEVKKDLIIKLPKYSLFELENGRKRMLASAGELQKGNELALPSKYVNFLYLASHYEKLKGSPEDNEQKQLFVEQHKHYLDEIIEQISEFSKRVILADANLDKVLSAYNKHRDKPIREQAENIIHLFTLTNLGAPAAFKYFDTTIDRKRYTSTKEVLDATLIHQSITGLYETRIDLSQLGGDGGGSSGGSGGGGGVPWILKKPLELTIKLDLEEQQGTLLNNSILSKKGKEELKQLFEKYSALWQSWENQVGHRRIRPHKIATGTVKPTPQKQYHINPKAKPDIQIVINDLLKQGVLIQKESTMNTPVYPVPKPNGRWRMVLDYRAVNKVTPLIAVQNQHSYGILGSLFKGRYKTTIDLSNGFWAHPIVPEDYWITAFTWQGKQYCWTVLPQGFLNSPGLFTGDVVDLLQGIPNVEVYVDDVYISHDSEKEHLEYLDILFNRLKEAGYIISLKKSNIANSIVDFLGFQITNEGRGLTDTFKEKLENITAPTTLKQLQSILGLLNFARNFIPDFTELIAPLYALIPKSTKNYVPWQIEHSTTLETLITKLNGAEYLQGRKGDKTLIMKVNASYTTGYIRYYNEGEKKPISYVSIVFSKTELKFTELEKLLTTVHKGLLKALDLSMGQNIHVYSPIVSMQNIQKTPQTAKKALASRWLSWLSYLEDPRIRFFYDPQMPALKDLPAVDTGKDNKKHPSNFQHIFYTDGSAITSPTKEGHLNAGMGIVYFINKDGNLQKQQEWSISLGNHTAQFAEIAAFEFALKKCLPLGGNILVVTDSNYVAKAYNEELDVWASNGFVNNRKKPLKHISKWKSVADLKRLRPDVVVTHEPGHQKLDSSPHAYGNNLADQLATQASFKVHAGKRTADGSEFEKRTADGSEFESPKKKAKVE

SEQ ID NO: 788 - protein, 2082 aa, synthetic construct
MPAAKRVKLDGGDKKYSIGLDIGTNSVGWAVITDEYKVPSKKFKVLGNTDRHSIKKNLIGALLFDSGETAEATRLKRTARRRYTRRKNRICYLQEIFSNEMAKVDDSFFHRLEESFLVEEDKKHERHPIFGNIVDEVAYHEKYPTIYHLRKKLVDSTDKADLRLIYLALAHMIKFRGHFLIEGDLNPDNSDVDKLFIQLVQTYNQLFEENPINASGVDAKAILSARLSKSRRLENLIAQLPGEKKNGLFGNLIALSLGLTPNFKSNFDLAEDAKLQLSKDTYDDDLDNLLAQIGDQYADLFLAAKNLSDAILLSDILRVNTEITKAPLSASMIKRYDEHHQDLTLLKALVRQQLPEKYKEIFFDQSKNGYAGYIDGGASQEEFYKFIKPILEKMDGTEELLVKLNREDLLRKQRTFDNGSIPHQIHLGELHAILRRQEDFYPFLKDNREKIEKILTFRIPYYVGPLARGNSRFAWMTRKSEETITPWNFEEVVDKGASAQSFIERMTNFDKNLPNEKVLPKHSLLYEYFTVYNELTKVKYVTEGMRKPAFLSGEQKKAIVDLLFKTNRKVTVKQLKEDYFKKIECFDSVEISGVEDRFNASLGTYHDLLKIIKDKDFLDNEENEDILEDIVLTLTLFEDREMIEERLKTYAHLFDDKVMKQLKRRRYTGWGRLSRKLINGIRDKQSGKTILDFLKSDGFANRNFMQLIHDDSLTFKEDIQKAQVSGQGDSLHEHIANLAGSPAIKKGILQTVKVVDELVKVMGRHKPENIVIEMARENQTTQKGQKNSRERMKRIEEGIKELGSQILKEHPVENTQLQNEKLYLYYLQNGRDMYVDQELDINRLSDYDVDHIVPQSFLKDDSIDNKVLTRSDKARGKSDNVPSEEVVKKMKNYWRQLLNAKLITQRKFDNLTKAERGGLSELDKAGFIKRQLVETRQITKHVAQILDSRMNTKYDENDKLIREVKVITLKSKLVSDFRKDFQFYKVREINNYHHAHDAYLNAVVGTALIKKYPKLESEFVYGDYKVYDVRKMIAKSEQEIGKATAKYFFYSNIMNFFKTEITLANGEIRKRPLIETNGETGEIVWDKGRDFATVRKVLSMPQVNIVKKTEVQTGGFSKESILPKRNSDKLIARKKDWDPKKYGGFDSPTVAYSVLVVAKVEKGKSKKLKSVKELLGITIMERSSFEKNPIDFLEAKGYKEVKKDLIIKLPKYSLFELENGRKRMLASAGELQKGNELALPSKYVNFLYLASHYEKLKGSPEDNEQKQLFVEQHKHYLDEIIEQISEFSKRVILADANLDKVLSAYNKHRDKPIREQAENIIHLFTLTNLGAPAAFKYFDTTIDRKRYTSTKEVLDATLIHQSITGLYETRIDLSQLGGDGGGGSGGSGGVPWILKKPLELTIKLDLEEQQGTLLNNSILSKKGKEELKQLFEKYSALWQSWENQVGHRRIRPHKIATGTVKPTPQKQYHINPKAKPDIQIVINDLLKQGVLIQKESTMNTPVYPVPKPNGRWRMVLDYRAVNKVTPLIAVQNQHSYGILGSLFKGRYKTTIDLSNGFWAHPIVPEDYWITAFTWQGKQYCWTVLPQGFLNSPGLFTGDVVDLLQGIPNVEVYVDDVYISHDSEKEHLEYLDILFNRLKEAGYIISLKKSNIANSIVDFLGFQITNEGRGLTDTFKEKLENITAPTTLKQLQSILGLLNFARNFIPDFTELIAPLYALIPKSTKNYVPWQIEHSTTLETLITKLNGAEYLQGRKGDKTLIMKVNASYTTGYIRYYNEGEKKPISYVSIVFSKTELKFTELEKLLTTVHKGLLKALDLSMGQNIHVYSPIVSMQNIQKTPQTAKKALASRWLSWLSYLEDPRIRFFYDPQMPALKDLPAVDTGKDNKKHPSNFQHIFYTDGSAITSPTKEGHLNAGMGIVYFINKDGNLQKQQEWSISLGNHTAQFAEIAAFEFALKKCLPLGGNILVVTDSNYVAKAYNEELDVWASNGFVNNRKKPLKHISKWKSVADLKRLRPDVVVTHEPGHQKLDSSPHAYGNNLADQLATQASFKVHAGKRTADGSEFEKRTADGSEFESPKKKAKVE

SEQ ID NO: 789 - protein, 2073 aa, synthetic construct
MPAAKRVKLDGGDKKYSIGLDIGTNSVGWAVITDEYKVPSKKFKVLGNTDRHSIKKNLIGALLFDSGETAEATRLKRTARRRYTRRKNRICYLQEIFSNEMAKVDDSFFHRLEESFLVEEDKKHERHPIFGNIVDEVAYHEKYPTIYHLRKKLVDSTDKADLRLIYLALAHMIKFRGHFLIEGDLNPDNSDVDKLFIQLVQTYNQLFEENPINASGVDAKAILSARLSKSRRLENLIAQLPGEKKNGLFGNLIALSLGLTPNFKSNFDLAEDAKLQLSKDTYDDDLDNLLAQIGDQYADLFLAAKNLSDAILLSDILRVNTEITKAPLSASMIKRYDEHHQDLTLLKALVRQQLPEKYKEIFFDQSKNGYAGYIDGGASQEEFYKFIKPILEKMDGTEELLVKLNREDLLRKQRTFDNGSIPHQIHLGELHAILRRQEDFYPFLKDNREKIEKILTFRIPYYVGPLARGNSRFAWMTRKSEETITPWNFEEVVDKGASAQSFIERMTNFDKNLPNEKVLPKHSLLYEYFTVYNELTKVKYVTEGMRKPAFLSGEQKKAIVDLLFKTNRKVTVKQLKEDYFKKIECFDSVEISGVEDRFNASLGTYHDLLKIIKDKDFLDNEENEDILEDIVLTLTLFEDREMIEERLKTYAHLFDDKVMKQLKRRRYTGWGRLSRKLINGIRDKQSGKTILDFLKSDGFANRNFMQLIHDDSLTFKEDIQKAQVSGQGDSLHEHIANLAGSPAIKKGILQTVKVVDELVKVMGRHKPENIVIEMARENQTTQKGQKNSRERMKRIEEGIKELGSQILKEHPVENTQLQNEKLYLYYLQNGRDMYVDQELDINRLSDYDVDHIVPQSFLKDDSIDNKVLTRSDKARGKSDNVPSEEVVKKMKNYWRQLLNAKLITQRKFDNLTKAERGGLSELDKAGFIKRQLVETRQITKHVAQILDSRMNTKYDENDKLIREVKVITLKSKLVSDFRKDFQFYKVREINNYHHAHDAYLNAVVGTALIKKYPKLESEFVYGDYKVYDVRKMIAKSEQEIGKATAKYFFYSNIMNFFKTEITLANGEIRKRPLIETNGETGEIVWDKGRDFATVRKVLSMPQVNIVKKTEVQTGGFSKESILPKRNSDKLIARKKDWDPKKYGGFDSPTVAYSVLVVAKVEKGKSKKLKSVKELLGITIMERSSFEKNPIDFLEAKGYKEVKKDLIIKLPKYSLFELENGRKRMLASAGELQKGNELALPSKYVNFLYLASHYEKLKGSPEDNEQKQLFVEQHKHYLDEIIEQISEFSKRVILADANLDKVLSAYNKHRDKPIREQAENIIHLFTLTNLGAPAAFKYFDTTIDRKRYTSTKEVLDATLIHQSITGLYETRIDLSQLGGDGGPAPGGGGSSGGSCQTKNTLNIDEYLLQFPDQLWASLPTDIGRMLVPPITIKIKDNASLPSIRQYPLPKDKTEGLRPLISSLENQGILIKCHSPCNTPIFPIKKAGRDEYRMIHDLRAINNIVAPLTAVVASPTTVLSNLAPSLHWFTVIDLSNAFFSVPIHKDSQYLFAFTFEGHQYTWTVLPQGFIHSPTLFNQALYQSLHKIKFKISSEICIYMDDVLIASKDRDTNLKDTAVMLQHLASEGHKVSKKKLQLCQQEVVYLGQLLTPEGRKILPDRKVTVSQFQQPTTIRQIRAFLGKVGYCRHFIPEFSIHSKFLEKQLKPDTAEPFQLDDQQVEAFNKLKHAITTAPVLVVPDPAKPFQLYTSHSEHASIAVLTQKHAGRTRPIAFLSSKFDAIESGLPPCLKACASIHRSLTQADSFILGAPLIIYTTHAICTLLQRDRSQLVTASRFSKWEADLLRPELTFVACSAVSPAHLYMQSCENNIPPHDCVLLTHTISRPRPDLSDLPIPDPDMTLFSDGSYTTGRGGAAVVMHRPVTDDFIIIHQQPGGASAQTAELLALAAACHLATDKTVNIYTDSRYAYGVVHDFGHLWMHRGFVTSAGTPIKNHKEIEYLLKQIMKPKQVSVIKIEAHTKGVSMEVRGNAAADEAAKNAVFLVQRAGKRTADGSEFEKRTADGSEFESPKKKAKVE

SEQ ID NO: 790 - protein, 2094 aa, synthetic construct
MPAAKRVKLDGGDKKYSIGLDIGTNSVGWAVITDEYKVPSKKFKVLGNTDRHSIKKNLIGALLFDSGETAEATRLKRTARRRYTRRKNRICYLQEIFSNEMAKVDDSFFHRLEESFLVEEDKKHERHPIFGNIVDEVAYHEKYPTIYHLRKKLVDSTDKADLRLIYLALAHMIKFRGHFLIEGDLNPDNSDVDKLFIQLVQTYNQLFEENPINASGVDAKAILSARLSKSRRLENLIAQLPGEKKNGLFGNLIALSLGLTPNFKSNFDLAEDAKLQLSKDTYDDDLDNLLAQIGDQYADLFLAAKNLSDAILLSDILRVNTEITKAPLSASMIKRYDEHHQDLTLLKALVRQQLPEKYKEIFFDQSKNGYAGYIDGGASQEEFYKFIKPILEKMDGTEELLVKLNREDLLRKQRTFDNGSIPHQIHLGELHAILRRQEDFYPFLKDNREKIEKILTFRIPYYVGPLARGNSRFAWMTRKSEETITPWNFEEVVDKGASAQSFIERMTNFDKNLPNEKVLPKHSLLYEYFTVYNELTKVKYVTEGMRKPAFLSGEQKKAIVDLLFKTNRKVTVKQLKEDYFKKIECFDSVEISGVEDRFNASLGTYHDLLKIIKDKDFLDNEENEDILEDIVLTLTLFEDREMIEERLKTYAHLFDDKVMKQLKRRRYTGWGRLSRKLINGIRDKQSGKTILDFLKSDGFANRNFMQLIHDDSLTFKEDIQKAQVSGQGDSLHEHIANLAGSPAIKKGILQTVKVVDELVKVMGRHKPENIVIEMARENQTTQKGQKNSRERMKRIEEGIKELGSQILKEHPVENTQLQNEKLYLYYLQNGRDMYVDQELDINRLSDYDVDHIVPQSFLKDDSIDNKVLTRSDKARGKSDNVPSEEVVKKMKNYWRQLLNAKLITQRKFDNLTKAERGGLSELDKAGFIKRQLVETRQITKHVAQILDSRMNTKYDENDKLIREVKVITLKSKLVSDFRKDFQFYKVREINNYHHAHDAYLNAVVGTALIKKYPKLESEFVYGDYKVYDVRKMIAKSEQEIGKATAKYFFYSNIMNFFKTEITLANGEIRKRPLIETNGETGEIVWDKGRDFATVRKVLSMPQVNIVKKTEVQTGGFSKESILPKRNSDKLIARKKDWDPKKYGGFDSPTVAYSVLVVAKVEKGKSKKLKSVKELLGITIMERSSFEKNPIDFLEAKGYKEVKKDLIIKLPKYSLFELENGRKRMLASAGELQKGNELALPSKYVNFLYLASHYEKLKGSPEDNEQKQLFVEQHKHYLDEIIEQISEFSKRVILADANLDKVLSAYNKHRDKPIREQAENIIHLFTLTNLGAPAAFKYFDTTIDRKRYTSTKEVLDATLIHQSITGLYETRIDLSQLGGDGGGGGEAAAKPAPGGVLNLEEEYRLHEKPVPSSIDPSWLQLFPTVWAERAGMGLANQVPPVVVELRSGASPVAVRQYPMSKEAREGIRPHIQRFLDLGVLVPCQSPWNTPLLPVKKPGTNDYRPVQDLREINKRVQDIHPTVPNPYNLLSSLPPSHTWYSVLDLKDAFFCLKLHPNSQPLFAFEWRDPEKGNTGQLTWTRLPQGFKNSPTLFDEALHRDLAPFRALNPQVVLLQYVDDLLVAAPTYRDCKEGTQKLLQELSKLGYRVSAKKAQLCQKEVTYLGYLLKEGKRWLTPARKATVMKIPPPTTPRQVREFLGTAGFCRLWIPGFASLAAPLYPLTKESIPFIWTEEHQKAFDRIKEALLSAPALALPDLTKPFTLYVDERAGVARGVLTQTLGPWRRPVAYLSKKLDPVASGWPTCLKAVAAVALLLKDADKLTLGQNVTVIASHSLESIVRQPPDRWMTNARMTHYQSLLLNERVSFAPPAVLNPATLLPVESEATPVHRCSEILAEETGTRRDLKDQPLPGVPAWYTDGSSFIAEGKRRAGAAIVDGKRTVWASSLPEGTSAQKAELVALTQALRLAEGKDINIYTDSRYAFATAHIHGAIYKQRGLLTSAGKDIKNKEEILALLEAIHLPKRVAIIHCPGHQKGNDPVATGNRRADEAAKQAALSTRVLAETTKPAGKRTADGSEFEKRTADGSEFESPKKKAKVE

SEQ ID NO: 791 - protein, 2094 aa, synthetic construct
MPAAKRVKLDGGDKKYSIGLDIGTNSVGWAVITDEYKVPSKKFKVLGNTDRHSIKKNLIGALLFDSGETAEATRLKRTARRRYTRRKNRICYLQEIFSNEMAKVDDSFFHRLEESFLVEEDKKHERHPIFGNIVDEVAYHEKYPTIYHLRKKLVDSTDKADLRLIYLALAHMIKFRGHFLIEGDLNPDNSDVDKLFIQLVQTYNQLFEENPINASGVDAKAILSARLSKSRRLENLIAQLPGEKKNGLFGNLIALSLGLTPNFKSNFDLAEDAKLQLSKDTYDDDLDNLLAQIGDQYADLFLAAKNLSDAILLSDILRVNTEITKAPLSASMIKRYDEHHQDLTLLKALVRQQLPEKYKEIFFDQSKNGYAGYIDGGASQEEFYKFIKPILEKMDGTEELLVKLNREDLLRKQRTFDNGSIPHQIHLGELHAILRRQEDFYPFLKDNREKIEKILTFRIPYYVGPLARGNSRFAWMTRKSEETITPWNFEEVVDKGASAQSFIERMTNFDKNLPNEKVLPKHSLLYEYFTVYNELTKVKYVTEGMRKPAFLSGEQKKAIVDLLFKTNRKVTVKQLKEDYFKKIECFDSVEISGVEDRFNASLGTYHDLLKIIKDKDFLDNEENEDILEDIVLTLTLFEDREMIEERLKTYAHLFDDKVMKQLKRRRYTGWGRLSRKLINGIRDKQSGKTILDFLKSDGFANRNFMQLIHDDSLTFKEDIQKAQVSGQGDSLHEHIANLAGSPAIKKGILQTVKVVDELVKVMGRHKPENIVIEMARENQTTQKGQKNSRERMKRIEEGIKELGSQILKEHPVENTQLQNEKLYLYYLQNGRDMYVDQELDINRLSDYDVDHIVPQSFLKDDSIDNKVLTRSDKARGKSDNVPSEEVVKKMKNYWRQLLNAKLITQRKFDNLTKAERGGLSELDKAGFIKRQLVETRQITKHVAQILDSRMNTKYDENDKLIREVKVITLKSKLVSDFRKDFQFYKVREINNYHHAHDAYLNAVVGTALIKKYPKLESEFVYGDYKVYDVRKMIAKSEQEIGKATAKYFFYSNIMNFFKTEITLANGEIRKRPLIETNGETGEIVWDKGRDFATVRKVLSMPQVNIVKKTEVQTGGFSKESILPKRNSDKLIARKKDWDPKKYGGFDSPTVAYSVLVVAKVEKGKSKKLKSVKELLGITIMERSSFEKNPIDFLEAKGYKEVKKDLIIKLPKYSLFELENGRKRMLASAGELQKGNELALPSKYVNFLYLASHYEKLKGSPEDNEQKQLFVEQHKHYLDEIIEQISEFSKRVILADANLDKVLSAYNKHRDKPIREQAENIIHLFTLTNLGAPAAFKYFDTTIDRKRYTSTKEVLDATLIHQSITGLYETRIDLSQLGGDGGGSSGGGEAAAKGGVLNLEEEYRLHEKPVPSSIDPSWLQLFPTVWAERAGMGLANQVPPVVVELRSGASPVAVRQYPMSKEAREGIRPHIQRFLDLGVLVPCQSPWNTPLLPVKKPGTNDYRPVQDLREINKRVQDIHPTVPNPYNLLSSLPPSHTWYSVLDLKDAFFCLKLHPNSQPLFAFEWRDPEKGNTGQLTWTRLPQGFKNSPTLFDEALHRDLAPFRALNPQVVLLQYVDDLLVAAPTYRDCKEGTQKLLQELSKLGYRVSAKKAQLCQKEVTYLGYLLKEGKRWLTPARKATVMKIPPPTTPRQVREFLGTAGFCRLWIPGFASLAAPLYPLTKESIPFIWTEEHQKAFDRIKEALLSAPALALPDLTKPFTLYVDERAGVARGVLTQTLGPWRRPVAYLSKKLDPVASGWPTCLKAVAAVALLLKDADKLTLGQNVTVIASHSLESIVRQPPDRWMTNARMTHYQSLLLNERVSFAPPAVLNPATLLPVESEATPVHRCSEILAEETGTRRDLKDQPLPGVPAWYTDGSSFIAEGKRRAGAAIVDGKRTVWASSLPEGTSAQKAELVALTQALRLAEGKDINIYTDSRYAFATAHIHGAIYKQRGLLTSAGKDIKNKEEILALLEAIHLPKRVAIIHCPGHQKGNDPVATGNRRADEAAKQAALSTRVLAETTKPAGKRTADGSEFEKRTADGSEFESPKKKAKVE

SEQ ID NO: 792 - protein, 2092 aa, synthetic construct
MPAAKRVKLDGGDKKYSIGLDIGTNSVGWAVITDEYKVPSKKFKVLGNTDRHSIKKNLIGALLFDSGETAEATRLKRTARRRYTRRKNRICYLQEIFSNEMAKVDDSFFHRLEESFLVEEDKKHERHPIFGNIVDEVAYHEKYPTIYHLRKKLVDSTDKADLRLIYLALAHMIKFRGHFLIEGDLNPDNSDVDKLFIQLVQTYNQLFEENPINASGVDAKAILSARLSKSRRLENLIAQLPGEKKNGLFGNLIALSLGLTPNFKSNFDLAEDAKLQLSKDTYDDDLDNLLAQIGDQYADLFLAAKNLSDAILLSDILRVNTEITKAPLSASMIKRYDEHHQDLTLLKALVRQQLPEKYKEIFFDQSKNGYAGYIDGGASQEEFYKFIKPILEKMDGTEELLVKLNREDLLRKQRTFDNGSIPHQIHLGELHAILRRQEDFYPFLKDNREKIEKILTFRIPYYVGPLARGNSRFAWMTRKSEETITPWNFEEVVDKGASAQSFIERMTNFDKNLPNEKVLPKHSLLYEYFTVYNELTKVKYVTEGMRKPAFLSGEQKKAIVDLLFKTNRKVTVKQLKEDYFKKIECFDSVEISGVEDRFNASLGTYHDLLKIIKDKDFLDNEENEDILEDIVLTLTLFEDREMIEERLKTYAHLFDDKVMKQLKRRRYTGWGRLSRKLINGIRDKQSGKTILDFLKSDGFANRNFMQLIHDDSLTFKEDIQKAQVSGQGDSLHEHIANLAGSPAIKKGILQTVKVVDELVKVMGRHKPENIVIEMARENQTTQKGQKNSRERMKRIEEGIKELGSQILKEHPVENTQLQNEKLYLYYLQNGRDMYVDQELDINRLSDYDVDHIVPQSFLKDDSIDNKVLTRSDKARGKSDNVPSEEVVKKMKNYWRQLLNAKLITQRKFDNLTKAERGGLSELDKAGFIKRQLVETRQITKHVAQILDSRMNTKYDENDKLIREVKVITLKSKLVSDFRKDFQFYKVREINNYHHAHDAYLNAVVGTALIKKYPKLESEFVYGDYKVYDVRKMIAKSEQEIGKATAKYFFYSNIMNFFKTEITLANGEIRKRPLIETNGETGEIVWDKGRDFATVRKVLSMPQVNIVKKTEVQTGGFSKESILPKRNSDKLIARKKDWDPKKYGGFDSPTVAYSVLVVAKVEKGKSKKLKSVKELLGITIMERSSFEKNPIDFLEAKGYKEVKKDLIIKLPKYSLFELENGRKRMLASAGELQKGNELALPSKYVNFLYLASHYEKLKGSPEDNEQKQLFVEQHKHYLDEIIEQISEFSKRVILADANLDKVLSAYNKHRDKPIREQAENIIHLFTLTNLGAPAAFKYFDTTIDRKRYTSTKEVLDATLIHQSITGLYETRIDLSQLGGDGGGGSGGGGSSGGVLNLEEEYRLHEKPVPSSIDPSWLQLFPTVWAERAGMGLANQVPPVVVELRSGASPVAVRQYPMSKEAREGIRPHIQRFLDLGVLVPCQSPWNTPLLPVKKPGTNDYRPVQDLREINKRVQDIHPTVPNPYNLLSSLPPSHTWYSVLDLKDAFFCLKLHPNSQPLFAFEWRDPEKGNTGQLTWTRLPQGFKNSPTLFDEALHRDLAPFRALNPQVVLLQYVDDLLVAAPTYRDCKEGTQKLLQELSKLGYRVSAKKAQLCQKEVTYLGYLLKEGKRWLTPARKATVMKIPPPTTPRQVREFLGTAGFCRLWIPGFASLAAPLYPLTKESIPFIWTEEHQKAFDRIKEALLSAPALALPDLTKPFTLYVDERAGVARGVLTQTLGPWRRPVAYLSKKLDPVASGWPTCLKAVAAVALLLKDADKLTLGQNVTVIASHSLESIVRQPPDRWMTNARMTHYQSLLLNERVSFAPPAVLNPATLLPVESEATPVHRCSEILAEETGTRRDLKDQPLPGVPAWYTDGSSFIAEGKRRAGAAIVDGKRTVWASSLPEGTSAQKAELVALTQALRLAEGKDINIYTDSRYAFATAHIHGAIYKQRGLLTSAGKDIKNKEEILALLEAIHLPKRVAIIHCPGHQKGNDPVATGNRRADEAAKQAALSTRVLAETTKPAGKRTADGSEFEKRTADGSEFESPKKKAKVE

SEQ ID NO: 793 - protein, 2094 aa, synthetic construct
MPAAKRVKLDGGDKKYSIGLDIGTNSVGWAVITDEYKVPSKKFKVLGNTDRHSIKKNLIGALLFDSGETAEATRLKRTARRRYTRRKNRICYLQEIFSNEMAKVDDSFFHRLEESFLVEEDKKHERHPIFGNIVDEVAYHEKYPTIYHLRKKLVDSTDKADLRLIYLALAHMIKFRGHFLIEGDLNPDNSDVDKLFIQLVQTYNQLFEENPINASGVDAKAILSARLSKSRRLENLIAQLPGEKKNGLFGNLIALSLGLTPNFKSNFDLAEDAKLQLSKDTYDDDLDNLLAQIGDQYADLFLAAKNLSDAILLSDILRVNTEITKAPLSASMIKRYDEHHQDLTLLKALVRQQLPEKYKEIFFDQSKNGYAGYIDGGASQEEFYKFIKPILEKMDGTEELLVKLNREDLLRKQRTFDNGSIPHQIHLGELHAILRRQEDFYPFLKDNREKIEKILTFRIPYYVGPLARGNSRFAWMTRKSEETITPWNFEEVVDKGASAQSFIERMTNFDKNLPNEKVLPKHSLLYEYFTVYNELTKVKYVTEGMRKPAFLSGEQKKAIVDLLFKTNRKVTVKQLKEDYFKKIECFDSVEISGVEDRFNASLGTYHDLLKIIKDKDFLDNEENEDILEDIVLTLTLFEDREMIEERLKTYAHLFDDKVMKQLKRRRYTGWGRLSRKLINGIRDKQSGKTILDFLKSDGFANRNFMQLIHDDSLTFKEDIQKAQVSGQGDSLHEHIANLAGSPAIKKGILQTVKVVDELVKVMGRHKPENIVIEMARENQTTQKGQKNSRERMKRIEEGIKELGSQILKEHPVENTQLQNEKLYLYYLQNGRDMYVDQELDINRLSDYDVDHIVPQSFLKDDSIDNKVLTRSDKARGKSDNVPSEEVVKKMKNYWRQLLNAKLITQRKFDNLTKAERGGLSELDKAGFIKRQLVETRQITKHVAQILDSRMNTKYDENDKLIREVKVITLKSKLVSDFRKDFQFYKVREINNYHHAHDAYLNAVVGTALIKKYPKLESEFVYGDYKVYDVRKMIAKSEQEIGKATAKYFFYSNIMNFFKTEITLANGEIRKRPLIETNGETGEIVWDKGRDFATVRKVLSMPQVNIVKKTEVQTGGFSKESILPKRNSDKLIARKKDWDPKKYGGFDSPTVAYSVLVVAKVEKGKSKKLKSVKELLGITIMERSSFEKNPIDFLEAKGYKEVKKDLIIKLPKYSLFELENGRKRMLASAGELQKGNELALPSKYVNFLYLASHYEKLKGSPEDNEQKQLFVEQHKHYLDEIIEQISEFSKRVILADANLDKVLSAYNKHRDKPIREQAENIIHLFTLTNLGAPAAFKYFDTTIDRKRYTSTKEVLDATLIHQSITGLYETRIDLSQLGGDGGPAPGSSEAAAKGGVLNLEEEYRLHEKPVPSSIDPSWLQLFPTVWAERAGMGLANQVPPVVVELRSGASPVAVRQYPMSKEAREGIRPHIQRFLDLGVLVPCQSPWNTPLLPVKKPGTNDYRPVQDLREINKRVQDIHPTVPNPYNLLSSLPPSHTWYSVLDLKDAFFCLKLHPNSQPLFAFEWRDPEKGNTGQLTWTRLPQGFKNSPTLFDEALHRDLAPFRALNPQVVLLQYVDDLLVAAPTYRDCKEGTQKLLQELSKLGYRVSAKKAQLCQKEVTYLGYLLKEGKRWLTPARKATVMKIPPPTTPRQVREFLGTAGFCRLWIPGFASLAAPLYPLTKESIPFIWTEEHQKAFDRIKEALLSAPALALPDLTKPFTLYVDERAGVARGVLTQTLGPWRRPVAYLSKKLDPVASGWPTCLKAVAAVALLLKDADKLTLGQNVTVIASHSLESIVRQPPDRWMTNARMTHYQSLLLNERVSFAPPAVLNPATLLPVESEATPVHRCSEILAEETGTRRDLKDQPLPGVPAWYTDGSSFIAEGKRRAGAAIVDGKRTVWASSLPEGTSAQKAELVALTQALRLAEGKDINIYTDSRYAFATAHIHGAIYKQRGLLTSAGKDIKNKEEILALLEAIHLPKRVAIIHCPGHQKGNDPVATGNRRADEAAKQAALSTRVLAETTKPAGKRTADGSEFEKRTADGSEFESPKKKAKVE

SEQ ID NO: 794 - protein, 2092 aa, synthetic construct
MPAAKRVKLDGGDKKYSIGLDIGTNSVGWAVITDEYKVPSKKFKVLGNTDRHSIKKNLIGALLFDSGETAEATRLKRTARRRYTRRKNRICYLQEIFSNEMAKVDDSFFHRLEESFLVEEDKKHERHPIFGNIVDEVAYHEKYPTIYHLRKKLVDSTDKADLRLIYLALAHMIKFRGHFLIEGDLNPDNSDVDKLFIQLVQTYNQLFEENPINASGVDAKAILSARLSKSRRLENLIAQLPGEKKNGLFGNLIALSLGLTPNFKSNFDLAEDAKLQLSKDTYDDDLDNLLAQIGDQYADLFLAAKNLSDAILLSDILRVNTEITKAPLSASMIKRYDEHHQDLTLLKALVRQQLPEKYKEIFFDQSKNGYAGYIDGGASQEEFYKFIKPILEKMDGTEELLVKLNREDLLRKQRTFDNGSIPHQIHLGELHAILRRQEDFYPFLKDNREKIEKILTFRIPYYVGPLARGNSRFAWMTRKSEETITPWNFEEVVDKGASAQSFIERMTNFDKNLPNEKVLPKHSLLYEYFTVYNELTKVKYVTEGMRKPAFLSGEQKKAIVDLLFKTNRKVTVKQLKEDYFKKIECFDSVEISGVEDRFNASLGTYHDLLKIIKDKDFLDNEENEDILEDIVLTLTLFEDREMIEERLKTYAHLFDDKVMKQLKRRRYTGWGRLSRKLINGIRDKQSGKTILDFLKSDGFANRNFMQLIHDDSLTFKEDIQKAQVSGQGDSLHEHIANLAGSPAIKKGILQTVKVVDELVKVMGRHKPENIVIEMARENQTTQKGQKNSRERMKRIEEGIKELGSQILKEHPVENTQLQNEKLYLYYLQNGRDMYVDQELDINRLSDYDVDHIVPQSFLKDDSIDNKVLTRSDKARGKSDNVPSEEVVKKMKNYWRQLLNAKLITQRKFDNLTKAERGGLSELDKAGFIKRQLVETRQITKHVAQILDSRMNTKYDENDKLIREVKVITLKSKLVSDFRKDFQFYKVREINNYHHAHDAYLNAVVGTALIKKYPKLESEFVYGDYKVYDVRKMIAKSEQEIGKATAKYFFYSNIMNFFKTEITLANGEIRKRPLIETNGETGEIVWDKGRDFATVRKVLSMPQVNIVKKTEVQTGGFSKESILPKRNSDKLIARKKDWDPKKYGGFDSPTVAYSVLVVAKVEKGKSKKLKSVKELLGITIMERSSFEKNPIDFLEAKGYKEVKKDLIIKLPKYSLFELENGRKRMLASAGELQKGNELALPSKYVNFLYLASHYEKLKGSPEDNEQKQLFVEQHKHYLDEIIEQISEFSKRVILADANLDKVLSAYNKHRDKPIREQAENIIHLFTLTNLGAPAAFKYFDTTIDRKRYTSTKEVLDATLIHQSITGLYETRIDLSQLGGDGGGGSGSSPAPGGVLNLEEEYRLHEKPVPSSIDPSWLQLFPTVWAERAGMGLANQVPPVVVELRSGASPVAVRQYPMSKEAREGIRPHIQRFLDLGVLVPCQSPWNTPLLPVKKPGTNDYRPVQDLREINKRVQDIHPTVPNPYNLLSSLPPSHTWYSVLDLKDAFFCLKLHPNSQPLFAFEWRDPEKGNTGQLTWTRLPQGFKNSPTLFDEALHRDLAPFRALNPQVVLLQYVDDLLVAAPTYRDCKEGTQKLLQELSKLGYRVSAKKAQLCQKEVTYLGYLLKEGKRWLTPARKATVMKIPPPTTPRQVREFLGTAGFCRLWIPGFASLAAPLYPLTKESIPFIWTEEHQKAFDRIKEALLSAPALALPDLTKPFTLYVDERAGVARGVLTQTLGPWRRPVAYLSKKLDPVASGWPTCLKAVAAVALLLKDADKLTLGQNVTVIASHSLESIVRQPPDRWMTNARMTHYQSLLLNERVSFAPPAVLNPATLLPVESEATPVHRCSEILAEETGTRRDLKDQPLPGVPAWYTDGSSFIAEGKRRAGAAIVDGKRTVWASSLPEGTSAQKAELVALTQALRLAEGKDINIYTDSRYAFATAHIHGAIYKQRGLLTSAGKDIKNKEEILALLEAIHLPKRVAIIHCPGHQKGNDPVATGNRRADEAAKQAALSTRVLAETTKPAGKRTADGSEFEKRTADGSEFESPKKKAKVE

SEQ ID NO: 795 - protein, 2096 aa, synthetic construct
MPAAKRVKLDGGDKKYSIGLDIGTNSVGWAVITDEYKVPSKKFKVLGNTDRHSIKKNLIGALLFDSGETAEATRLKRTARRRYTRRKNRICYLQEIFSNEMAKVDDSFFHRLEESFLVEEDKKHERHPIFGNIVDEVAYHEKYPTIYHLRKKLVDSTDKADLRLIYLALAHMIKFRGHFLIEGDLNPDNSDVDKLFIQLVQTYNQLFEENPINASGVDAKAILSARLSKSRRLENLIAQLPGEKKNGLFGNLIALSLGLTPNFKSNFDLAEDAKLQLSKDTYDDDLDNLLAQIGDQYADLFLAAKNLSDAILLSDILRVNTEITKAPLSASMIKRYDEHHQDLTLLKALVRQQLPEKYKEIFFDQSKNGYAGYIDGGASQEEFYKFIKPILEKMDGTEELLVKLNREDLLRKQRTFDNGSIPHQIHLGELHAILRRQEDFYPFLKDNREKIEKILTFRIPYYVGPLARGNSRFAWMTRKSEETITPWNFEEVVDKGASAQSFIERMTNFDKNLPNEKVLPKHSLLYEYFTVYNELTKVKYVTEGMRKPAFLSGEQKKAIVDLLFKTNRKVTVKQLKEDYFKKIECFDSVEISGVEDRFNASLGTYHDLLKIIKDKDFLDNEENEDILEDIVLTLTLFEDREMIEERLKTYAHLFDDKVMKQLKRRRYTGWGRLSRKLINGIRDKQSGKTILDFLKSDGFANRNFMQLIHDDSLTFKEDIQKAQVSGQGDSLHEHIANLAGSPAIKKGILQTVKVVDELVKVMGRHKPENIVIEMARENQTTQKGQKNSRERMKRIEEGIKELGSQILKEHPVENTQLQNEKLYLYYLQNGRDMYVDQELDINRLSDYDVDHIVPQSFLKDDSIDNKVLTRSDKARGKSDNVPSEEVVKKMKNYWRQLLNAKLITQRKFDNLTKAERGGLSELDKAGFIKRQLVETRQITKHVAQILDSRMNTKYDENDKLIREVKVITLKSKLVSDFRKDFQFYKVREINNYHHAHDAYLNAVVGTALIKKYPKLESEFVYGDYKVYDVRKMIAKSEQEIGKATAKYFFYSNIMNFFKTEITLANGEIRKRPLIETNGETGEIVWDKGRDFATVRKVLSMPQVNIVKKTEVQTGGFSKESILPKRNSDKLIARKKDWDPKKYGGFDSPTVAYSVLVVAKVEKGKSKKLKSVKELLGITIMERSSFEKNPIDFLEAKGYKEVKKDLIIKLPKYSLFELENGRKRMLASAGELQKGNELALPSKYVNFLYLASHYEKLKGSPEDNEQKQLFVEQHKHYLDEIIEQISEFSKRVILADANLDKVLSAYNKHRDKPIREQAENIIHLFTLTNLGAPAAFKYFDTTIDRKRYTSTKEVLDATLIHQSITGLYETRIDLSQLGGDGGPAPAPAPAPAPAPGGVLNLEEEYRLHEKPVPSSIDPSWLQLFPTVWAERAGMGLANQVPPVVVELRSGASPVAVRQYPMSKEAREGIRPHIQRFLDLGVLVPCQSPWNTPLLPVKKPGTNDYRPVQDLREINKRVQDIHPTVPNPYNLLSSLPPSHTWYSVLDLKDAFFCLKLHPNSQPLFAFEWRDPEKGNTGQLTWTRLPQGFKNSPTLFDEALHRDLAPFRALNPQVVLLQYVDDLLVAAPTYRDCKEGTQKLLQELSKLGYRVSAKKAQLCQKEVTYLGYLLKEGKRWLTPARKATVMKIPPPTTPRQVREFLGTAGFCRLWIPGFASLAAPLYPLTKESIPFIWTEEHQKAFDRIKEALLSAPALALPDLTKPFTLYVDERAGVARGVLTQTLGPWRRPVAYLSKKLDPVASGWPTCLKAVAAVALLLKDADKLTLGQNVTVIASHSLESIVRQPPDRWMTNARMTHYQSLLLNERVSFAPPAVLNPATLLPVESEATPVHRCSEILAEETGTRRDLKDQPLPGVPAWYTDGSSFIAEGKRRAGAAIVDGKRTVWASSLPEGTSAQKAELVALTQALRLAEGKDINIYTDSRYAFATAHIHGAIYKQRGLLTSAGKDIKNKEEILALLEAIHLPKRVAIIHCPGHQKGNDPVATGNRRADEAAKQAALSTRVLAETTKPAGKRTADGSEFEKRTADGSEFESPKKKAKVE

SEQ ID NO: 796 - protein, 2094 aa, synthetic construct
MPAAKRVKLDGGDKKYSIGLDIGTNSVGWAVITDEYKVPSKKFKVLGNTDRHSIKKNLIGALLFDSGETAEATRLKRTARRRYTRRKNRICYLQEIFSNEMAKVDDSFFHRLEESFLVEEDKKHERHPIFGNIVDEVAYHEKYPTIYHLRKKLVDSTDKADLRLIYLALAHMIKFRGHFLIEGDLNPDNSDVDKLFIQLVQTYNQLFEENPINASGVDAKAILSARLSKSRRLENLIAQLPGEKKNGLFGNLIALSLGLTPNFKSNFDLAEDAKLQLSKDTYDDDLDNLLAQIGDQYADLFLAAKNLSDAILLSDILRVNTEITKAPLSASMIKRYDEHHQDLTLLKALVRQQLPEKYKEIFFDQSKNGYAGYIDGGASQEEFYKFIKPILEKMDGTEELLVKLNREDLLRKQRTFDNGSIPHQIHLGELHAILRRQEDFYPFLKDNREKIEKILTFRIPYYVGPLARGNSRFAWMTRKSEETITPWNFEEVVDKGASAQSFIERMTNFDKNLPNEKVLPKHSLLYEYFTVYNELTKVKYVTEGMRKPAFLSGEQKKAIVDLLFKTNRKVTVKQLKEDYFKKIECFDSVEISGVEDRFNASLGTYHDLLKIIKDKDFLDNEENEDILEDIVLTLTLFEDREMIEERLKTYAHLFDDKVMKQLKRRRYTGWGRLSRKLINGIRDKQSGKTILDFLKSDGFANRNFMQLIHDDSLTFKEDIQKAQVSGQGDSLHEHIANLAGSPAIKKGILQTVKVVDELVKVMGRHKPENIVIEMARENQTTQKGQKNSRERMKRIEEGIKELGSQILKEHPVENTQLQNEKLYLYYLQNGRDMYVDQELDINRLSDYDVDHIVPQSFLKDDSIDNKVLTRSDKARGKSDNVPSEEVVKKMKNYWRQLLNAKLITQRKFDNLTKAERGGLSELDKAGFIKRQLVETRQITKHVAQILDSRMNTKYDENDKLIREVKVITLKSKLVSDFRKDFQFYKVREINNYHHAHDAYLNAVVGTALIKKYPKLESEFVYGDYKVYDVRKMIAKSEQEIGKATAKYFFYSNIMNFFKTEITLANGEIRKRPLIETNGETGEIVWDKGRDFATVRKVLSMPQVNIVKKTEVQTGGFSKESILPKRNSDKLIARKKDWDPKKYGGFDSPTVAYSVLVVAKVEKGKSKKLKSVKELLGITIMERSSFEKNPIDFLEAKGYKEVKKDLIIKLPKYSLFELENGRKRMLASAGELQKGNELALPSKYVNFLYLASHYEKLKGSPEDNEQKQLFVEQHKHYLDEIIEQISEFSKRVILADANLDKVLSAYNKHRDKPIREQAENIIHLFTLTNLGAPAAFKYFDTTIDRKRYTSTKEVLDATLIHQSITGLYETRIDLSQLGGDGGGGSGGGEAAAKGGVLNLEEEYRLHEKPVPSSIDPSWLQLFPTVWAERAGMGLANQVPPVVVELRSGASPVAVRQYPMSKEAREGIRPHIQRFLDLGVLVPCQSPWNTPLLPVKKPGTNDYRPVQDLREINKRVQDIHPTVPNPYNLLSSLPPSHTWYSVLDLKDAFFCLKLHPNSQPLFAFEWRDPEKGNTGQLTWTRLPQGFKNSPTLFDEALHRDLAPFRALNPQVVLLQYVDDLLVAAPTYRDCKEGTQKLLQELSKLGYRVSAKKAQLCQKEVTYLGYLLKEGKRWLTPARKATVMKIPPPTTPRQVREFLGTAGFCRLWIPGFASLAAPLYPLTKESIPFIWTEEHQKAFDRIKEALLSAPALALPDLTKPFTLYVDERAGVARGVLTQTLGPWRRPVAYLSKKLDPVASGWPTCLKAVAAVALLLKDADKLTLGQNVTVIASHSLESIVRQPPDRWMTNARMTHYQSLLLNERVSFAPPAVLNPATLLPVESEATPVHRCSEILAEETGTRRDLKDQPLPGVPAWYTDGSSFIAEGKRRAGAAIVDGKRTVWASSLPEGTSAQKAELVALTQALRLAEGKDINIYTDSRYAFATAHIHGAIYKQRGLLTSAGKDIKNKEEILALLEAIHLPKRVAIIHCPGHQKGNDPVATGNRRADEAAKQAALSTRVLAETTKPAGKRTADGSEFEKRTADGSEFESPKKKAKVE

SEQ ID NO: 797 - protein, 2092 aa, synthetic construct
MPAAKRVKLDGGDKKYSIGLDIGTNSVGWAVITDEYKVPSKKFKVLGNTDRHSIKKNLIGALLFDSGETAEATRLKRTARRRYTRRKNRICYLQEIFSNEMAKVDDSFFHRLEESFLVEEDKKHERHPIFGNIVDEVAYHEKYPTIYHLRKKLVDSTDKADLRLIYLALAHMIKFRGHFLIEGDLNPDNSDVDKLFIQLVQTYNQLFEENPINASGVDAKAILSARLSKSRRLENLIAQLPGEKKNGLFGNLIALSLGLTPNFKSNFDLAEDAKLQLSKDTYDDDLDNLLAQIGDQYADLFLAAKNLSDAILLSDILRVNTEITKAPLSASMIKRYDEHHQDLTLLKALVRQQLPEKYKEIFFDQSKNGYAGYIDGGASQEEFYKFIKPILEKMDGTEELLVKLNREDLLRKQRTFDNGSIPHQIHLGELHAILRRQEDFYPFLKDNREKIEKILTFRIPYYVGPLARGNSRFAWMTRKSEETITPWNFEEVVDKGASAQSFIERMTNFDKNLPNEKVLPKHSLLYEYFTVYNELTKVKYVTEGMRKPAFLSGEQKKAIVDLLFKTNRKVTVKQLKEDYFKKIECFDSVEISGVEDRFNASLGTYHDLLKIIKDKDFLDNEENEDILEDIVLTLTLFEDREMIEERLKTYAHLFDDKVMKQLKRRRYTGWGRLSRKLINGIRDKQSGKTILDFLKSDGFANRNFMQLIHDDSLTFKEDIQKAQVSGQGDSLHEHIANLAGSPAIKKGILQTVKVVDELVKVMGRHKPENIVIEMARENQTTQKGQKNSRERMKRIEEGIKELGSQILKEHPVENTQLQNEKLYLYYLQNGRDMYVDQELDINRLSDYDVDHIVPQSFLKDDSIDNKVLTRSDKARGKSDNVPSEEVVKKMKNYWRQLLNAKLITQRKFDNLTKAERGGLSELDKAGFIKRQLVETRQITKHVAQILDSRMNTKYDENDKLIREVKVITLKSKLVSDFRKDFQFYKVREINNYHHAHDAYLNAVVGTALIKKYPKLESEFVYGDYKVYDVRKMIAKSEQEIGKATAKYFFYSNIMNFFKTEITLANGEIRKRPLIETNGETGEIVWDKGRDFATVRKVLSMPQVNIVKKTEVQTGGFSKESILPKRNSDKLIARKKDWDPKKYGGFDSPTVAYSVLVVAKVEKGKSKKLKSVKELLGITIMERSSFEKNPIDFLEAKGYKEVKKDLIIKLPKYSLFELENGRKRMLASAGELQKGNELALPSKYVNFLYLASHYEKLKGSPEDNEQKQLFVEQHKHYLDEIIEQISEFSKRVILADANLDKVLSAYNKHRDKPIREQAENIIHLFTLTNLGAPAAFKYFDTTIDRKRYTSTKEVLDATLIHQSITGLYETRIDLSQLGGDGGGGGPAPGSSGGVLNLEEEYRLHEKPVPSSIDPSWLQLFPTVWAERAGMGLANQVPPVVVELRSGASPVAVRQYPMSKEAREGIRPHIQRFLDLGVLVPCQSPWNTPLLPVKKPGTNDYRPVQDLREINKRVQDIHPTVPNPYNLLSSLPPSHTWYSVLDLKDAFFCLKLHPNSQPLFAFEWRDPEKGNTGQLTWTRLPQGFKNSPTLFDEALHRDLAPFRALNPQVVLLQYVDDLLVAAPTYRDCKEGTQKLLQELSKLGYRVSAKKAQLCQKEVTYLGYLLKEGKRWLTPARKATVMKIPPPTTPRQVREFLGTAGFCRLWIPGFASLAAPLYPLTKESIPFIWTEEHQKAFDRIKEALLSAPALALPDLTKPFTLYVDERAGVARGVLTQTLGPWRRPVAYLSKKLDPVASGWPTCLKAVAAVALLLKDADKLTLGQNVTVIASHSLESIVRQPPDRWMTNARMTHYQSLLLNERVSFAPPAVLNPATLLPVESEATPVHRCSEILAEETGTRRDLKDQPLPGVPAWYTDGSSFIAEGKRRAGAAIVDGKRTVWASSLPEGTSAQKAELVALTQALRLAEGKDINIYTDSRYAFATAHIHGAIYKQRGLLTSAGKDIKNKEEILALLEAIHLPKRVAIIHCPGHQKGNDPVATGNRRADEAAKQAALSTRVLAETTKPAGKRTADGSEFEKRTADGSEFESPKKKAKVE

SEQ ID NO: 798 - protein, 2094 aa, synthetic construct
MPAAKRVKLDGGDKKYSIGLDIGTNSVGWAVITDEYKVPSKKFKVLGNTDRHSIKKNLIGALLFDSGETAEATRLKRTARRRYTRRKNRICYLQEIFSNEMAKVDDSFFHRLEESFLVEEDKKHERHPIFGNIVDEVAYHEKYPTIYHLRKKLVDSTDKADLRLIYLALAHMIKFRGHFLIEGDLNPDNSDVDKLFIQLVQTYNQLFEENPINASGVDAKAILSARLSKSRRLENLIAQLPGEKKNGLFGNLIALSLGLTPNFKSNFDLAEDAKLQLSKDTYDDDLDNLLAQIGDQYADLFLAAKNLSDAILLSDILRVNTEITKAPLSASMIKRYDEHHQDLTLLKALVRQQLPEKYKEIFFDQSKNGYAGYIDGGASQEEFYKFIKPILEKMDGTEELLVKLNREDLLRKQRTFDNGSIPHQIHLGELHAILRRQEDFYPFLKDNREKIEKILTFRIPYYVGPLARGNSRFAWMTRKSEETITPWNFEEVVDKGASAQSFIERMTNFDKNLPNEKVLPKHSLLYEYFTVYNELTKVKYVTEGMRKPAFLSGEQKKAIVDLLFKTNRKVTVKQLKEDYFKKIECFDSVEISGVEDRFNASLGTYHDLLKIIKDKDFLDNEENEDILEDIVLTLTLFEDREMIEERLKTYAHLFDDKVMKQLKRRRYTGWGRLSRKLINGIRDKQSGKTILDFLKSDGFANRNFMQLIHDDSLTFKEDIQKAQVSGQGDSLHEHIANLAGSPAIKKGILQTVKVVDELVKVMGRHKPENIVIEMARENQTTQKGQKNSRERMKRIEEGIKELGSQILKEHPVENTQLQNEKLYLYYLQNGRDMYVDQELDINRLSDYDVDHIVPQSFLKDDSIDNKVLTRSDKARGKSDNVPSEEVVKKMKNYWRQLLNAKLITQRKFDNLTKAERGGLSELDKAGFIKRQLVETRQITKHVAQILDSRMNTKYDENDKLIREVKVITLKSKLVSDFRKDFQFYKVREINNYHHAHDAYLNAVVGTALIKKYPKLESEFVYGDYKVYDVRKMIAKSEQEIGKATAKYFFYSNIMNFFKTEITLANGEIRKRPLIETNGETGEIVWDKGRDFATVRKVLSMPQVNIVKKTEVQTGGFSKESILPKRNSDKLIARKKDWDPKKYGGFDSPTVAYSVLVVAKVEKGKSKKLKSVKELLGITIMERSSFEKNPIDFLEAKGYKEVKKDLIIKLPKYSLFELENGRKRMLASAGELQKGNELALPSKYVNFLYLASHYEKLKGSPEDNEQKQLFVEQHKHYLDEIIEQISEFSKRVILADANLDKVLSAYNKHRDKPIREQAENIIHLFTLTNLGAPAAFKYFDTTIDRKRYTSTKEVLDATLIHQSITGLYETRIDLSQLGGDGGGGGGGSEAAAKGGVLNLEEEYRLHEKPVPSSIDPSWLQLFPTVWAERAGMGLANQVPPVVVELRSGASPVAVRQYPMSKEAREGIRPHIQRFLDLGVLVPCQSPWNTPLLPVKKPGTNDYRPVQDLREINKRVQDIHPTVPNPYNLLSSLPPSHTWYSVLDLKDAFFCLKLHPNSQPLFAFEWRDPEKGNTGQLTWTRLPQGFKNSPTLFDEALHRDLAPFRALNPQVVLLQYVDDLLVAAPTYRDCKEGTQKLLQELSKLGYRVSAKKAQLCQKEVTYLGYLLKEGKRWLTPARKATVMKIPPPTTPRQVREFLGTAGFCRLWIPGFASLAAPLYPLTKESIPFIWTEEHQKAFDRIKEALLSAPALALPDLTKPFTLYVDERAGVARGVLTQTLGPWRRPVAYLSKKLDPVASGWPTCLKAVAAVALLLKDADKLTLGQNVTVIASHSLESIVRQPPDRWMTNARMTHYQSLLLNERVSFAPPAVLNPATLLPVESEATPVHRCSEILAEETGTRRDLKDQPLPGVPAWYTDGSSFIAEGKRRAGAAIVDGKRTVWASSLPEGTSAQKAELVALTQALRLAEGKDINIYTDSRYAFATAHIHGAIYKQRGLLTSAGKDIKNKEEILALLEAIHLPKRVAIIHCPGHQKGNDPVATGNRRADEAAKQAALSTRVLAETTKPAGKRTADGSEFEKRTADGSEFESPKKKAKVE

SEQ ID NO: 799 - protein, 2108 aa, synthetic construct
MPAAKRVKLDGGDKKYSIGLDIGTNSVGWAVITDEYKVPSKKFKVLGNTDRHSIKKNLIGALLFDSGETAEATRLKRTARRRYTRRKNRICYLQEIFSNEMAKVDDSFFHRLEESFLVEEDKKHERHPIFGNIVDEVAYHEKYPTIYHLRKKLVDSTDKADLRLIYLALAHMIKFRGHFLIEGDLNPDNSDVDKLFIQLVQTYNQLFEENPINASGVDAKAILSARLSKSRRLENLIAQLPGEKKNGLFGNLIALSLGLTPNFKSNFDLAEDAKLQLSKDTYDDDLDNLLAQIGDQYADLFLAAKNLSDAILLSDILRVNTEITKAPLSASMIKRYDEHHQDLTLLKALVRQQLPEKYKEIFFDQSKNGYAGYIDGGASQEEFYKFIKPILEKMDGTEELLVKLNREDLLRKQRTFDNGSIPHQIHLGELHAILRRQEDFYPFLKDNREKIEKILTFRIPYYVGPLARGNSRFAWMTRKSEETITPWNFEEVVDKGASAQSFIERMTNFDKNLPNEKVLPKHSLLYEYFTVYNELTKVKYVTEGMRKPAFLSGEQKKAIVDLLFKTNRKVTVKQLKEDYFKKIECFDSVEISGVEDRFNASLGTYHDLLKIIKDKDFLDNEENEDILEDIVLTLTLFEDREMIEERLKTYAHLFDDKVMKQLKRRRYTGWGRLSRKLINGIRDKQSGKTILDFLKSDGFANRNFMQLIHDDSLTFKEDIQKAQVSGQGDSLHEHIANLAGSPAIKKGILQTVKVVDELVKVMGRHKPENIVIEMARENQTTQKGQKNSRERMKRIEEGIKELGSQILKEHPVENTQLQNEKLYLYYLQNGRDMYVDQELDINRLSDYDVDHIVPQSFLKDDSIDNKVLTRSDKARGKSDNVPSEEVVKKMKNYWRQLLNAKLITQRKFDNLTKAERGGLSELDKAGFIKRQLVETRQITKHVAQILDSRMNTKYDENDKLIREVKVITLKSKLVSDFRKDFQFYKVREINNYHHAHDAYLNAVVGTALIKKYPKLESEFVYGDYKVYDVRKMIAKSEQEIGKATAKYFFYSNIMNFFKTEITLANGEIRKRPLIETNGETGEIVWDKGRDFATVRKVLSMPQVNIVKKTEVQTGGFSKESILPKRNSDKLIARKKDWDPKKYGGFDSPTVAYSVLVVAKVEKGKSKKLKSVKELLGITIMERSSFEKNPIDFLEAKGYKEVKKDLIIKLPKYSLFELENGRKRMLASAGELQKGNELALPSKYVNFLYLASHYEKLKGSPEDNEQKQLFVEQHKHYLDEIIEQISEFSKRVILADANLDKVLSAYNKHRDKPIREQAENIIHLFTLTNLGAPAAFKYFDTTIDRKRYTSTKEVLDATLIHQSITGLYETRIDLSQLGGDGGEAAAKEAAAKEAAAKEAAAKEAAAKGGVLNLEEEYRLHEKPVPSSIDPSWLQLFPTVWAERAGMGLANQVPPVVVELRSGASPVAVRQYPMSKEAREGIRPHIQRFLDLGVLVPCQSPWNTPLLPVKKPGTNDYRPVQDLREINKRVQDIHPTVPNPYNLLSSLPPSHTWYSVLDLKDAFFCLKLHPNSQPLFAFEWRDPEKGNTGQLTWTRLPQGFKNSPTLFNEALHRDLAPFRALNPQVVLLQYVDDLLVAAPTYRDCKEGTQKLLQELSKLGYRVSAKKAQLCQKEVTYLGYLLKEGKRWLTPARKATVMKIPPPTTPRQVREFLGTAGFCRLWIPGFASLAAPLYPLTKPSIPFIWTEEHQKAFDRIKEALLSAPALALPDLTKPFTLYVDERAGVARGVLTQTLGPWRRPVAYLSKKLDPVASGWPTCLKAVAAVALLLKDADKLTLGQNVTVIASHSLESIVRQPPDRWMTNARMTHYQSLLLNERVSFAPPAVLNPATLLPVESEATPVHRCSEILAEETGTRRDLKDQPLPGVPAWYTDGSSFIAEGKRRAGAAIVDGKRTVWASSLPEGTSAQKAELVALTQALRLAEGKDINIYTDSRYAFATAHIHGAIYKQRGWLTSAGKDIKNKEEILALLEAIHLPKRVAIIHCPGHQKGNDPVATGNRRADEAAKQAALSTRVLAETTKPAGKRTADGSEFEKRTADGSEFESPKKKAKVE

SEQ ID NO: 800 - protein, 2094 aa, synthetic construct
MPAAKRVKLDGGDKKYSIGLDIGTNSVGWAVITDEYKVPSKKFKVLGNTDRHSIKKNLIGALLFDSGETAEATRLKRTARRRYTRRKNRICYLQEIFSNEMAKVDDSFFHRLEESFLVEEDKKHERHPIFGNIVDEVAYHEKYPTIYHLRKKLVDSTDKADLRLIYLALAHMIKFRGHFLIEGDLNPDNSDVDKLFIQLVQTYNQLFEENPINASGVDAKAILSARLSKSRRLENLIAQLPGEKKNGLFGNLIALSLGLTPNFKSNFDLAEDAKLQLSKDTYDDDLDNLLAQIGDQYADLFLAAKNLSDAILLSDILRVNTEITKAPLSASMIKRYDEHHQDLTLLKALVRQQLPEKYKEIFFDQSKNGYAGYIDGGASQEEFYKFIKPILEKMDGTEELLVKLNREDLLRKQRTFDNGSIPHQIHLGELHAILRRQEDFYPFLKDNREKIEKILTFRIPYYVGPLARGNSRFAWMTRKSEETITPWNFEEVVDKGASAQSFIERMTNFDKNLPNEKVLPKHSLLYEYFTVYNELTKVKYVTEGMRKPAFLSGEQKKAIVDLLFKTNRKVTVKQLKEDYFKKIECFDSVEISGVEDRFNASLGTYHDLLKIIKDKDFLDNEENEDILEDIVLTLTLFEDREMIEERLKTYAHLFDDKVMKQLKRRRYTGWGRLSRKLINGIRDKQSGKTILDFLKSDGFANRNFMQLIHDDSLTFKEDIQKAQVSGQGDSLHEHIANLAGSPAIKKGILQTVKVVDELVKVMGRHKPENIVIEMARENQTTQKGQKNSRERMKRIEEGIKELGSQILKEHPVENTQLQNEKLYLYYLQNGRDMYVDQELDINRLSDYDVDHIVPQSFLKDDSIDNKVLTRSDKARGKSDNVPSEEVVKKMKNYWRQLLNAKLITQRKFDNLTKAERGGLSELDKAGFIKRQLVETRQITKHVAQILDSRMNTKYDENDKLIREVKVITLKSKLVSDFRKDFQFYKVREINNYHHAHDAYLNAVVGTALIKKYPKLESEFVYGDYKVYDVRKMIAKSEQEIGKATAKYFFYSNIMNFFKTEITLANGEIRKRPLIETNGETGEIVWDKGRDFATVRKVLSMPQVNIVKKTEVQTGGFSKESILPKRNSDKLIARKKDWDPKKYGGFDSPTVAYSVLVVAKVEKGKSKKLKSVKELLGITIMERSSFEKNPIDFLEAKGYKEVKKDLIIKLPKYSLFELENGRKRMLASAGELQKGNELALPSKYVNFLYLASHYEKLKGSPEDNEQKQLFVEQHKHYLDEIIEQISEFSKRVILADANLDKVLSAYNKHRDKPIREQAENIIHLFTLTNLGAPAAFKYFDTTIDRKRYTSTKEVLDATLIHQSITGLYETRIDLSQLGGDGGGGGGGSEAAAKGGVLNLEEEYRLHEKPVPSSIDPSWLQLFPTVWAERAGMGLANQVPPVVVELRSGASPVAVRQYPMSKEAREGIRPHIQRFLDLGVLVPCQSPWNTPLLPVKKPGTNDYRPVQDLREINKRVQDIHPTVPNPYNLLSSLPPSHTWYSVLDLKDAFFCLKLHPNSQPLFAFEWRDPEKGNTGQLTWTRLPQGFKNSPTLFNEALHRDLAPFRALNPQVVLLQYVDDLLVAAPTYRDCKEGTQKLLQELSKLGYRVSAKKAQLCQKEVTYLGYLLKEGKRWLTPARKATVMKIPPPTTPRQVREFLGTAGFCRLWIPGFASLAAPLYPLTKPSIPFIWTEEHQKAFDRIKEALLSAPALALPDLTKPFTLYVDERAGVARGVLTQTLGPWRRPVAYLSKKLDPVASGWPTCLKAVAAVALLLKDADKLTLGQNVTVIASHSLESIVRQPPDRWMTNARMTHYQSLLLNERVSFAPPAVLNPATLLPVESEATPVHRCSEILAEETGTRRDLKDQPLPGVPAWYTDGSSFIAEGKRRAGAAIVDGKRTVWASSLPEGTSAQKAELVALTQALRLAEGKDINIYTDSRYAFATAHIHGAIYKQRGWLTSAGKDIKNKEEILALLEAIHLPKRVAIIHCPGHQKGNDPVATGNRRADEAAKQAALSTRVLAETTKPAGKRTADGSEFEKRTADGSEFESPKKKAKVE

SEQ ID NO: 801 - protein, 2129 aa, synthetic construct
MPAAKRVKLDGGDKKYSIGLDIGTNSVGWAVITDEYKVPSKKFKVLGNTDRHSIKKNLIGALLFDSGETAEATRLKRTARRRYTRRKNRICYLQEIFSNEMAKVDDSFFHRLEESFLVEEDKKHERHPIFGNIVDEVAYHEKYPTIYHLRKKLVDSTDKADLRLIYLALAHMIKFRGHFLIEGDLNPDNSDVDKLFIQLVQTYNQLFEENPINASGVDAKAILSARLSKSRRLENLIAQLPGEKKNGLFGNLIALSLGLTPNFKSNFDLAEDAKLQLSKDTYDDDLDNLLAQIGDQYADLFLAAKNLSDAILLSDILRVNTEITKAPLSASMIKRYDEHHQDLTLLKALVRQQLPEKYKEIFFDQSKNGYAGYIDGGASQEEFYKFIKPILEKMDGTEELLVKLNREDLLRKQRTFDNGSIPHQIHLGELHAILRRQEDFYPFLKDNREKIEKILTFRIPYYVGPLARGNSRFAWMTRKSEETITPWNFEEVVDKGASAQSFIERMTNFDKNLPNEKVLPKHSLLYEYFTVYNELTKVKYVTEGMRKPAFLSGEQKKAIVDLLFKTNRKVTVKQLKEDYFKKIECFDSVEISGVEDRFNASLGTYHDLLKIIKDKDFLDNEENEDILEDIVLTLTLFEDREMIEERLKTYAHLFDDKVMKQLKRRRYTGWGRLSRKLINGIRDKQSGKTILDFLKSDGFANRNFMQLIHDDSLTFKEDIQKAQVSGQGDSLHEHIANLAGSPAIKKGILQTVKVVDELVKVMGRHKPENIVIEMARENQTTQKGQKNSRERMKRIEEGIKELGSQILKEHPVENTQLQNEKLYLYYLQNGRDMYVDQELDINRLSDYDVDHIVPQSFLKDDSIDNKVLTRSDKARGKSDNVPSEEVVKKMKNYWRQLLNAKLITQRKFDNLTKAERGGLSELDKAGFIKRQLVETRQITKHVAQILDSRMNTKYDENDKLIREVKVITLKSKLVSDFRKDFQFYKVREINNYHHAHDAYLNAVVGTALIKKYPKLESEFVYGDYKVYDVRKMIAKSEQEIGKATAKYFFYSNIMNFFKTEITLANGEIRKRPLIETNGETGEIVWDKGRDFATVRKVLSMPQVNIVKKTEVQTGGFSKESILPKRNSDKLIARKKDWDPKKYGGFDSPTVAYSVLVVAKVEKGKSKKLKSVKELLGITIMERSSFEKNPIDFLEAKGYKEVKKDLIIKLPKYSLFELENGRKRMLASAGELQKGNELALPSKYVNFLYLASHYEKLKGSPEDNEQKQLFVEQHKHYLDEIIEQISEFSKRVILADANLDKVLSAYNKHRDKPIREQAENIIHLFTLTNLGAPAAFKYFDTTIDRKRYTSTKEVLDATLIHQSITGLYETRIDLSQLGGDGGAEAAAKEAAAKEAAAKEAAAKALEAEAAAKEAAAKEAAAKEAAAKAGGVLNLEEEYRLHEKPVPSSIDPSWLQLFPTVWAERAGMGLANQVPPVVVELRSGASPVAVRQYPMSKEAREGIRPHIQRFLDLGVLVPCQSPWNTPLLPVKKPGTNDYRPVQDLREINKRVQDIHPTVPNPYNLLSSLPPSHTWYSVLDLKDAFFCLKLHPNSQPLFAFEWRDPEKGNTGQLTWTRLPQGFKNSPTLFNEALHRDLAPFRALNPQVVLLQYVDDLLVAAPTYRDCKEGTQKLLQELSKLGYRVSAKKAQLCQKEVTYLGYLLKEGKRWLTPARKATVMKIPPPTTPRQVREFLGTAGFCRLWIPGFASLAAPLYPLTKPSIPFIWTEEHQKAFDRIKEALLSAPALALPDLTKPFTLYVDERAGVARGVLTQTLGPWRRPVAYLSKKLDPVASGWPTCLKAVAAVALLLKDADKLTLGQNVTVIASHSLESIVRQPPDRWMTNARMTHYQSLLLNERVSFAPPAVLNPATLLPVESEATPVHRCSEILAEETGTRRDLKDQPLPGVPAWYTDGSSFIAEGKRRAGAAIVDGKRTVWASSLPEGTSAQKAELVALTQALRLAEGKDINIYTDSRYAFATAHIHGAIYKQRGWLTSAGKDIKNKEEILALLEAIHLPKRVAIIHCPGHQKGNDPVATGNRRADEAAKQAALSTRVLAETTKPAGKRTADGSEFEKRTADGSEFESPKKKAKVE

SEQ ID NO: 802 - protein, 2090 aa, synthetic construct
MPAAKRVKLDGGDKKYSIGLDIGTNSVGWAVITDEYKVPSKKFKVLGNTDRHSIKKNLIGALLFDSGETAEATRLKRTARRRYTRRKNRICYLQEIFSNEMAKVDDSFFHRLEESFLVEEDKKHERHPIFGNIVDEVAYHEKYPTIYHLRKKLVDSTDKADLRLIYLALAHMIKFRGHFLIEGDLNPDNSDVDKLFIQLVQTYNQLFEENPINASGVDAKAILSARLSKSRRLENLIAQLPGEKKNGLFGNLIALSLGLTPNFKSNFDLAEDAKLQLSKDTYDDDLDNLLAQIGDQYADLFLAAKNLSDAILLSDILRVNTEITKAPLSASMIKRYDEHHQDLTLLKALVRQQLPEKYKEIFFDQSKNGYAGYIDGGASQEEFYKFIKPILEKMDGTEELLVKLNREDLLRKQRTFDNGSIPHQIHLGELHAILRRQEDFYPFLKDNREKIEKILTFRIPYYVGPLARGNSRFAWMTRKSEETITPWNFEEVVDKGASAQSFIERMTNFDKNLPNEKVLPKHSLLYEYFTVYNELTKVKYVTEGMRKPAFLSGEQKKAIVDLLFKTNRKVTVKQLKEDYFKKIECFDSVEISGVEDRFNASLGTYHDLLKIIKDKDFLDNEENEDILEDIVLTLTLFEDREMIEERLKTYAHLFDDKVMKQLKRRRYTGWGRLSRKLINGIRDKQSGKTILDFLKSDGFANRNFMQLIHDDSLTFKEDIQKAQVSGQGDSLHEHIANLAGSPAIKKGILQTVKVVDELVKVMGRHKPENIVIEMARENQTTQKGQKNSRERMKRIEEGIKELGSQILKEHPVENTQLQNEKLYLYYLQNGRDMYVDQELDINRLSDYDVDHIVPQSFLKDDSIDNKVLTRSDKARGKSDNVPSEEVVKKMKNYWRQLLNAKLITQRKFDNLTKAERGGLSELDKAGFIKRQLVETRQITKHVAQILDSRMNTKYDENDKLIREVKVITLKSKLVSDFRKDFQFYKVREINNYHHAHDAYLNAVVGTALIKKYPKLESEFVYGDYKVYDVRKMIAKSEQEIGKATAKYFFYSNIMNFFKTEITLANGEIRKRPLIETNGETGEIVWDKGRDFATVRKVLSMPQVNIVKKTEVQTGGFSKESILPKRNSDKLIARKKDWDPKKYGGFDSPTVAYSVLVVAKVEKGKSKKLKSVKELLGITIMERSSFEKNPIDFLEAKGYKEVKKDLIIKLPKYSLFELENGRKRMLASAGELQKGNELALPSKYVNFLYLASHYEKLKGSPEDNEQKQLFVEQHKHYLDEIIEQISEFSKRVILADANLDKVLSAYNKHRDKPIREQAENIIHLFTLTNLGAPAAFKYFDTTIDRKRYTSTKEVLDATLIHQSITGLYETRIDLSQLGGDGGGGGGGGGGGVLNLEEEYRLHEKPVPSSIDPSWLQLFPTVWAERAGMGLANQVPPVVVELRSGASPVAVRQYPMSKEAREGIRPHIQRFLDLGVLVPCQSPWNTPLLPVKKPGTNDYRPVQDLREINKRVQDIHPTVPNPYNLLSSLPPSHTWYSVLDLKDAFFCLKLHPNSQPLFAFEWRDPEKGNTGQLTWTRLPQGFKNSPTLFNEALHRDLAPFRALNPQVVLLQYVDDLLVAAPTYRDCKEGTQKLLQELSKLGYRVSAKKAQLCQKEVTYLGYLLKEGKRWLTPARKATVMKIPPPTTPRQVREFLGTAGFCRLWIPGFASLAAPLYPLTKPSIPFIWTEEHQKAFDRIKEALLSAPALALPDLTKPFTLYVDERAGVARGVLTQTLGPWRRPVAYLSKKLDPVASGWPTCLKAVAAVALLLKDADKLTLGQNVTVIASHSLESIVRQPPDRWMTNARMTHYQSLLLNERVSFAPPAVLNPATLLPVESEATPVHRCSEILAEETGTRRDLKDQPLPGVPAWYTDGSSFIAEGKRRAGAAIVDGKRTVWASSLPEGTSAQKAELVALTQALRLAEGKDINIYTDSRYAFATAHIHGAIYKQRGWLTSAGKDIKNKEEILALLEAIHLPKRVAIIHCPGHQKGNDPVATGNRRADEAAKQAALSTRVLAETTKPAGKRTADGSEFEKRTADGSEFESPKKKAKVE

SEQ ID NO: 803 - protein, 2086 aa, synthetic construct
MPAAKRVKLDGGDKKYSIGLDIGTNSVGWAVITDEYKVPSKKFKVLGNTDRHSIKKNLIGALLFDSGETAEATRLKRTARRRYTRRKNRICYLQEIFSNEMAKVDDSFFHRLEESFLVEEDKKHERHPIFGNIVDEVAYHEKYPTIYHLRKKLVDSTDKADLRLIYLALAHMIKFRGHFLIEGDLNPDNSDVDKLFIQLVQTYNQLFEENPINASGVDAKAILSARLSKSRRLENLIAQLPGEKKNGLFGNLIALSLGLTPNFKSNFDLAEDAKLQLSKDTYDDDLDNLLAQIGDQYADLFLAAKNLSDAILLSDILRVNTEITKAPLSASMIKRYDEHHQDLTLLKALVRQQLPEKYKEIFFDQSKNGYAGYIDGGASQEEFYKFIKPILEKMDGTEELLVKLNREDLLRKQRTFDNGSIPHQIHLGELHAILRRQEDFYPFLKDNREKIEKILTFRIPYYVGPLARGNSRFAWMTRKSEETITPWNFEEVVDKGASAQSFIERMTNFDKNLPNEKVLPKHSLLYEYFTVYNELTKVKYVTEGMRKPAFLSGEQKKAIVDLLFKTNRKVTVKQLKEDYFKKIECFDSVEISGVEDRFNASLGTYHDLLKIIKDKDFLDNEENEDILEDIVLTLTLFEDREMIEERLKTYAHLFDDKVMKQLKRRRYTGWGRLSRKLINGIRDKQSGKTILDFLKSDGFANRNFMQLIHDDSLTFKEDIQKAQVSGQGDSLHEHIANLAGSPAIKKGILQTVKVVDELVKVMGRHKPENIVIEMARENQTTQKGQKNSRERMKRIEEGIKELGSQILKEHPVENTQLQNEKLYLYYLQNGRDMYVDQELDINRLSDYDVDHIVPQSFLKDDSIDNKVLTRSDKARGKSDNVPSEEVVKKMKNYWRQLLNAKLITQRKFDNLTKAERGGLSELDKAGFIKRQLVETRQITKHVAQILDSRMNTKYDENDKLIREVKVITLKSKLVSDFRKDFQFYKVREINNYHHAHDAYLNAVVGTALIKKYPKLESEFVYGDYKVYDVRKMIAKSEQEIGKATAKYFFYSNIMNFFKTEITLANGEIRKRPLIETNGETGEIVWDKGRDFATVRKVLSMPQVNIVKKTEVQTGGFSKESILPKRNSDKLIARKKDWDPKKYGGFDSPTVAYSVLVVAKVEKGKSKKLKSVKELLGITIMERSSFEKNPIDFLEAKGYKEVKKDLIIKLPKYSLFELENGRKRMLASAGELQKGNELALPSKYVNFLYLASHYEKLKGSPEDNEQKQLFVEQHKHYLDEIIEQISEFSKRVILADANLDKVLSAYNKHRDKPIREQAENIIHLFTLTNLGAPAAFKYFDTTIDRKRYTSTKEVLDATLIHQSITGLYETRIDLSQLGGDGGGSSGGVLNLEEEYRLHEKPVPSSIDPSWLQLFPTVWAERAGMGLANQVPPVVVELRSGASPVAVRQYPMSKEAREGIRPHIQRFLDLGVLVPCQSPWNTPLLPVKKPGTNDYRPVQDLREINKRVQDIHPTVPNPYNLLSSLPPSHTWYSVLDLKDAFFCLKLHPNSQPLFAFEWRDPEKGNTGQLTWTRLPQGFKNSPTLFNEALHRDLAPFRALNPQVVLLQYVDDLLVAAPTYRDCKEGTQKLLQELSKLGYRVSAKKAQLCQKEVTYLGYLLKEGKRWLTPARKATVMKIPPPTTPRQVREFLGTAGFCRLWIPGFASLAAPLYPLTKPSIPFIWTEEHQKAFDRIKEALLSAPALALPDLTKPFTLYVDERAGVARGVLTQTLGPWRRPVAYLSKKLDPVASGWPTCLKAVAAVALLLKDADKLTLGQNVTVIASHSLESIVRQPPDRWMTNARMTHYQSLLLNERVSFAPPAVLNPATLLPVESEATPVHRCSEILAEETGTRRDLKDQPLPGVPAWYTDGSSFIAEGKRRAGAAIVDGKRTVWASSLPEGTSAQKAELVALTQALRLAEGKDINIYTDSRYAFATAHIHGAIYKQRGWLTSAGKDIKNKEEILALLEAIHLPKRVAIIHCPGHQKGNDPVATGNRRADEAAKQAALSTRVLAETTKPAGKRTADGSEFEKRTADGSEFESPKKKAKVE

SEQ ID NO: 804 - protein, 2092 aa, synthetic construct
MPAAKRVKLDGGDKKYSIGLDIGTNSVGWAVITDEYKVPSKKFKVLGNTDRHSIKKNLIGALLFDSGETAEATRLKRTARRRYTRRKNRICYLQEIFSNEMAKVDDSFFHRLEESFLVEEDKKHERHPIFGNIVDEVAYHEKYPTIYHLRKKLVDSTDKADLRLIYLALAHMIKFRGHFLIEGDLNPDNSDVDKLFIQLVQTYNQLFEENPINASGVDAKAILSARLSKSRRLENLIAQLPGEKKNGLFGNLIALSLGLTPNFKSNFDLAEDAKLQLSKDTYDDDLDNLLAQIGDQYADLFLAAKNLSDAILLSDILRVNTEITKAPLSASMIKRYDEHHQDLTLLKALVRQQLPEKYKEIFFDQSKNGYAGYIDGGASQEEFYKFIKPILEKMDGTEELLVKLNREDLLRKQRTFDNGSIPHQIHLGELHAILRRQEDFYPFLKDNREKIEKILTFRIPYYVGPLARGNSRFAWMTRKSEETITPWNFEEVVDKGASAQSFIERMTNFDKNLPNEKVLPKHSLLYEYFTVYNELTKVKYVTEGMRKPAFLSGEQKKAIVDLLFKTNRKVTVKQLKEDYFKKIECFDSVEISGVEDRFNASLGTYHDLLKIIKDKDFLDNEENEDILEDIVLTLTLFEDREMIEERLKTYAHLFDDKVMKQLKRRRYTGWGRLSRKLINGIRDKQSGKTILDFLKSDGFANRNFMQLIHDDSLTFKEDIQKAQVSGQGDSLHEHIANLAGSPAIKKGILQTVKVVDELVKVMGRHKPENIVIEMARENQTTQKGQKNSRERMKRIEEGIKELGSQILKEHPVENTQLQNEKLYLYYLQNGRDMYVDQELDINRLSDYDVDHIVPQSFLKDDSIDNKVLTRSDKARGKSDNVPSEEVVKKMKNYWRQLLNAKLITQRKFDNLTKAERGGLSELDKAGFIKRQLVETRQITKHVAQILDSRMNTKYDENDKLIREVKVITLKSKLVSDFRKDFQFYKVREINNYHHAHDAYLNAVVGTALIKKYPKLESEFVYGDYKVYDVRKMIAKSEQEIGKATAKYFFYSNIMNFFKTEITLANGEIRKRPLIETNGETGEIVWDKGRDFATVRKVLSMPQVNIVKKTEVQTGGFSKESILPKRNSDKLIARKKDWDPKKYGGFDSPTVAYSVLVVAKVEKGKSKKLKSVKELLGITIMERSSFEKNPIDFLEAKGYKEVKKDLIIKLPKYSLFELENGRKRMLASAGELQKGNELALPSKYVNFLYLASHYEKLKGSPEDNEQKQLFVEQHKHYLDEIIEQISEFSKRVILADANLDKVLSAYNKHRDKPIREQAENIIHLFTLTNLGAPAAFKYFDTTIDRKRYTSTKEVLDATLIHQSITGLYETRIDLSQLGGDGGGGGGSSGGSGGVLNLEEEYRLHEKPVPSSIDPSWLQLFPTVWAERAGMGLANQVPPVVVELRSGASPVAVRQYPMSKEAREGIRPHIQRFLDLGVLVPCQSPWNTPLLPVKKPGTNDYRPVQDLREINKRVQDIHPTVPNPYNLLSSLPPSHTWYSVLDLKDAFFCLKLHPNSQPLFAFEWRDPEKGNTGQLTWTRLPQGFKNSPTLFNEALHRDLAPFRALNPQVVLLQYVDDLLVAAPTYRDCKEGTQKLLQELSKLGYRVSAKKAQLCQKEVTYLGYLLKEGKRWLTPARKATVMKIPPPTTPRQVREFLGTAGFCRLWIPGFASLAAPLYPLTKPSIPFIWTEEHQKAFDRIKEALLSAPALALPDLTKPFTLYVDERAGVARGVLTQTLGPWRRPVAYLSKKLDPVASGWPTCLKAVAAVALLLKDADKLTLGQNVTVIASHSLESIVRQPPDRWMTNARMTHYQSLLLNERVSFAPPAVLNPATLLPVESEATPVHRCSEILAEETGTRRDLKDQPLPGVPAWYTDGSSFIAEGKRRAGAAIVDGKRTVWASSLPEGTSAQKAELVALTQALRLAEGKDINIYTDSRYAFATAHIHGAIYKQRGWLTSAGKDIKNKEEILALLEAIHLPKRVAIIHCPGHQKGNDPVATGNRRADEAAKQAALSTRVLAETTKPAGKRTADGSEFEKRTADGSEFESPKKKAKVE

SEQ ID NO: 805 - protein, 2089 aa, synthetic construct
MPAAKRVKLDGGDKKYSIGLDIGTNSVGWAVITDEYKVPSKKFKVLGNTDRHSIKKNLIGALLFDSGETAEATRLKRTARRRYTRRKNRICYLQEIFSNEMAKVDDSFFHRLEESFLVEEDKKHERHPIFGNIVDEVAYHEKYPTIYHLRKKLVDSTDKADLRLIYLALAHMIKFRGHFLIEGDLNPDNSDVDKLFIQLVQTYNQLFEENPINASGVDAKAILSARLSKSRRLENLIAQLPGEKKNGLFGNLIALSLGLTPNFKSNFDLAEDAKLQLSKDTYDDDLDNLLAQIGDQYADLFLAAKNLSDAILLSDILRVNTEITKAPLSASMIKRYDEHHQDLTLLKALVRQQLPEKYKEIFFDQSKNGYAGYIDGGASQEEFYKFIKPILEKMDGTEELLVKLNREDLLRKQRTFDNGSIPHQIHLGELHAILRRQEDFYPFLKDNREKIEKILTFRIPYYVGPLARGNSRFAWMTRKSEETITPWNFEEVVDKGASAQSFIERMTNFDKNLPNEKVLPKHSLLYEYFTVYNELTKVKYVTEGMRKPAFLSGEQKKAIVDLLFKTNRKVTVKQLKEDYFKKIECFDSVEISGVEDRFNASLGTYHDLLKIIKDKDFLDNEENEDILEDIVLTLTLFEDREMIEERLKTYAHLFDDKVMKQLKRRRYTGWGRLSRKLINGIRDKQSGKTILDFLKSDGFANRNFMQLIHDDSLTFKEDIQKAQVSGQGDSLHEHIANLAGSPAIKKGILQTVKVVDELVKVMGRHKPENIVIEMARENQTTQKGQKNSRERMKRIEEGIKELGSQILKEHPVENTQLQNEKLYLYYLQNGRDMYVDQELDINRLSDYDVDHIVPQSFLKDDSIDNKVLTRSDKARGKSDNVPSEEVVKKMKNYWRQLLNAKLITQRKFDNLTKAERGGLSELDKAGFIKRQLVETRQITKHVAQILDSRMNTKYDENDKLIREVKVITLKSKLVSDFRKDFQFYKVREINNYHHAHDAYLNAVVGTALIKKYPKLESEFVYGDYKVYDVRKMIAKSEQEIGKATAKYFFYSNIMNFFKTEITLANGEIRKRPLIETNGETGEIVWDKGRDFATVRKVLSMPQVNIVKKTEVQTGGFSKESILPKRNSDKLIARKKDWDPKKYGGFDSPTVAYSVLVVAKVEKGKSKKLKSVKELLGITIMERSSFEKNPIDFLEAKGYKEVKKDLIIKLPKYSLFELENGRKRMLASAGELQKGNELALPSKYVNFLYLASHYEKLKGSPEDNEQKQLFVEQHKHYLDEIIEQISEFSKRVILADANLDKVLSAYNKHRDKPIREQAENIIHLFTLTNLGAPAAFKYFDTTIDRKRYTSTKEVLDATLIHQSITGLYETRIDLSQLGGDGGGGGGGGGGVLNLEEEYRLHEKPVPSSIDPSWLQLFPTVWAERAGMGLANQVPPVVVELRSGASPVAVRQYPMSKEAREGIRPHIQRFLDLGVLVPCQSPWNTPLLPVKKPGTNDYRPVQDLREINKRVQDIHPTVPNPYNLLSSLPPSHTWYSVLDLKDAFFCLKLHPNSQPLFAFEWRDPEKGNTGQLTWTRLPQGFKNSPTLFNEALHRDLAPFRALNPQVVLLQYVDDLLVAAPTYRDCKEGTQKLLQELSKLGYRVSAKKAQLCQKEVTYLGYLLKEGKRWLTPARKATVMKIPPPTTPRQVREFLGTAGFCRLWIPGFASLAAPLYPLTKPSIPFIWTEEHQKAFDRIKEALLSAPALALPDLTKPFTLYVDERAGVARGVLTQTLGPWRRPVAYLSKKLDPVASGWPTCLKAVAAVALLLKDADKLTLGQNVTVIASHSLESIVRQPPDRWMTNARMTHYQSLLLNERVSFAPPAVLNPATLLPVESEATPVHRCSEILAEETGTRRDLKDQPLPGVPAWYTDGSSFIAEGKRRAGAAIVDGKRTVWASSLPEGTSAQKAELVALTQALRLAEGKDINIYTDSRYAFATAHIHGAIYKQRGWLTSAGKDIKNKEEILALLEAIHLPKRVAIIHCPGHQKGNDPVATGNRRADEAAKQAALSTRVLAETTKPAGKRTADGSEFEKRTADGSEFESPKKKAKVE

SEQ ID NO: 806 - protein, 2099 aa, synthetic construct
MPAAKRVKLDGGDKKYSIGLDIGTNSVGWAVITDEYKVPSKKFKVLGNTDRHSIKKNLIGALLFDSGETAEATRLKRTARRRYTRRKNRICYLQEIFSNEMAKVDDSFFHRLEESFLVEEDKKHERHPIFGNIVDEVAYHEKYPTIYHLRKKLVDSTDKADLRLIYLALAHMIKFRGHFLIEGDLNPDNSDVDKLFIQLVQTYNQLFEENPINASGVDAKAILSARLSKSRRLENLIAQLPGEKKNGLFGNLIALSLGLTPNFKSNFDLAEDAKLQLSKDTYDDDLDNLLAQIGDQYADLFLAAKNLSDAILLSDILRVNTEITKAPLSASMIKRYDEHHQDLTLLKALVRQQLPEKYKEIFFDQSKNGYAGYIDGGASQEEFYKFIKPILEKMDGTEELLVKLNREDLLRKQRTFDNGSIPHQIHLGELHAILRRQEDFYPFLKDNREKIEKILTFRIPYYVGPLARGNSRFAWMTRKSEETITPWNFEEVVDKGASAQSFIERMTNFDKNLPNEKVLPKHSLLYEYFTVYNELTKVKYVTEGMRKPAFLSGEQKKAIVDLLFKTNRKVTVKQLKEDYFKKIECFDSVEISGVEDRFNASLGTYHDLLKIIKDKDFLDNEENEDILEDIVLTLTLFEDREMIEERLKTYAHLFDDKVMKQLKRRRYTGWGRLSRKLINGIRDKQSGKTILDFLKSDGFANRNFMQLIHDDSLTFKEDIQKAQVSGQGDSLHEHIANLAGSPAIKKGILQTVKVVDELVKVMGRHKPENIVIEMARENQTTQKGQKNSRERMKRIEEGIKELGSQILKEHPVENTQLQNEKLYLYYLQNGRDMYVDQELDINRLSDYDVDHIVPQSFLKDDSIDNKVLTRSDKARGKSDNVPSEEVVKKMKNYWRQLLNAKLITQRKFDNLTKAERGGLSELDKAGFIKRQLVETRQITKHVAQILDSRMNTKYDENDKLIREVKVITLKSKLVSDFRKDFQFYKVREINNYHHAHDAYLNAVVGTALIKKYPKLESEFVYGDYKVYDVRKMIAKSEQEIGKATAKYFFYSNIMNFFKTEITLANGEIRKRPLIETNGETGEIVWDKGRDFATVRKVLSMPQVNIVKKTEVQTGGFSKESILPKRNSDKLIARKKDWDPKKYGGFDSPTVAYSVLVVAKVEKGKSKKLKSVKELLGITIMERSSFEKNPIDFLEAKGYKEVKKDLIIKLPKYSLFELENGRKRMLASAGELQKGNELALPSKYVNFLYLASHYEKLKGSPEDNEQKQLFVEQHKHYLDEIIEQISEFSKRVILADANLDKVLSAYNKHRDKPIREQAENIIHLFTLTNLGAPAAFKYFDTTIDRKRYTSTKEVLDATLIHQSITGLYETRIDLSQLGGDGGSGSETPGTSESATPESGGVLNLEEEYRLHEKPVPSSIDPSWLQLFPTVWAERAGMGLANQVPPVVVELRSGASPVAVRQYPMSKEAREGIRPHIQRFLDLGVLVPCQSPWNTPLLPVKKPGTNDYRPVQDLREINKRVQDIHPTVPNPYNLLSSLPPSHTWYSVLDLKDAFFCLKLHPNSQPLFAFEWRDPEKGNTGQLTWTRLPQGFKNSPTLFNEALHRDLAPFRALNPQVVLLQYVDDLLVAAPTYRDCKEGTQKLLQELSKLGYRVSAKKAQLCQKEVTYLGYLLKEGKRWLTPARKATVMKIPPPTTPRQVREFLGTAGFCRLWIPGFASLAAPLYPLTKPSIPFIWTEEHQKAFDRIKEALLSAPALALPDLTKPFTLYVDERAGVARGVLTQTLGPWRRPVAYLSKKLDPVASGWPTCLKAVAAVALLLKDADKLTLGQNVTVIASHSLESIVRQPPDRWMTNARMTHYQSLLLNERVSFAPPAVLNPATLLPVESEATPVHRCSEILAEETGTRRDLKDQPLPGVPAWYTDGSSFIAEGKRRAGAAIVDGKRTVWASSLPEGTSAQKAELVALTQALRLAEGKDINIYTDSRYAFATAHIHGAIYKQRGWLTSAGKDIKNKEEILALLEAIHLPKRVAIIHCPGHQKGNDPVATGNRRADEAAKQAALSTRVLAETTKPAGKRTADGSEFEKRTADGSEFESPKKKAKVE

SEQ ID NO: 807 - protein, 2094 aa, synthetic construct
MPAAKRVKLDGGDKKYSIGLDIGTNSVGWAVITDEYKVPSKKFKVLGNTDRHSIKKNLIGALLFDSGETAEATRLKRTARRRYTRRKNRICYLQEIFSNEMAKVDDSFFHRLEESFLVEEDKKHERHPIFGNIVDEVAYHEKYPTIYHLRKKLVDSTDKADLRLIYLALAHMIKFRGHFLIEGDLNPDNSDVDKLFIQLVQTYNQLFEENPINASGVDAKAILSARLSKSRRLENLIAQLPGEKKNGLFGNLIALSLGLTPNFKSNFDLAEDAKLQLSKDTYDDDLDNLLAQIGDQYADLFLAAKNLSDAILLSDILRVNTEITKAPLSASMIKRYDEHHQDLTLLKALVRQQLPEKYKEIFFDQSKNGYAGYIDGGASQEEFYKFIKPILEKMDGTEELLVKLNREDLLRKQRTFDNGSIPHQIHLGELHAILRRQEDFYPFLKDNREKIEKILTFRIPYYVGPLARGNSRFAWMTRKSEETITPWNFEEVVDKGASAQSFIERMTNFDKNLPNEKVLPKHSLLYEYFTVYNELTKVKYVTEGMRKPAFLSGEQKKAIVDLLFKTNRKVTVKQLKEDYFKKIECFDSVEISGVEDRFNASLGTYHDLLKIIKDKDFLDNEENEDILEDIVLTLTLFEDREMIEERLKTYAHLFDDKVMKQLKRRRYTGWGRLSRKLINGIRDKQSGKTILDFLKSDGFANRNFMQLIHDDSLTFKEDIQKAQVSGQGDSLHEHIANLAGSPAIKKGILQTVKVVDELVKVMGRHKPENIVIEMARENQTTQKGQKNSRERMKRIEEGIKELGSQILKEHPVENTQLQNEKLYLYYLQNGRDMYVDQELDINRLSDYDVDHIVPQSFLKDDSIDNKVLTRSDKARGKSDNVPSEEVVKKMKNYWRQLLNAKLITQRKFDNLTKAERGGLSELDKAGFIKRQLVETRQITKHVAQILDSRMNTKYDENDKLIREVKVITLKSKLVSDFRKDFQFYKVREINNYHHAHDAYLNAVVGTALIKKYPKLESEFVYGDYKVYDVRKMIAKSEQEIGKATAKYFFYSNIMNFFKTEITLANGEIRKRPLIETNGETGEIVWDKGRDFATVRKVLSMPQVNIVKKTEVQTGGFSKESILPKRNSDKLIARKKDWDPKKYGGFDSPTVAYSVLVVAKVEKGKSKKLKSVKELLGITIMERSSFEKNPIDFLEAKGYKEVKKDLIIKLPKYSLFELENGRKRMLASAGELQKGNELALPSKYVNFLYLASHYEKLKGSPEDNEQKQLFVEQHKHYLDEIIEQISEFSKRVILADANLDKVLSAYNKHRDKPIREQAENIIHLFTLTNLGAPAAFKYFDTTIDRKRYTSTKEVLDATLIHQSITGLYETRIDLSQLGGDGGGGGGSSEAAAKGGVLNLEEEYRLHEKPVPSSIDPSWLQLFPTVWAERAGMGLANQVPPVVVELRSGASPVAVRQYPMSKEAREGIRPHIQRFLDLGVLVPCQSPWNTPLLPVKKPGTNDYRPVQDLREINKRVQDIHPTVPNPYNLLSSLPPSHTWYSVLDLKDAFFCLKLHPNSQPLFAFEWRDPEKGNTGQLTWTRLPQGFKNSPTLFNEALHRDLAPFRALNPQVVLLQYVDDLLVAAPTYRDCKEGTQKLLQELSKLGYRVSAKKAQLCQKEVTYLGYLLKEGKRWLTPARKATVMKIPPPTTPRQVREFLGTAGFCRLWIPGFASLAAPLYPLTKPSIPFIWTEEHQKAFDRIKEALLSAPALALPDLTKPFTLYVDERAGVARGVLTQTLGPWRRPVAYLSKKLDPVASGWPTCLKAVAAVALLLKDADKLTLGQNVTVIASHSLESIVRQPPDRWMTNARMTHYQSLLLNERVSFAPPAVLNPATLLPVESEATPVHRCSEILAEETGTRRDLKDQPLPGVPAWYTDGSSFIAEGKRRAGAAIVDGKRTVWASSLPEGTSAQKAELVALTQALRLAEGKDINIYTDSRYAFATAHIHGAIYKQRGWLTSAGKDIKNKEEILALLEAIHLPKRVAIIHCPGHQKGNDPVATGNRRADEAAKQAALSTRVLAETTKPAGKRTADGSEFEKRTADGSEFESPKKKAKVE

SEQ ID NO: 808 - protein, 2093 aa, synthetic construct
MPAAKRVKLDGGDKKYSIGLDIGTNSVGWAVITDEYKVPSKKFKVLGNTDRHSIKKNLIGALLFDSGETAEATRLKRTARRRYTRRKNRICYLQEIFSNEMAKVDDSFFHRLEESFLVEEDKKHERHPIFGNIVDEVAYHEKYPTIYHLRKKLVDSTDKADLRLIYLALAHMIKFRGHFLIEGDLNPDNSDVDKLFIQLVQTYNQLFEENPINASGVDAKAILSARLSKSRRLENLIAQLPGEKKNGLFGNLIALSLGLTPNFKSNFDLAEDAKLQLSKDTYDDDLDNLLAQIGDQYADLFLAAKNLSDAILLSDILRVNTEITKAPLSASMIKRYDEHHQDLTLLKALVRQQLPEKYKEIFFDQSKNGYAGYIDGGASQEEFYKFIKPILEKMDGTEELLVKLNREDLLRKQRTFDNGSIPHQIHLGELHAILRRQEDFYPFLKDNREKIEKILTFRIPYYVGPLARGNSRFAWMTRKSEETITPWNFEEVVDKGASAQSFIERMTNFDKNLPNEKVLPKHSLLYEYFTVYNELTKVKYVTEGMRKPAFLSGEQKKAIVDLLFKTNRKVTVKQLKEDYFKKIECFDSVEISGVEDRFNASLGTYHDLLKIIKDKDFLDNEENEDILEDIVLTLTLFEDREMIEERLKTYAHLFDDKVMKQLKRRRYTGWGRLSRKLINGIRDKQSGKTILDFLKSDGFANRNFMQLIHDDSLTFKEDIQKAQVSGQGDSLHEHIANLAGSPAIKKGILQTVKVVDELVKVMGRHKPENIVIEMARENQTTQKGQKNSRERMKRIEEGIKELGSQILKEHPVENTQLQNEKLYLYYLQNGRDMYVDQELDINRLSDYDVDHIVPQSFLKDDSIDNKVLTRSDKARGKSDNVPSEEVVKKMKNYWRQLLNAKLITQRKFDNLTKAERGGLSELDKAGFIKRQLVETRQITKHVAQILDSRMNTKYDENDKLIREVKVITLKSKLVSDFRKDFQFYKVREINNYHHAHDAYLNAVVGTALIKKYPKLESEFVYGDYKVYDVRKMIAKSEQEIGKATAKYFFYSNIMNFFKTEITLANGEIRKRPLIETNGETGEIVWDKGRDFATVRKVLSMPQVNIVKKTEVQTGGFSKESILPKRNSDKLIARKKDWDPKKYGGFDSPTVAYSVLVVAKVEKGKSKKLKSVKELLGITIMERSSFEKNPIDFLEAKGYKEVKKDLIIKLPKYSLFELENGRKRMLASAGELQKGNELALPSKYVNFLYLASHYEKLKGSPEDNEQKQLFVEQHKHYLDEIIEQISEFSKRVILADANLDKVLSAYNKHRDKPIREQAENIIHLFTLTNLGAPAAFKYFDTTIDRKRYTSTKEVLDATLIHQSITGLYETRIDLSQLGGDGGGGGGSGGGGSGGVLNLEEEYRLHEKPVPSSIDPSWLQLFPTVWAERAGMGLANQVPPVVVELRSGASPVAVRQYPMSKEAREGIRPHIQRFLDLGVLVPCQSPWNTPLLPVKKPGTNDYRPVQDLREINKRVQDIHPTVPNPYNLLSSLPPSHTWYSVLDLKDAFFCLKLHPNSQPLFAFEWRDPEKGNTGQLTWTRLPQGFKNSPTLFNEALHRDLAPFRALNPQVVLLQYVDDLLVAAPTYRDCKEGTQKLLQELSKLGYRVSAKKAQLCQKEVTYLGYLLKEGKRWLTPARKATVMKIPPPTTPRQVREFLGTAGFCRLWIPGFASLAAPLYPLTKPSIPFIWTEEHQKAFDRIKEALLSAPALALPDLTKPFTLYVDERAGVARGVLTQTLGPWRRPVAYLSKKLDPVASGWPTCLKAVAAVALLLKDADKLTLGQNVTVIASHSLESIVRQPPDRWMTNARMTHYQSLLLNERVSFAPPAVLNPATLLPVESEATPVHRCSEILAEETGTRRDLKDQPLPGVPAWYTDGSSFIAEGKRRAGAAIVDGKRTVWASSLPEGTSAQKAELVALTQALRLAEGKDINIYTDSRYAFATAHIHGAIYKQRGWLTSAGKDIKNKEEILALLEAIHLPKRVAIIHCPGHQKGNDPVATGNRRADEAAKQAALSTRVLAETTKPAGKRTADGSEFEKRTADGSEFESPKKKAKVE

SEQ ID NO: 809 - protein, 2094 aa, synthetic construct
MPAAKRVKLDGGDKKYSIGLDIGTNSVGWAVITDEYKVPSKKFKVLGNTDRHSIKKNLIGALLFDSGETAEATRLKRTARRRYTRRKNRICYLQEIFSNEMAKVDDSFFHRLEESFLVEEDKKHERHPIFGNIVDEVAYHEKYPTIYHLRKKLVDSTDKADLRLIYLALAHMIKFRGHFLIEGDLNPDNSDVDKLFIQLVQTYNQLFEENPINASGVDAKAILSARLSKSRRLENLIAQLPGEKKNGLFGNLIALSLGLTPNFKSNFDLAEDAKLQLSKDTYDDDLDNLLAQIGDQYADLFLAAKNLSDAILLSDILRVNTEITKAPLSASMIKRYDEHHQDLTLLKALVRQQLPEKYKEIFFDQSKNGYAGYIDGGASQEEFYKFIKPILEKMDGTEELLVKLNREDLLRKQRTFDNGSIPHQIHLGELHAILRRQEDFYPFLKDNREKIEKILTFRIPYYVGPLARGNSRFAWMTRKSEETITPWNFEEVVDKGASAQSFIERMTNFDKNLPNEKVLPKHSLLYEYFTVYNELTKVKYVTEGMRKPAFLSGEQKKAIVDLLFKTNRKVTVKQLKEDYFKKIECFDSVEISGVEDRFNASLGTYHDLLKIIKDKDFLDNEENEDILEDIVLTLTLFEDREMIEERLKTYAHLFDDKVMKQLKRRRYTGWGRLSRKLINGIRDKQSGKTILDFLKSDGFANRNFMQLIHDDSLTFKEDIQKAQVSGQGDSLHEHIANLAGSPAIKKGILQTVKVVDELVKVMGRHKPENIVIEMARENQTTQKGQKNSRERMKRIEEGIKELGSQILKEHPVENTQLQNEKLYLYYLQNGRDMYVDQELDINRLSDYDVDHIVPQSFLKDDSIDNKVLTRSDKARGKSDNVPSEEVVKKMKNYWRQLLNAKLITQRKFDNLTKAERGGLSELDKAGFIKRQLVETRQITKHVAQILDSRMNTKYDENDKLIREVKVITLKSKLVSDFRKDFQFYKVREINNYHHAHDAYLNAVVGTALIKKYPKLESEFVYGDYKVYDVRKMIAKSEQEIGKATAKYFFYSNIMNFFKTEITLANGEIRKRPLIETNGETGEIVWDKGRDFATVRKVLSMPQVNIVKKTEVQTGGFSKESILPKRNSDKLIARKKDWDPKKYGGFDSPTVAYSVLVVAKVEKGKSKKLKSVKELLGITIMERSSFEKNPIDFLEAKGYKEVKKDLIIKLPKYSLFELENGRKRMLASAGELQKGNELALPSKYVNFLYLASHYEKLKGSPEDNEQKQLFVEQHKHYLDEIIEQISEFSKRVILADANLDKVLSAYNKHRDKPIREQAENIIHLFTLTNLGAPAAFKYFDTTIDRKRYTSTKEVLDATLIHQSITGLYETRIDLSQLGGDGGGSSGGSEAAAKGGVLNLEEEYRLHEKPVPSSIDPSWLQLFPTVWAERAGMGLANQVPPVVVELRSGASPVAVRQYPMSKEAREGIRPHIQRFLDLGVLVPCQSPWNTPLLPVKKPGTNDYRPVQDLREINKRVQDIHPTVPNPYNLLSSLPPSHTWYSVLDLKDAFFCLKLHPNSQPLFAFEWRDPEKGNTGQLTWTRLPQGFKNSPTLFNEALHRDLAPFRALNPQVVLLQYVDDLLVAAPTYRDCKEGTQKLLQELSKLGYRVSAKKAQLCQKEVTYLGYLLKEGKRWLTPARKATVMKIPPPTTPRQVREFLGTAGFCRLWIPGFASLAAPLYPLTKPSIPFIWTEEHQKAFDRIKEALLSAPALALPDLTKPFTLYVDERAGVARGVLTQTLGPWRRPVAYLSKKLDPVASGWPTCLKAVAAVALLLKDADKLTLGQNVTVIASHSLESIVRQPPDRWMTNARMTHYQSLLLNERVSFAPPAVLNPATLLPVESEATPVHRCSEILAEETGTRRDLKDQPLPGVPAWYTDGSSFIAEGKRRAGAAIVDGKRTVWASSLPEGTSAQKAELVALTQALRLAEGKDINIYTDSRYAFATAHIHGAIYKQRGWLTSAGKDIKNKEEILALLEAIHLPKRVAIIHCPGHQKGNDPVATGNRRADEAAKQAALSTRVLAETTKPAGKRTADGSEFEKRTADGSEFESPKKKAKVE

SEQ ID NO: 810 - protein, 2089 aa, synthetic construct
MPAAKRVKLDGGDKKYSIGLDIGTNSVGWAVITDEYKVPSKKFKVLGNTDRHSIKKNLIGALLFDSGETAEATRLKRTARRRYTRRKNRICYLQEIFSNEMAKVDDSFFHRLEESFLVEEDKKHERHPIFGNIVDEVAYHEKYPTIYHLRKKLVDSTDKADLRLIYLALAHMIKFRGHFLIEGDLNPDNSDVDKLFIQLVQTYNQLFEENPINASGVDAKAILSARLSKSRRLENLIAQLPGEKKNGLFGNLIALSLGLTPNFKSNFDLAEDAKLQLSKDTYDDDLDNLLAQIGDQYADLFLAAKNLSDAILLSDILRVNTEITKAPLSASMIKRYDEHHQDLTLLKALVRQQLPEKYKEIFFDQSKNGYAGYIDGGASQEEFYKFIKPILEKMDGTEELLVKLNREDLLRKQRTFDNGSIPHQIHLGELHAILRRQEDFYPFLKDNREKIEKILTFRIPYYVGPLARGNSRFAWMTRKSEETITPWNFEEVVDKGASAQSFIERMTNFDKNLPNEKVLPKHSLLYEYFTVYNELTKVKYVTEGMRKPAFLSGEQKKAIVDLLFKTNRKVTVKQLKEDYFKKIECFDSVEISGVEDRFNASLGTYHDLLKIIKDKDFLDNEENEDILEDIVLTLTLFEDREMIEERLKTYAHLFDDKVMKQLKRRRYTGWGRLSRKLINGIRDKQSGKTILDFLKSDGFANRNFMQLIHDDSLTFKEDIQKAQVSGQGDSLHEHIANLAGSPAIKKGILQTVKVVDELVKVMGRHKPENIVIEMARENQTTQKGQKNSRERMKRIEEGIKELGSQILKEHPVENTQLQNEKLYLYYLQNGRDMYVDQELDINRLSDYDVDHIVPQSFLKDDSIDNKVLTRSDKARGKSDNVPSEEVVKKMKNYWRQLLNAKLITQRKFDNLTKAERGGLSELDKAGFIKRQLVETRQITKHVAQILDSRMNTKYDENDKLIREVKVITLKSKLVSDFRKDFQFYKVREINNYHHAHDAYLNAVVGTALIKKYPKLESEFVYGDYKVYDVRKMIAKSEQEIGKATAKYFFYSNIMNFFKTEITLANGEIRKRPLIETNGETGEIVWDKGRDFATVRKVLSMPQVNIVKKTEVQTGGFSKESILPKRNSDKLIARKKDWDPKKYGGFDSPTVAYSVLVVAKVEKGKSKKLKSVKELLGITIMERSSFEKNPIDFLEAKGYKEVKKDLIIKLPKYSLFELENGRKRMLASAGELQKGNELALPSKYVNFLYLASHYEKLKGSPEDNEQKQLFVEQHKHYLDEIIEQISEFSKRVILADANLDKVLSAYNKHRDKPIREQAENIIHLFTLTNLGAPAAFKYFDTTIDRKRYTSTKEVLDATLIHQSITGLYETRIDLSQLGGDGGPAPGGGGGVLNLEEEYRLHEKPVPSSIDPSWLQLFPTVWAERAGMGLANQVPPVVVELRSGASPVAVRQYPMSKEAREGIRPHIQRFLDLGVLVPCQSPWNTPLLPVKKPGTNDYRPVQDLREINKRVQDIHPTVPNPYNLLSSLPPSHTWYSVLDLKDAFFCLKLHPNSQPLFAFEWRDPEKGNTGQLTWTRLPQGFKNSPTLFNEALHRDLAPFRALNPQVVLLQYVDDLLVAAPTYRDCKEGTQKLLQELSKLGYRVSAKKAQLCQKEVTYLGYLLKEGKRWLTPARKATVMKIPPPTTPRQVREFLGTAGFCRLWIPGFASLAAPLYPLTKPSIPFIWTEEHQKAFDRIKEALLSAPALALPDLTKPFTLYVDERAGVARGVLTQTLGPWRRPVAYLSKKLDPVASGWPTCLKAVAAVALLLKDADKLTLGQNVTVIASHSLESIVRQPPDRWMTNARMTHYQSLLLNERVSFAPPAVLNPATLLPVESEATPVHRCSEILAEETGTRRDLKDQPLPGVPAWYTDGSSFIAEGKRRAGAAIVDGKRTVWASSLPEGTSAQKAELVALTQALRLAEGKDINIYTDSRYAFATAHIHGAIYKQRGWLTSAGKDIKNKEEILALLEAIHLPKRVAIIHCPGHQKGNDPVATGNRRADEAAKQAALSTRVLAETTKPAGKRTADGSEFEKRTADGSEFESPKKKAKVE

SEQ ID NO: 811 - protein, 2094 aa, synthetic construct
MPAAKRVKLDGGDKKYSIGLDIGTNSVGWAVITDEYKVPSKKFKVLGNTDRHSIKKNLIGALLFDSGETAEATRLKRTARRRYTRRKNRICYLQEIFSNEMAKVDDSFFHRLEESFLVEEDKKHERHPIFGNIVDEVAYHEKYPTIYHLRKKLVDSTDKADLRLIYLALAHMIKFRGHFLIEGDLNPDNSDVDKLFIQLVQTYNQLFEENPINASGVDAKAILSARLSKSRRLENLIAQLPGEKKNGLFGNLIALSLGLTPNFKSNFDLAEDAKLQLSKDTYDDDLDNLLAQIGDQYADLFLAAKNLSDAILLSDILRVNTEITKAPLSASMIKRYDEHHQDLTLLKALVRQQLPEKYKEIFFDQSKNGYAGYIDGGASQEEFYKFIKPILEKMDGTEELLVKLNREDLLRKQRTFDNGSIPHQIHLGELHAILRRQEDFYPFLKDNREKIEKILTFRIPYYVGPLARGNSRFAWMTRKSEETITPWNFEEVVDKGASAQSFIERMTNFDKNLPNEKVLPKHSLLYEYFTVYNELTKVKYVTEGMRKPAFLSGEQKKAIVDLLFKTNRKVTVKQLKEDYFKKIECFDSVEISGVEDRFNASLGTYHDLLKIIKDKDFLDNEENEDILEDIVLTLTLFEDREMIEERLKTYAHLFDDKVMKQLKRRRYTGWGRLSRKLINGIRDKQSGKTILDFLKSDGFANRNFMQLIHDDSLTFKEDIQKAQVSGQGDSLHEHIANLAGSPAIKKGILQTVKVVDELVKVMGRHKPENIVIEMARENQTTQKGQKNSRERMKRIEEGIKELGSQILKEHPVENTQLQNEKLYLYYLQNGRDMYVDQELDINRLSDYDVDHIVPQSFLKDDSIDNKVLTRSDKARGKSDNVPSEEVVKKMKNYWRQLLNAKLITQRKFDNLTKAERGGLSELDKAGFIKRQLVETRQITKHVAQILDSRMNTKYDENDKLIREVKVITLKSKLVSDFRKDFQFYKVREINNYHHAHDAYLNAVVGTALIKKYPKLESEFVYGDYKVYDVRKMIAKSEQEIGKATAKYFFYSNIMNFFKTEITLANGEIRKRPLIETNGETGEIVWDKGRDFATVRKVLSMPQVNIVKKTEVQTGGFSKESILPKRNSDKLIARKKDWDPKKYGGFDSPTVAYSVLVVAKVEKGKSKKLKSVKELLGITIMERSSFEKNPIDFLEAKGYKEVKKDLIIKLPKYSLFELENGRKRMLASAGELQKGNELALPSKYVNFLYLASHYEKLKGSPEDNEQKQLFVEQHKHYLDEIIEQISEFSKRVILADANLDKVLSAYNKHRDKPIREQAENIIHLFTLTNLGAPAAFKYFDTTIDRKRYTSTKEVLDATLIHQSITGLYETRIDLSQLGGDGGGGGEAAAKGSSGGVLNLEEEYRLHEKPVPSSIDPSWLQLFPTVWAERAGMGLANQVPPVVVELRSGASPVAVRQYPMSKEAREGIRPHIQRFLDLGVLVPCQSPWNTPLLPVKKPGTNDYRPVQDLREINKRVQDIHPTVPNPYNLLSSLPPSHTWYSVLDLKDAFFCLKLHPNSQPLFAFEWRDPEKGNTGQLTWTRLPQGFKNSPTLFNEALHRDLAPFRALNPQVVLLQYVDDLLVAAPTYRDCKEGTQKLLQELSKLGYRVSAKKAQLCQKEVTYLGYLLKEGKRWLTPARKATVMKIPPPTTPRQVREFLGTAGFCRLWIPGFASLAAPLYPLTKPSIPFIWTEEHQKAFDRIKEALLSAPALALPDLTKPFTLYVDERAGVARGVLTQTLGPWRRPVAYLSKKLDPVASGWPTCLKAVAAVALLLKDADKLTLGQNVTVIASHSLESIVRQPPDRWMTNARMTHYQSLLLNERVSFAPPAVLNPATLLPVESEATPVHRCSEILAEETGTRRDLKDQPLPGVPAWYTDGSSFIAEGKRRAGAAIVDGKRTVWASSLPEGTSAQKAELVALTQALRLAEGKDINIYTDSRYAFATAHIHGAIYKQRGWLTSAGKDIKNKEEILALLEAIHLPKRVAIIHCPGHQKGNDPVATGNRRADEAAKQAALSTRVLAETTKPAGKRTADGSEFEKRTADGSEFESPKKKAKVE

SEQ ID NO: 812 - protein, 2094 aa, synthetic construct
MPAAKRVKLDGGDKKYSIGLDIGTNSVGWAVITDEYKVPSKKFKVLGNTDRHSIKKNLIGALLFDSGETAEATRLKRTARRRYTRRKNRICYLQEIFSNEMAKVDDSFFHRLEESFLVEEDKKHERHPIFGNIVDEVAYHEKYPTIYHLRKKLVDSTDKADLRLIYLALAHMIKFRGHFLIEGDLNPDNSDVDKLFIQLVQTYNQLFEENPINASGVDAKAILSARLSKSRRLENLIAQLPGEKKNGLFGNLIALSLGLTPNFKSNFDLAEDAKLQLSKDTYDDDLDNLLAQIGDQYADLFLAAKNLSDAILLSDILRVNTEITKAPLSASMIKRYDEHHQDLTLLKALVRQQLPEKYKEIFFDQSKNGYAGYIDGGASQEEFYKFIKPILEKMDGTEELLVKLNREDLLRKQRTFDNGSIPHQIHLGELHAILRRQEDFYPFLKDNREKIEKILTFRIPYYVGPLARGNSRFAWMTRKSEETITPWNFEEVVDKGASAQSFIERMTNFDKNLPNEKVLPKHSLLYEYFTVYNELTKVKYVTEGMRKPAFLSGEQKKAIVDLLFKTNRKVTVKQLKEDYFKKIECFDSVEISGVEDRFNASLGTYHDLLKIIKDKDFLDNEENEDILEDIVLTLTLFEDREMIEERLKTYAHLFDDKVMKQLKRRRYTGWGRLSRKLINGIRDKQSGKTILDFLKSDGFANRNFMQLIHDDSLTFKEDIQKAQVSGQGDSLHEHIANLAGSPAIKKGILQTVKVVDELVKVMGRHKPENIVIEMARENQTTQKGQKNSRERMKRIEEGIKELGSQILKEHPVENTQLQNEKLYLYYLQNGRDMYVDQELDINRLSDYDVDHIVPQSFLKDDSIDNKVLTRSDKARGKSDNVPSEEVVKKMKNYWRQLLNAKLITQRKFDNLTKAERGGLSELDKAGFIKRQLVETRQITKHVAQILDSRMNTKYDENDKLIREVKVITLKSKLVSDFRKDFQFYKVREINNYHHAHDAYLNAVVGTALIKKYPKLESEFVYGDYKVYDVRKMIAKSEQEIGKATAKYFFYSNIMNFFKTEITLANGEIRKRPLIETNGETGEIVWDKGRDFATVRKVLSMPQVNIVKKTEVQTGGFSKESILPKRNSDKLIARKKDWDPKKYGGFDSPTVAYSVLVVAKVEKGKSKKLKSVKELLGITIMERSSFEKNPIDFLEAKGYKEVKKDLIIKLPKYSLFELENGRKRMLASAGELQKGNELALPSKYVNFLYLASHYEKLKGSPEDNEQKQLFVEQHKHYLDEIIEQISEFSKRVILADANLDKVLSAYNKHRDKPIREQAENIIHLFTLTNLGAPAAFKYFDTTIDRKRYTSTKEVLDATLIHQSITGLYETRIDLSQLGGDGGEAAAKGSSPAPGGVLNLEEEYRLHEKPVPSSIDPSWLQLFPTVWAERAGMGLANQVPPVVVELRSGASPVAVRQYPMSKEAREGIRPHIQRFLDLGVLVPCQSPWNTPLLPVKKPGTNDYRPVQDLREINKRVQDIHPTVPNPYNLLSSLPPSHTWYSVLDLKDAFFCLKLHPNSQPLFAFEWRDPEKGNTGQLTWTRLPQGFKNSPTLFNEALHRDLAPFRALNPQVVLLQYVDDLLVAAPTYRDCKEGTQKLLQELSKLGYRVSAKKAQLCQKEVTYLGYLLKEGKRWLTPARKATVMKIPPPTTPRQVREFLGTAGFCRLWIPGFASLAAPLYPLTKPSIPFIWTEEHQKAFDRIKEALLSAPALALPDLTKPFTLYVDERAGVARGVLTQTLGPWRRPVAYLSKKLDPVASGWPTCLKAVAAVALLLKDADKLTLGQNVTVIASHSLESIVRQPPDRWMTNARMTHYQSLLLNERVSFAPPAVLNPATLLPVESEATPVHRCSEILAEETGTRRDLKDQPLPGVPAWYTDGSSFIAEGKRRAGAAIVDGKRTVWASSLPEGTSAQKAELVALTQALRLAEGKDINIYTDSRYAFATAHIHGAIYKQRGWLTSAGKDIKNKEEILALLEAIHLPKRVAIIHCPGHQKGNDPVATGNRRADEAAKQAALSTRVLAETTKPAGKRTADGSEFEKRTADGSEFESPKKKAKVE

SEQ ID NO: 813 - protein, 2098 aa, synthetic construct
MPAAKRVKLDGGDKKYSIGLDIGTNSVGWAVITDEYKVPSKKFKVLGNTDRHSIKKNLIGALLFDSGETAEATRLKRTARRRYTRRKNRICYLQEIFSNEMAKVDDSFFHRLEESFLVEEDKKHERHPIFGNIVDEVAYHEKYPTIYHLRKKLVDSTDKADLRLIYLALAHMIKFRGHFLIEGDLNPDNSDVDKLFIQLVQTYNQLFEENPINASGVDAKAILSARLSKSRRLENLIAQLPGEKKNGLFGNLIALSLGLTPNFKSNFDLAEDAKLQLSKDTYDDDLDNLLAQIGDQYADLFLAAKNLSDAILLSDILRVNTEITKAPLSASMIKRYDEHHQDLTLLKALVRQQLPEKYKEIFFDQSKNGYAGYIDGGASQEEFYKFIKPILEKMDGTEELLVKLNREDLLRKQRTFDNGSIPHQIHLGELHAILRRQEDFYPFLKDNREKIEKILTFRIPYYVGPLARGNSRFAWMTRKSEETITPWNFEEVVDKGASAQSFIERMTNFDKNLPNEKVLPKHSLLYEYFTVYNELTKVKYVTEGMRKPAFLSGEQKKAIVDLLFKTNRKVTVKQLKEDYFKKIECFDSVEISGVEDRFNASLGTYHDLLKIIKDKDFLDNEENEDILEDIVLTLTLFEDREMIEERLKTYAHLFDDKVMKQLKRRRYTGWGRLSRKLINGIRDKQSGKTILDFLKSDGFANRNFMQLIHDDSLTFKEDIQKAQVSGQGDSLHEHIANLAGSPAIKKGILQTVKVVDELVKVMGRHKPENIVIEMARENQTTQKGQKNSRERMKRIEEGIKELGSQILKEHPVENTQLQNEKLYLYYLQNGRDMYVDQELDINRLSDYDVDHIVPQSFLKDDSIDNKVLTRSDKARGKSDNVPSEEVVKKMKNYWRQLLNAKLITQRKFDNLTKAERGGLSELDKAGFIKRQLVETRQITKHVAQILDSRMNTKYDENDKLIREVKVITLKSKLVSDFRKDFQFYKVREINNYHHAHDAYLNAVVGTALIKKYPKLESEFVYGDYKVYDVRKMIAKSEQEIGKATAKYFFYSNIMNFFKTEITLANGEIRKRPLIETNGETGEIVWDKGRDFATVRKVLSMPQVNIVKKTEVQTGGFSKESILPKRNSDKLIARKKDWDPKKYGGFDSPTVAYSVLVVAKVEKGKSKKLKSVKELLGITIMERSSFEKNPIDFLEAKGYKEVKKDLIIKLPKYSLFELENGRKRMLASAGELQKGNELALPSKYVNFLYLASHYEKLKGSPEDNEQKQLFVEQHKHYLDEIIEQISEFSKRVILADANLDKVLSAYNKHRDKPIREQAENIIHLFTLTNLGAPAAFKYFDTTIDRKRYTSTKEVLDATLIHQSITGLYETRIDLSQLGGDGGGSSGSSGSSGSSGSSGGVLNLEEEYRLHEKPVPSSIDPSWLQLFPTVWAERAGMGLANQVPPVVVELRSGASPVAVRQYPMSKEAREGIRPHIQRFLDLGVLVPCQSPWNTPLLPVKKPGTNDYRPVQDLREINKRVQDIHPTVPNPYNLLSSLPPSHTWYSVLDLKDAFFCLKLHPNSQPLFAFEWRDPEKGNTGQLTWTRLPQGFKNSPTLFNEALHRDLAPFRALNPQVVLLQYVDDLLVAAPTYRDCKEGTQKLLQELSKLGYRVSAKKAQLCQKEVTYLGYLLKEGKRWLTPARKATVMKIPPPTTPRQVREFLGTAGFCRLWIPGFASLAAPLYPLTKPSIPFIWTEEHQKAFDRIKEALLSAPALALPDLTKPFTLYVDERAGVARGVLTQTLGPWRRPVAYLSKKLDPVASGWPTCLKAVAAVALLLKDADKLTLGQNVTVIASHSLESIVRQPPDRWMTNARMTHYQSLLLNERVSFAPPAVLNPATLLPVESEATPVHRCSEILAEETGTRRDLKDQPLPGVPAWYTDGSSFIAEGKRRAGAAIVDGKRTVWASSLPEGTSAQKAELVALTQALRLAEGKDINIYTDSRYAFATAHIHGAIYKQRGWLTSAGKDIKNKEEILALLEAIHLPKRVAIIHCPGHQKGNDPVATGNRRADEAAKQAALSTRVLAETTKPAGKRTADGSEFEKRTADGSEFESPKKKAKVE

SEQ ID NO: 814 - protein, 2094 aa, synthetic construct
MPAAKRVKLDGGDKKYSIGLDIGTNSVGWAVITDEYKVPSKKFKVLGNTDRHSIKKNLIGALLFDSGETAEATRLKRTARRRYTRRKNRICYLQEIFSNEMAKVDDSFFHRLEESFLVEEDKKHERHPIFGNIVDEVAYHEKYPTIYHLRKKLVDSTDKADLRLIYLALAHMIKFRGHFLIEGDLNPDNSDVDKLFIQLVQTYNQLFEENPINASGVDAKAILSARLSKSRRLENLIAQLPGEKKNGLFGNLIALSLGLTPNFKSNFDLAEDAKLQLSKDTYDDDLDNLLAQIGDQYADLFLAAKNLSDAILLSDILRVNTEITKAPLSASMIKRYDEHHQDLTLLKALVRQQLPEKYKEIFFDQSKNGYAGYIDGGASQEEFYKFIKPILEKMDGTEELLVKLNREDLLRKQRTFDNGSIPHQIHLGELHAILRRQEDFYPFLKDNREKIEKILTFRIPYYVGPLARGNSRFAWMTRKSEETITPWNFEEVVDKGASAQSFIERMTNFDKNLPNEKVLPKHSLLYEYFTVYNELTKVKYVTEGMRKPAFLSGEQKKAIVDLLFKTNRKVTVKQLKEDYFKKIECFDSVEISGVEDRFNASLGTYHDLLKIIKDKDFLDNEENEDILEDIVLTLTLFEDREMIEERLKTYAHLFDDKVMKQLKRRRYTGWGRLSRKLINGIRDKQSGKTILDFLKSDGFANRNFMQLIHDDSLTFKEDIQKAQVSGQGDSLHEHIANLAGSPAIKKGILQTVKVVDELVKVMGRHKPENIVIEMARENQTTQKGQKNSRERMKRIEEGIKELGSQILKEHPVENTQLQNEKLYLYYLQNGRDMYVDQELDINRLSDYDVDHIVPQSFLKDDSIDNKVLTRSDKARGKSDNVPSEEVVKKMKNYWRQLLNAKLITQRKFDNLTKAERGGLSELDKAGFIKRQLVETRQITKHVAQILDSRMNTKYDENDKLIREVKVITLKSKLVSDFRKDFQFYKVREINNYHHAHDAYLNAVVGTALIKKYPKLESEFVYGDYKVYDVRKMIAKSEQEIGKATAKYFFYSNIMNFFKTEITLANGEIRKRPLIETNGETGEIVWDKGRDFATVRKVLSMPQVNIVKKTEVQTGGFSKESILPKRNSDKLIARKKDWDPKKYGGFDSPTVAYSVLVVAKVEKGKSKKLKSVKELLGITIMERSSFEKNPIDFLEAKGYKEVKKDLIIKLPKYSLFELENGRKRMLASAGELQKGNELALPSKYVNFLYLASHYEKLKGSPEDNEQKQLFVEQHKHYLDEIIEQISEFSKRVILADANLDKVLSAYNKHRDKPIREQAENIIHLFTLTNLGAPAAFKYFDTTIDRKRYTSTKEVLDATLIHQSITGLYETRIDLSQLGGDGGPAPAPAPAPAPGGVLNLEEEYRLHEKPVPSSIDPSWLQLFPTVWAERAGMGLANQVPPVVVELRSGASPVAVRQYPMSKEAREGIRPHIQRFLDLGVLVPCQSPWNTPLLPVKKPGTNDYRPVQDLREINKRVQDIHPTVPNPYNLLSSLPPSHTWYSVLDLKDAFFCLKLHPNSQPLFAFEWRDPEKGNTGQLTWTRLPQGFKNSPTLFNEALHRDLAPFRALNPQVVLLQYVDDLLVAAPTYRDCKEGTQKLLQELSKLGYRVSAKKAQLCQKEVTYLGYLLKEGKRWLTPARKATVMKIPPPTTPRQVREFLGTAGFCRLWIPGFASLAAPLYPLTKPSIPFIWTEEHQKAFDRIKEALLSAPALALPDLTKPFTLYVDERAGVARGVLTQTLGPWRRPVAYLSKKLDPVASGWPTCLKAVAAVALLLKDADKLTLGQNVTVIASHSLESIVRQPPDRWMTNARMTHYQSLLLNERVSFAPPAVLNPATLLPVESEATPVHRCSEILAEETGTRRDLKDQPLPGVPAWYTDGSSFIAEGKRRAGAAIVDGKRTVWASSLPEGTSAQKAELVALTQALRLAEGKDINIYTDSRYAFATAHIHGAIYKQRGWLTSAGKDIKNKEEILALLEAIHLPKRVAIIHCPGHQKGNDPVATGNRRADEAAKQAALSTRVLAETTKPAGKRTADGSEFEKRTADGSEFESPKKKAKVE

SEQ ID NO: 815 - protein, 2086 aa, synthetic construct
MPAAKRVKLDGGDKKYSIGLDIGTNSVGWAVITDEYKVPSKKFKVLGNTDRHSIKKNLIGALLFDSGETAEATRLKRTARRRYTRRKNRICYLQEIFSNEMAKVDDSFFHRLEESFLVEEDKKHERHPIFGNIVDEVAYHEKYPTIYHLRKKLVDSTDKADLRLIYLALAHMIKFRGHFLIEGDLNPDNSDVDKLFIQLVQTYNQLFEENPINASGVDAKAILSARLSKSRRLENLIAQLPGEKKNGLFGNLIALSLGLTPNFKSNFDLAEDAKLQLSKDTYDDDLDNLLAQIGDQYADLFLAAKNLSDAILLSDILRVNTEITKAPLSASMIKRYDEHHQDLTLLKALVRQQLPEKYKEIFFDQSKNGYAGYIDGGASQEEFYKFIKPILEKMDGTEELLVKLNREDLLRKQRTFDNGSIPHQIHLGELHAILRRQEDFYPFLKDNREKIEKILTFRIPYYVGPLARGNSRFAWMTRKSEETITPWNFEEVVDKGASAQSFIERMTNFDKNLPNEKVLPKHSLLYEYFTVYNELTKVKYVTEGMRKPAFLSGEQKKAIVDLLFKTNRKVTVKQLKEDYFKKIECFDSVEISGVEDRFNASLGTYHDLLKIIKDKDFLDNEENEDILEDIVLTLTLFEDREMIEERLKTYAHLFDDKVMKQLKRRRYTGWGRLSRKLINGIRDKQSGKTILDFLKSDGFANRNFMQLIHDDSLTFKEDIQKAQVSGQGDSLHEHIANLAGSPAIKKGILQTVKVVDELVKVMGRHKPENIVIEMARENQTTQKGQKNSRERMKRIEEGIKELGSQILKEHPVENTQLQNEKLYLYYLQNGRDMYVDQELDINRLSDYDVDHIVPQSFLKDDSIDNKVLTRSDKARGKSDNVPSEEVVKKMKNYWRQLLNAKLITQRKFDNLTKAERGGLSELDKAGFIKRQLVETRQITKHVAQILDSRMNTKYDENDKLIREVKVITLKSKLVSDFRKDFQFYKVREINNYHHAHDAYLNAVVGTALIKKYPKLESEFVYGDYKVYDVRKMIAKSEQEIGKATAKYFFYSNIMNFFKTEITLANGEIRKRPLIETNGETGEIVWDKGRDFATVRKVLSMPQVNIVKKTEVQTGGFSKESILPKRNSDKLIARKKDWDPKKYGGFDSPTVAYSVLVVAKVEKGKSKKLKSVKELLGITIMERSSFEKNPIDFLEAKGYKEVKKDLIIKLPKYSLFELENGRKRMLASAGELQKGNELALPSKYVNFLYLASHYEKLKGSPEDNEQKQLFVEQHKHYLDEIIEQISEFSKRVILADANLDKVLSAYNKHRDKPIREQAENIIHLFTLTNLGAPAAFKYFDTTIDRKRYTSTKEVLDATLIHQSITGLYETRIDLSQLGGDGGGGGGGVLNLEEEYRLHEKPVPSSIDPSWLQLFPTVWAERAGMGLANQVPPVVVELRSGASPVAVRQYPMSKEAREGIRPHIQRFLDLGVLVPCQSPWNTPLLPVKKPGTNDYRPVQDLREINKRVQDIHPTVPNPYNLLSSLPPSHTWYSVLDLKDAFFCLKLHPNSQPLFAFEWRDPEKGNTGQLTWTRLPQGFKNSPTLFNEALHRDLAPFRALNPQVVLLQYVDDLLVAAPTYRDCKEGTQKLLQELSKLGYRVSAKKAQLCQKEVTYLGYLLKEGKRWLTPARKATVMKIPPPTTPRQVREFLGTAGFCRLWIPGFASLAAPLYPLTKPSIPFIWTEEHQKAFDRIKEALLSAPALALPDLTKPFTLYVDERAGVARGVLTQTLGPWRRPVAYLSKKLDPVASGWPTCLKAVAAVALLLKDADKLTLGQNVTVIASHSLESIVRQPPDRWMTNARMTHYQSLLLNERVSFAPPAVLNPATLLPVESEATPVHRCSEILAEETGTRRDLKDQPLPGVPAWYTDGSSFIAEGKRRAGAAIVDGKRTVWASSLPEGTSAQKAELVALTQALRLAEGKDINIYTDSRYAFATAHIHGAIYKQRGWLTSAGKDIKNKEEILALLEAIHLPKRVAIIHCPGHQKGNDPVATGNRRADEAAKQAALSTRVLAETTKPAGKRTADGSEFEKRTADGSEFESPKKKAKVE

SEQ ID NO: 816 - protein, 2087 aa, synthetic construct
MPAAKRVKLDGGDKKYSIGLDIGTNSVGWAVITDEYKVPSKKFKVLGNTDRHSIKKNLIGALLFDSGETAEATRLKRTARRRYTRRKNRICYLQEIFSNEMAKVDDSFFHRLEESFLVEEDKKHERHPIFGNIVDEVAYHEKYPTIYHLRKKLVDSTDKADLRLIYLALAHMIKFRGHFLIEGDLNPDNSDVDKLFIQLVQTYNQLFEENPINASGVDAKAILSARLSKSRRLENLIAQLPGEKKNGLFGNLIALSLGLTPNFKSNFDLAEDAKLQLSKDTYDDDLDNLLAQIGDQYADLFLAAKNLSDAILLSDILRVNTEITKAPLSASMIKRYDEHHQDLTLLKALVRQQLPEKYKEIFFDQSKNGYAGYIDGGASQEEFYKFIKPILEKMDGTEELLVKLNREDLLRKQRTFDNGSIPHQIHLGELHAILRRQEDFYPFLKDNREKIEKILTFRIPYYVGPLARGNSRFAWMTRKSEETITPWNFEEVVDKGASAQSFIERMTNFDKNLPNEKVLPKHSLLYEYFTVYNELTKVKYVTEGMRKPAFLSGEQKKAIVDLLFKTNRKVTVKQLKEDYFKKIECFDSVEISGVEDRFNASLGTYHDLLKIIKDKDFLDNEENEDILEDIVLTLTLFEDREMIEERLKTYAHLFDDKVMKQLKRRRYTGWGRLSRKLINGIRDKQSGKTILDFLKSDGFANRNFMQLIHDDSLTFKEDIQKAQVSGQGDSLHEHIANLAGSPAIKKGILQTVKVVDELVKVMGRHKPENIVIEMARENQTTQKGQKNSRERMKRIEEGIKELGSQILKEHPVENTQLQNEKLYLYYLQNGRDMYVDQELDINRLSDYDVDHIVPQSFLKDDSIDNKVLTRSDKARGKSDNVPSEEVVKKMKNYWRQLLNAKLITQRKFDNLTKAERGGLSELDKAGFIKRQLVETRQITKHVAQILDSRMNTKYDENDKLIREVKVITLKSKLVSDFRKDFQFYKVREINNYHHAHDAYLNAVVGTALIKKYPKLESEFVYGDYKVYDVRKMIAKSEQEIGKATAKYFFYSNIMNFFKTEITLANGEIRKRPLIETNGETGEIVWDKGRDFATVRKVLSMPQVNIVKKTEVQTGGFSKESILPKRNSDKLIARKKDWDPKKYGGFDSPTVAYSVLVVAKVEKGKSKKLKSVKELLGITIMERSSFEKNPIDFLEAKGYKEVKKDLIIKLPKYSLFELENGRKRMLASAGELQKGNELALPSKYVNFLYLASHYEKLKGSPEDNEQKQLFVEQHKHYLDEIIEQISEFSKRVILADANLDKVLSAYNKHRDKPIREQAENIIHLFTLTNLGAPAAFKYFDTTIDRKRYTSTKEVLDATLIHQSITGLYETRIDLSQLGGDGGGGGGGGVLNLEEEYRLHEKPVPSSIDPSWLQLFPTVWAERAGMGLANQVPPVVVELRSGASPVAVRQYPMSKEAREGIRPHIQRFLDLGVLVPCQSPWNTPLLPVKKPGTNDYRPVQDLREINKRVQDIHPTVPNPYNLLSSLPPSHTWYSVLDLKDAFFCLKLHPNSQPLFAFEWRDPEKGNTGQLTWTRLPQGFKNSPTLFNEALHRDLAPFRALNPQVVLLQYVDDLLVAAPTYRDCKEGTQKLLQELSKLGYRVSAKKAQLCQKEVTYLGYLLKEGKRWLTPARKATVMKIPPPTTPRQVREFLGTAGFCRLWIPGFASLAAPLYPLTKPSIPFIWTEEHQKAFDRIKEALLSAPALALPDLTKPFTLYVDERAGVARGVLTQTLGPWRRPVAYLSKKLDPVASGWPTCLKAVAAVALLLKDADKLTLGQNVTVIASHSLESIVRQPPDRWMTNARMTHYQSLLLNERVSFAPPAVLNPATLLPVESEATPVHRCSEILAEETGTRRDLKDQPLPGVPAWYTDGSSFIAEGKRRAGAAIVDGKRTVWASSLPEGTSAQKAELVALTQALRLAEGKDINIYTDSRYAFATAHIHGAIYKQRGWLTSAGKDIKNKEEILALLEAIHLPKRVAIIHCPGHQKGNDPVATGNRRADEAAKQAALSTRVLAETTKPAGKRTADGSEFEKRTADGSEFESPKKKAKVE

SEQ ID NO: 817 - protein, 2091 aa, synthetic construct
MPAAKRVKLDGGDKKYSIGLDIGTNSVGWAVITDEYKVPSKKFKVLGNTDRHSIKKNLIGALLFDSGETAEATRLKRTARRRYTRRKNRICYLQEIFSNEMAKVDDSFFHRLEESFLVEEDKKHERHPIFGNIVDEVAYHEKYPTIYHLRKKLVDSTDKADLRLIYLALAHMIKFRGHFLIEGDLNPDNSDVDKLFIQLVQTYNQLFEENPINASGVDAKAILSARLSKSRRLENLIAQLPGEKKNGLFGNLIALSLGLTPNFKSNFDLAEDAKLQLSKDTYDDDLDNLLAQIGDQYADLFLAAKNLSDAILLSDILRVNTEITKAPLSASMIKRYDEHHQDLTLLKALVRQQLPEKYKEIFFDQSKNGYAGYIDGGASQEEFYKFIKPILEKMDGTEELLVKLNREDLLRKQRTFDNGSIPHQIHLGELHAILRRQEDFYPFLKDNREKIEKILTFRIPYYVGPLARGNSRFAWMTRKSEETITPWNFEEVVDKGASAQSFIERMTNFDKNLPNEKVLPKHSLLYEYFTVYNELTKVKYVTEGMRKPAFLSGEQKKAIVDLLFKTNRKVTVKQLKEDYFKKIECFDSVEISGVEDRFNASLGTYHDLLKIIKDKDFLDNEENEDILEDIVLTLTLFEDREMIEERLKTYAHLFDDKVMKQLKRRRYTGWGRLSRKLINGIRDKQSGKTILDFLKSDGFANRNFMQLIHDDSLTFKEDIQKAQVSGQGDSLHEHIANLAGSPAIKKGILQTVKVVDELVKVMGRHKPENIVIEMARENQTTQKGQKNSRERMKRIEEGIKELGSQILKEHPVENTQLQNEKLYLYYLQNGRDMYVDQELDINRLSDYDVDHIVPQSFLKDDSIDNKVLTRSDKARGKSDNVPSEEVVKKMKNYWRQLLNAKLITQRKFDNLTKAERGGLSELDKAGFIKRQLVETRQITKHVAQILDSRMNTKYDENDKLIREVKVITLKSKLVSDFRKDFQFYKVREINNYHHAHDAYLNAVVGTALIKKYPKLESEFVYGDYKVYDVRKMIAKSEQEIGKATAKYFFYSNIMNFFKTEITLANGEIRKRPLIETNGETGEIVWDKGRDFATVRKVLSMPQVNIVKKTEVQTGGFSKESILPKRNSDKLIARKKDWDPKKYGGFDSPTVAYSVLVVAKVEKGKSKKLKSVKELLGITIMERSSFEKNPIDFLEAKGYKEVKKDLIIKLPKYSLFELENGRKRMLASAGELQKGNELALPSKYVNFLYLASHYEKLKGSPEDNEQKQLFVEQHKHYLDEIIEQISEFSKRVILADANLDKVLSAYNKHRDKPIREQAENIIHLFTLTNLGAPAAFKYFDTTIDRKRYTSTKEVLDATLIHQSITGLYETRIDLSQLGGDGGEAAAKGGGGGVLNLEEEYRLHEKPVPSSIDPSWLQLFPTVWAERAGMGLANQVPPVVVELRSGASPVAVRQYPMSKEAREGIRPHIQRFLDLGVLVPCQSPWNTPLLPVKKPGTNDYRPVQDLREINKRVQDIHPTVPNPYNLLSSLPPSHTWYSVLDLKDAFFCLKLHPNSQPLFAFEWRDPEKGNTGQLTWTRLPQGFKNSPTLFNEALHRDLAPFRALNPQVVLLQYVDDLLVAAPTYRDCKEGTQKLLQELSKLGYRVSAKKAQLCQKEVTYLGYLLKEGKRWLTPARKATVMKIPPPTTPRQVREFLGTAGFCRLWIPGFASLAAPLYPLTKPSIPFIWTEEHQKAFDRIKEALLSAPALALPDLTKPFTLYVDERAGVARGVLTQTLGPWRRPVAYLSKKLDPVASGWPTCLKAVAAVALLLKDADKLTLGQNVTVIASHSLESIVRQPPDRWMTNARMTHYQSLLLNERVSFAPPAVLNPATLLPVESEATPVHRCSEILAEETGTRRDLKDQPLPGVPAWYTDGSSFIAEGKRRAGAAIVDGKRTVWASSLPEGTSAQKAELVALTQALRLAEGKDINIYTDSRYAFATAHIHGAIYKQRGWLTSAGKDIKNKEEILALLEAIHLPKRVAIIHCPGHQKGNDPVATGNRRADEAAKQAALSTRVLAETTKPAGKRTADGSEFEKRTADGSEFESPKKKAKVE

SEQ ID NO: 818 - protein, 2101 aa, synthetic construct
MPAAKRVKLDGGDKKYSIGLDIGTNSVGWAVITDEYKVPSKKFKVLGNTDRHSIKKNLIGALLFDSGETAEATRLKRTARRRYTRRKNRICYLQEIFSNEMAKVDDSFFHRLEESFLVEEDKKHERHPIFGNIVDEVAYHEKYPTIYHLRKKLVDSTDKADLRLIYLALAHMIKFRGHFLIEGDLNPDNSDVDKLFIQLVQTYNQLFEENPINASGVDAKAILSARLSKSRRLENLIAQLPGEKKNGLFGNLIALSLGLTPNFKSNFDLAEDAKLQLSKDTYDDDLDNLLAQIGDQYADLFLAAKNLSDAILLSDILRVNTEITKAPLSASMIKRYDEHHQDLTLLKALVRQQLPEKYKEIFFDQSKNGYAGYIDGGASQEEFYKFIKPILEKMDGTEELLVKLNREDLLRKQRTFDNGSIPHQIHLGELHAILRRQEDFYPFLKDNREKIEKILTFRIPYYVGPLARGNSRFAWMTRKSEETITPWNFEEVVDKGASAQSFIERMTNFDKNLPNEKVLPKHSLLYEYFTVYNELTKVKYVTEGMRKPAFLSGEQKKAIVDLLFKTNRKVTVKQLKEDYFKKIECFDSVEISGVEDRFNASLGTYHDLLKIIKDKDFLDNEENEDILEDIVLTLTLFEDREMIEERLKTYAHLFDDKVMKQLKRRRYTGWGRLSRKLINGIRDKQSGKTILDFLKSDGFANRNFMQLIHDDSLTFKEDIQKAQVSGQGDSLHEHIANLAGSPAIKKGILQTVKVVDELVKVMGRHKPENIVIEMARENQTTQKGQKNSRERMKRIEEGIKELGSQILKEHPVENTQLQNEKLYLYYLQNGRDMYVDQELDINRLSDYDVDHIVPQSFLKDDSIDNKVLTRSDKARGKSDNVPSEEVVKKMKNYWRQLLNAKLITQRKFDNLTKAERGGLSELDKAGFIKRQLVETRQITKHVAQILDSRMNTKYDENDKLIREVKVITLKSKLVSDFRKDFQFYKVREINNYHHAHDAYLNAVVGTALIKKYPKLESEFVYGDYKVYDVRKMIAKSEQEIGKATAKYFFYSNIMNFFKTEITLANGEIRKRPLIETNGETGEIVWDKGRDFATVRKVLSMPQVNIVKKTEVQTGGFSKESILPKRNSDKLIARKKDWDPKKYGGFDSPTVAYSVLVVAKVEKGKSKKLKSVKELLGITIMERSSFEKNPIDFLEAKGYKEVKKDLIIKLPKYSLFELENGRKRMLASAGELQKGNELALPSKYVNFLYLASHYEKLKGSPEDNEQKQLFVEQHKHYLDEIIEQISEFSKRVILADANLDKVLSAYNKHRDKPIREQAENIIHLFTLTNLGAPAAFKYFDTTIDRKRYTSTKEVLDATLIHQSITGLYETRIDLSQLGGDGGGSSGSSGSSGSSGSSGSSGGVLNLEEEYRLHEKPVPSSIDPSWLQLFPTVWAERAGMGLANQVPPVVVELRSGASPVAVRQYPMSKEAREGIRPHIQRFLDLGVLVPCQSPWNTPLLPVKKPGTNDYRPVQDLREINKRVQDIHPTVPNPYNLLSSLPPSHTWYSVLDLKDAFFCLKLHPNSQPLFAFEWRDPEKGNTGQLTWTRLPQGFKNSPTLFNEALHRDLAPFRALNPQVVLLQYVDDLLVAAPTYRDCKEGTQKLLQELSKLGYRVSAKKAQLCQKEVTYLGYLLKEGKRWLTPARKATVMKIPPPTTPRQVREFLGTAGFCRLWIPGFASLAAPLYPLTKPSIPFIWTEEHQKAFDRIKEALLSAPALALPDLTKPFTLYVDERAGVARGVLTQTLGPWRRPVAYLSKKLDPVASGWPTCLKAVAAVALLLKDADKLTLGQNVTVIASHSLESIVRQPPDRWMTNARMTHYQSLLLNERVSFAPPAVLNPATLLPVESEATPVHRCSEILAEETGTRRDLKDQPLPGVPAWYTDGSSFIAEGKRRAGAAIVDGKRTVWASSLPEGTSAQKAELVALTQALRLAEGKDINIYTDSRYAFATAHIHGAIYKQRGWLTSAGKDIKNKEEILALLEAIHLPKRVAIIHCPGHQKGNDPVATGNRRADEAAKQAALSTRVLAETTKPAGKRTADGSEFEKRTADGSEFESPKKKAKVE

SEQ ID NO: 819 - protein, 2091 aa, synthetic construct
MPAAKRVKLDGGDKKYSIGLDIGTNSVGWAVITDEYKVPSKKFKVLGNTDRHSIKKNLIGALLFDSGETAEATRLKRTARRRYTRRKNRICYLQEIFSNEMAKVDDSFFHRLEESFLVEEDKKHERHPIFGNIVDEVAYHEKYPTIYHLRKKLVDSTDKADLRLIYLALAHMIKFRGHFLIEGDLNPDNSDVDKLFIQLVQTYNQLFEENPINASGVDAKAILSARLSKSRRLENLIAQLPGEKKNGLFGNLIALSLGLTPNFKSNFDLAEDAKLQLSKDTYDDDLDNLLAQIGDQYADLFLAAKNLSDAILLSDILRVNTEITKAPLSASMIKRYDEHHQDLTLLKALVRQQLPEKYKEIFFDQSKNGYAGYIDGGASQEEFYKFIKPILEKMDGTEELLVKLNREDLLRKQRTFDNGSIPHQIHLGELHAILRRQEDFYPFLKDNREKIEKILTFRIPYYVGPLARGNSRFAWMTRKSEETITPWNFEEVVDKGASAQSFIERMTNFDKNLPNEKVLPKHSLLYEYFTVYNELTKVKYVTEGMRKPAFLSGEQKKAIVDLLFKTNRKVTVKQLKEDYFKKIECFDSVEISGVEDRFNASLGTYHDLLKIIKDKDFLDNEENEDILEDIVLTLTLFEDREMIEERLKTYAHLFDDKVMKQLKRRRYTGWGRLSRKLINGIRDKQSGKTILDFLKSDGFANRNFMQLIHDDSLTFKEDIQKAQVSGQGDSLHEHIANLAGSPAIKKGILQTVKVVDELVKVMGRHKPENIVIEMARENQTTQKGQKNSRERMKRIEEGIKELGSQILKEHPVENTQLQNEKLYLYYLQNGRDMYVDQELDINRLSDYDVDHIVPQSFLKDDSIDNKVLTRSDKARGKSDNVPSEEVVKKMKNYWRQLLNAKLITQRKFDNLTKAERGGLSELDKAGFIKRQLVETRQITKHVAQILDSRMNTKYDENDKLIREVKVITLKSKLVSDFRKDFQFYKVREINNYHHAHDAYLNAVVGTALIKKYPKLESEFVYGDYKVYDVRKMIAKSEQEIGKATAKYFFYSNIMNFFKTEITLANGEIRKRPLIETNGETGEIVWDKGRDFATVRKVLSMPQVNIVKKTEVQTGGFSKESILPKRNSDKLIARKKDWDPKKYGGFDSPTVAYSVLVVAKVEKGKSKKLKSVKELLGITIMERSSFEKNPIDFLEAKGYKEVKKDLIIKLPKYSLFELENGRKRMLASAGELQKGNELALPSKYVNFLYLASHYEKLKGSPEDNEQKQLFVEQHKHYLDEIIEQISEFSKRVILADANLDKVLSAYNKHRDKPIREQAENIIHLFTLTNLGAPAAFKYFDTTIDRKRYTSTKEVLDATLIHQSITGLYETRIDLSQLGGDGGPAPEAAAKGGVLNLEEEYRLHEKPVPSSIDPSWLQLFPTVWAERAGMGLANQVPPVVVELRSGASPVAVRQYPMSKEAREGIRPHIQRFLDLGVLVPCQSPWNTPLLPVKKPGTNDYRPVQDLREINKRVQDIHPTVPNPYNLLSSLPPSHTWYSVLDLKDAFFCLKLHPNSQPLFAFEWRDPEKGNTGQLTWTRLPQGFKNSPTLFNEALHRDLAPFRALNPQVVLLQYVDDLLVAAPTYRDCKEGTQKLLQELSKLGYRVSAKKAQLCQKEVTYLGYLLKEGKRWLTPARKATVMKIPPPTTPRQVREFLGTAGFCRLWIPGFASLAAPLYPLTKPSIPFIWTEEHQKAFDRIKEALLSAPALALPDLTKPFTLYVDERAGVARGVLTQTLGPWRRPVAYLSKKLDPVASGWPTCLKAVAAVALLLKDADKLTLGQNVTVIASHSLESIVRQPPDRWMTNARMTHYQSLLLNERVSFAPPAVLNPATLLPVESEATPVHRCSEILAEETGTRRDLKDQPLPGVPAWYTDGSSFIAEGKRRAGAAIVDGKRTVWASSLPEGTSAQKAELVALTQALRLAEGKDINIYTDSRYAFATAHIHGAIYKQRGWLTSAGKDIKNKEEILALLEAIHLPKRVAIIHCPGHQKGNDPVATGNRRADEAAKQAALSTRVLAETTKPAGKRTADGSEFEKRTADGSEFESPKKKAKVE

SEQ ID NO: 820 - protein, 2094 aa, synthetic construct
MPAAKRVKLDGGDKKYSIGLDIGTNSVGWAVITDEYKVPSKKFKVLGNTDRHSIKKNLIGALLFDSGETAEATRLKRTARRRYTRRKNRICYLQEIFSNEMAKVDDSFFHRLEESFLVEEDKKHERHPIFGNIVDEVAYHEKYPTIYHLRKKLVDSTDKADLRLIYLALAHMIKFRGHFLIEGDLNPDNSDVDKLFIQLVQTYNQLFEENPINASGVDAKAILSARLSKSRRLENLIAQLPGEKKNGLFGNLIALSLGLTPNFKSNFDLAEDAKLQLSKDTYDDDLDNLLAQIGDQYADLFLAAKNLSDAILLSDILRVNTEITKAPLSASMIKRYDEHHQDLTLLKALVRQQLPEKYKEIFFDQSKNGYAGYIDGGASQEEFYKFIKPILEKMDGTEELLVKLNREDLLRKQRTFDNGSIPHQIHLGELHAILRRQEDFYPFLKDNREKIEKILTFRIPYYVGPLARGNSRFAWMTRKSEETITPWNFEEVVDKGASAQSFIERMTNFDKNLPNEKVLPKHSLLYEYFTVYNELTKVKYVTEGMRKPAFLSGEQKKAIVDLLFKTNRKVTVKQLKEDYFKKIECFDSVEISGVEDRFNASLGTYHDLLKIIKDKDFLDNEENEDILEDIVLTLTLFEDREMIEERLKTYAHLFDDKVMKQLKRRRYTGWGRLSRKLINGIRDKQSGKTILDFLKSDGFANRNFMQLIHDDSLTFKEDIQKAQVSGQGDSLHEHIANLAGSPAIKKGILQTVKVVDELVKVMGRHKPENIVIEMARENQTTQKGQKNSRERMKRIEEGIKELGSQILKEHPVENTQLQNEKLYLYYLQNGRDMYVDQELDINRLSDYDVDHIVPQSFLKDDSIDNKVLTRSDKARGKSDNVPSEEVVKKMKNYWRQLLNAKLITQRKFDNLTKAERGGLSELDKAGFIKRQLVETRQITKHVAQILDSRMNTKYDENDKLIREVKVITLKSKLVSDFRKDFQFYKVREINNYHHAHDAYLNAVVGTALIKKYPKLESEFVYGDYKVYDVRKMIAKSEQEIGKATAKYFFYSNIMNFFKTEITLANGEIRKRPLIETNGETGEIVWDKGRDFATVRKVLSMPQVNIVKKTEVQTGGFSKESILPKRNSDKLIARKKDWDPKKYGGFDSPTVAYSVLVVAKVEKGKSKKLKSVKELLGITIMERSSFEKNPIDFLEAKGYKEVKKDLIIKLPKYSLFELENGRKRMLASAGELQKGNELALPSKYVNFLYLASHYEKLKGSPEDNEQKQLFVEQHKHYLDEIIEQISEFSKRVILADANLDKVLSAYNKHRDKPIREQAENIIHLFTLTNLGAPAAFKYFDTTIDRKRYTSTKEVLDATLIHQSITGLYETRIDLSQLGGDGGEAAAKGGSGSSGGVLNLEEEYRLHEKPVPSSIDPSWLQLFPTVWAERAGMGLANQVPPVVVELRSGASPVAVRQYPMSKEAREGIRPHIQRFLDLGVLVPCQSPWNTPLLPVKKPGTNDYRPVQDLREINKRVQDIHPTVPNPYNLLSSLPPSHTWYSVLDLKDAFFCLKLHPNSQPLFAFEWRDPEKGNTGQLTWTRLPQGFKNSPTLFNEALHRDLAPFRALNPQVVLLQYVDDLLVAAPTYRDCKEGTQKLLQELSKLGYRVSAKKAQLCQKEVTYLGYLLKEGKRWLTPARKATVMKIPPPTTPRQVREFLGTAGFCRLWIPGFASLAAPLYPLTKPSIPFIWTEEHQKAFDRIKEALLSAPALALPDLTKPFTLYVDERAGVARGVLTQTLGPWRRPVAYLSKKLDPVASGWPTCLKAVAAVALLLKDADKLTLGQNVTVIASHSLESIVRQPPDRWMTNARMTHYQSLLLNERVSFAPPAVLNPATLLPVESEATPVHRCSEILAEETGTRRDLKDQPLPGVPAWYTDGSSFIAEGKRRAGAAIVDGKRTVWASSLPEGTSAQKAELVALTQALRLAEGKDINIYTDSRYAFATAHIHGAIYKQRGWLTSAGKDIKNKEEILALLEAIHLPKRVAIIHCPGHQKGNDPVATGNRRADEAAKQAALSTRVLAETTKPAGKRTADGSEFEKRTADGSEFESPKKKAKVE

SEQ ID NO: 821 - protein, 2092 aa, synthetic construct
MPAAKRVKLDGGDKKYSIGLDIGTNSVGWAVITDEYKVPSKKFKVLGNTDRHSIKKNLIGALLFDSGETAEATRLKRTARRRYTRRKNRICYLQEIFSNEMAKVDDSFFHRLEESFLVEEDKKHERHPIFGNIVDEVAYHEKYPTIYHLRKKLVDSTDKADLRLIYLALAHMIKFRGHFLIEGDLNPDNSDVDKLFIQLVQTYNQLFEENPINASGVDAKAILSARLSKSRRLENLIAQLPGEKKNGLFGNLIALSLGLTPNFKSNFDLAEDAKLQLSKDTYDDDLDNLLAQIGDQYADLFLAAKNLSDAILLSDILRVNTEITKAPLSASMIKRYDEHHQDLTLLKALVRQQLPEKYKEIFFDQSKNGYAGYIDGGASQEEFYKFIKPILEKMDGTEELLVKLNREDLLRKQRTFDNGSIPHQIHLGELHAILRRQEDFYPFLKDNREKIEKILTFRIPYYVGPLARGNSRFAWMTRKSEETITPWNFEEVVDKGASAQSFIERMTNFDKNLPNEKVLPKHSLLYEYFTVYNELTKVKYVTEGMRKPAFLSGEQKKAIVDLLFKTNRKVTVKQLKEDYFKKIECFDSVEISGVEDRFNASLGTYHDLLKIIKDKDFLDNEENEDILEDIVLTLTLFEDREMIEERLKTYAHLFDDKVMKQLKRRRYTGWGRLSRKLINGIRDKQSGKTILDFLKSDGFANRNFMQLIHDDSLTFKEDIQKAQVSGQGDSLHEHIANLAGSPAIKKGILQTVKVVDELVKVMGRHKPENIVIEMARENQTTQKGQKNSRERMKRIEEGIKELGSQILKEHPVENTQLQNEKLYLYYLQNGRDMYVDQELDINRLSDYDVDHIVPQSFLKDDSIDNKVLTRSDKARGKSDNVPSEEVVKKMKNYWRQLLNAKLITQRKFDNLTKAERGGLSELDKAGFIKRQLVETRQITKHVAQILDSRMNTKYDENDKLIREVKVITLKSKLVSDFRKDFQFYKVREINNYHHAHDAYLNAVVGTALIKKYPKLESEFVYGDYKVYDVRKMIAKSEQEIGKATAKYFFYSNIMNFFKTEITLANGEIRKRPLIETNGETGEIVWDKGRDFATVRKVLSMPQVNIVKKTEVQTGGFSKESILPKRNSDKLIARKKDWDPKKYGGFDSPTVAYSVLVVAKVEKGKSKKLKSVKELLGITIMERSSFEKNPIDFLEAKGYKEVKKDLIIKLPKYSLFELENGRKRMLASAGELQKGNELALPSKYVNFLYLASHYEKLKGSPEDNEQKQLFVEQHKHYLDEIIEQISEFSKRVILADANLDKVLSAYNKHRDKPIREQAENIIHLFTLTNLGAPAAFKYFDTTIDRKRYTSTKEVLDATLIHQSITGLYETRIDLSQLGGDGGPAPAPAPAPGGVLNLEEEYRLHEKPVPSSIDPSWLQLFPTVWAERAGMGLANQVPPVVVELRSGASPVAVRQYPMSKEAREGIRPHIQRFLDLGVLVPCQSPWNTPLLPVKKPGTNDYRPVQDLREINKRVQDIHPTVPNPYNLLSSLPPSHTWYSVLDLKDAFFCLKLHPNSQPLFAFEWRDPEKGNTGQLTWTRLPQGFKNSPTLFNEALHRDLAPFRALNPQVVLLQYVDDLLVAAPTYRDCKEGTQKLLQELSKLGYRVSAKKAQLCQKEVTYLGYLLKEGKRWLTPARKATVMKIPPPTTPRQVREFLGTAGFCRLWIPGFASLAAPLYPLTKPSIPFIWTEEHQKAFDRIKEALLSAPALALPDLTKPFTLYVDERAGVARGVLTQTLGPWRRPVAYLSKKLDPVASGWPTCLKAVAAVALLLKDADKLTLGQNVTVIASHSLESIVRQPPDRWMTNARMTHYQSLLLNERVSFAPPAVLNPATLLPVESEATPVHRCSEILAEETGTRRDLKDQPLPGVPAWYTDGSSFIAEGKRRAGAAIVDGKRTVWASSLPEGTSAQKAELVALTQALRLAEGKDINIYTDSRYAFATAHIHGAIYKQRGWLTSAGKDIKNKEEILALLEAIHLPKRVAIIHCPGHQKGNDPVATGNRRADEAAKQAALSTRVLAETTKPAGKRTADGSEFEKRTADGSEFESPKKKAKVE

SEQ ID NO: 822 - protein, 2094 aa, synthetic construct
MPAAKRVKLDGGDKKYSIGLDIGTNSVGWAVITDEYKVPSKKFKVLGNTDRHSIKKNLIGALLFDSGETAEATRLKRTARRRYTRRKNRICYLQEIFSNEMAKVDDSFFHRLEESFLVEEDKKHERHPIFGNIVDEVAYHEKYPTIYHLRKKLVDSTDKADLRLIYLALAHMIKFRGHFLIEGDLNPDNSDVDKLFIQLVQTYNQLFEENPINASGVDAKAILSARLSKSRRLENLIAQLPGEKKNGLFGNLIALSLGLTPNFKSNFDLAEDAKLQLSKDTYDDDLDNLLAQIGDQYADLFLAAKNLSDAILLSDILRVNTEITKAPLSASMIKRYDEHHQDLTLLKALVRQQLPEKYKEIFFDQSKNGYAGYIDGGASQEEFYKFIKPILEKMDGTEELLVKLNREDLLRKQRTFDNGSIPHQIHLGELHAILRRQEDFYPFLKDNREKIEKILTFRIPYYVGPLARGNSRFAWMTRKSEETITPWNFEEVVDKGASAQSFIERMTNFDKNLPNEKVLPKHSLLYEYFTVYNELTKVKYVTEGMRKPAFLSGEQKKAIVDLLFKTNRKVTVKQLKEDYFKKIECFDSVEISGVEDRFNASLGTYHDLLKIIKDKDFLDNEENEDILEDIVLTLTLFEDREMIEERLKTYAHLFDDKVMKQLKRRRYTGWGRLSRKLINGIRDKQSGKTILDFLKSDGFANRNFMQLIHDDSLTFKEDIQKAQVSGQGDSLHEHIANLAGSPAIKKGILQTVKVVDELVKVMGRHKPENIVIEMARENQTTQKGQKNSRERMKRIEEGIKELGSQILKEHPVENTQLQNEKLYLYYLQNGRDMYVDQELDINRLSDYDVDHIVPQSFLKDDSIDNKVLTRSDKARGKSDNVPSEEVVKKMKNYWRQLLNAKLITQRKFDNLTKAERGGLSELDKAGFIKRQLVETRQITKHVAQILDSRMNTKYDENDKLIREVKVITLKSKLVSDFRKDFQFYKVREINNYHHAHDAYLNAVVGTALIKKYPKLESEFVYGDYKVYDVRKMIAKSEQEIGKATAKYFFYSNIMNFFKTEITLANGEIRKRPLIETNGETGEIVWDKGRDFATVRKVLSMPQVNIVKKTEVQTGGFSKESILPKRNSDKLIARKKDWDPKKYGGFDSPTVAYSVLVVAKVEKGKSKKLKSVKELLGITIMERSSFEKNPIDFLEAKGYKEVKKDLIIKLPKYSLFELENGRKRMLASAGELQKGNELALPSKYVNFLYLASHYEKLKGSPEDNEQKQLFVEQHKHYLDEIIEQISEFSKRVILADANLDKVLSAYNKHRDKPIREQAENIIHLFTLTNLGAPAAFKYFDTTIDRKRYTSTKEVLDATLIHQSITGLYETRIDLSQLGGDGGEAAAKGGGPAPGGVLNLEEEYRLHEKPVPSSIDPSWLQLFPTVWAERAGMGLANQVPPVVVELRSGASPVAVRQYPMSKEAREGIRPHIQRFLDLGVLVPCQSPWNTPLLPVKKPGTNDYRPVQDLREINKRVQDIHPTVPNPYNLLSSLPPSHTWYSVLDLKDAFFCLKLHPNSQPLFAFEWRDPEKGNTGQLTWTRLPQGFKNSPTLFNEALHRDLAPFRALNPQVVLLQYVDDLLVAAPTYRDCKEGTQKLLQELSKLGYRVSAKKAQLCQKEVTYLGYLLKEGKRWLTPARKATVMKIPPPTTPRQVREFLGTAGFCRLWIPGFASLAAPLYPLTKPSIPFIWTEEHQKAFDRIKEALLSAPALALPDLTKPFTLYVDERAGVARGVLTQTLGPWRRPVAYLSKKLDPVASGWPTCLKAVAAVALLLKDADKLTLGQNVTVIASHSLESIVRQPPDRWMTNARMTHYQSLLLNERVSFAPPAVLNPATLLPVESEATPVHRCSEILAEETGTRRDLKDQPLPGVPAWYTDGSSFIAEGKRRAGAAIVDGKRTVWASSLPEGTSAQKAELVALTQALRLAEGKDINIYTDSRYAFATAHIHGAIYKQRGWLTSAGKDIKNKEEILALLEAIHLPKRVAIIHCPGHQKGNDPVATGNRRADEAAKQAALSTRVLAETTKPAGKRTADGSEFEKRTADGSEFESPKKKAKVE

SEQ ID NO: 823 - protein, 2088 aa, synthetic construct
MPAAKRVKLDGGDKKYSIGLDIGTNSVGWAVITDEYKVPSKKFKVLGNTDRHSIKKNLIGALLFDSGETAEATRLKRTARRRYTRRKNRICYLQEIFSNEMAKVDDSFFHRLEESFLVEEDKKHERHPIFGNIVDEVAYHEKYPTIYHLRKKLVDSTDKADLRLIYLALAHMIKFRGHFLIEGDLNPDNSDVDKLFIQLVQTYNQLFEENPINASGVDAKAILSARLSKSRRLENLIAQLPGEKKNGLFGNLIALSLGLTPNFKSNFDLAEDAKLQLSKDTYDDDLDNLLAQIGDQYADLFLAAKNLSDAILLSDILRVNTEITKAPLSASMIKRYDEHHQDLTLLKALVRQQLPEKYKEIFFDQSKNGYAGYIDGGASQEEFYKFIKPILEKMDGTEELLVKLNREDLLRKQRTFDNGSIPHQIHLGELHAILRRQEDFYPFLKDNREKIEKILTFRIPYYVGPLARGNSRFAWMTRKSEETITPWNFEEVVDKGASAQSFIERMTNFDKNLPNEKVLPKHSLLYEYFTVYNELTKVKYVTEGMRKPAFLSGEQKKAIVDLLFKTNRKVTVKQLKEDYFKKIECFDSVEISGVEDRFNASLGTYHDLLKIIKDKDFLDNEENEDILEDIVLTLTLFEDREMIEERLKTYAHLFDDKVMKQLKRRRYTGWGRLSRKLINGIRDKQSGKTILDFLKSDGFANRNFMQLIHDDSLTFKEDIQKAQVSGQGDSLHEHIANLAGSPAIKKGILQTVKVVDELVKVMGRHKPENIVIEMARENQTTQKGQKNSRERMKRIEEGIKELGSQILKEHPVENTQLQNEKLYLYYLQNGRDMYVDQELDINRLSDYDVDHIVPQSFLKDDSIDNKVLTRSDKARGKSDNVPSEEVVKKMKNYWRQLLNAKLITQRKFDNLTKAERGGLSELDKAGFIKRQLVETRQITKHVAQILDSRMNTKYDENDKLIREVKVITLKSKLVSDFRKDFQFYKVREINNYHHAHDAYLNAVVGTALIKKYPKLESEFVYGDYKVYDVRKMIAKSEQEIGKATAKYFFYSNIMNFFKTEITLANGEIRKRPLIETNGETGEIVWDKGRDFATVRKVLSMPQVNIVKKTEVQTGGFSKESILPKRNSDKLIARKKDWDPKKYGGFDSPTVAYSVLVVAKVEKGKSKKLKSVKELLGITIMERSSFEKNPIDFLEAKGYKEVKKDLIIKLPKYSLFELENGRKRMLASAGELQKGNELALPSKYVNFLYLASHYEKLKGSPEDNEQKQLFVEQHKHYLDEIIEQISEFSKRVILADANLDKVLSAYNKHRDKPIREQAENIIHLFTLTNLGAPAAFKYFDTTIDRKRYTSTKEVLDATLIHQSITGLYETRIDLSQLGGDGGEAAAKGGVLNLEEEYRLHEKPVPSSIDPSWLQLFPTVWAERAGMGLANQVPPVVVELRSGASPVAVRQYPMSKEAREGIRPHIQRFLDLGVLVPCQSPWNTPLLPVKKPGTNDYRPVQDLREINKRVQDIHPTVPNPYNLLSSLPPSHTWYSVLDLKDAFFCLKLHPNSQPLFAFEWRDPEKGNTGQLTWTRLPQGFKNSPTLFNEALHRDLAPFRALNPQVVLLQYVDDLLVAAPTYRDCKEGTQKLLQELSKLGYRVSAKKAQLCQKEVTYLGYLLKEGKRWLTPARKATVMKIPPPTTPRQVREFLGTAGFCRLWIPGFASLAAPLYPLTKPSIPFIWTEEHQKAFDRIKEALLSAPALALPDLTKPFTLYVDERAGVARGVLTQTLGPWRRPVAYLSKKLDPVASGWPTCLKAVAAVALLLKDADKLTLGQNVTVIASHSLESIVRQPPDRWMTNARMTHYQSLLLNERVSFAPPAVLNPATLLPVESEATPVHRCSEILAEETGTRRDLKDQPLPGVPAWYTDGSSFIAEGKRRAGAAIVDGKRTVWASSLPEGTSAQKAELVALTQALRLAEGKDINIYTDSRYAFATAHIHGAIYKQRGWLTSAGKDIKNKEEILALLEAIHLPKRVAIIHCPGHQKGNDPVATGNRRADEAAKQAALSTRVLAETTKPAGKRTADGSEFEKRTADGSEFESPKKKAKVE

SEQ ID NO: 824 - protein, 2095 aa, synthetic construct
MPAAKRVKLDGGDKKYSIGLDIGTNSVGWAVITDEYKVPSKKFKVLGNTDRHSIKKNLIGALLFDSGETAEATRLKRTARRRYTRRKNRICYLQEIFSNEMAKVDDSFFHRLEESFLVEEDKKHERHPIFGNIVDEVAYHEKYPTIYHLRKKLVDSTDKADLRLIYLALAHMIKFRGHFLIEGDLNPDNSDVDKLFIQLVQTYNQLFEENPINASGVDAKAILSARLSKSRRLENLIAQLPGEKKNGLFGNLIALSLGLTPNFKSNFDLAEDAKLQLSKDTYDDDLDNLLAQIGDQYADLFLAAKNLSDAILLSDILRVNTEITKAPLSASMIKRYDEHHQDLTLLKALVRQQLPEKYKEIFFDQSKNGYAGYIDGGASQEEFYKFIKPILEKMDGTEELLVKLNREDLLRKQRTFDNGSIPHQIHLGELHAILRRQEDFYPFLKDNREKIEKILTFRIPYYVGPLARGNSRFAWMTRKSEETITPWNFEEVVDKGASAQSFIERMTNFDKNLPNEKVLPKHSLLYEYFTVYNELTKVKYVTEGMRKPAFLSGEQKKAIVDLLFKTNRKVTVKQLKEDYFKKIECFDSVEISGVEDRFNASLGTYHDLLKIIKDKDFLDNEENEDILEDIVLTLTLFEDREMIEERLKTYAHLFDDKVMKQLKRRRYTGWGRLSRKLINGIRDKQSGKTILDFLKSDGFANRNFMQLIHDDSLTFKEDIQKAQVSGQGDSLHEHIANLAGSPAIKKGILQTVKVVDELVKVMGRHKPENIVIEMARENQTTQKGQKNSRERMKRIEEGIKELGSQILKEHPVENTQLQNEKLYLYYLQNGRDMYVDQELDINRLSDYDVDHIVPQSFLKDDSIDNKVLTRSDKARGKSDNVPSEEVVKKMKNYWRQLLNAKLITQRKFDNLTKAERGGLSELDKAGFIKRQLVETRQITKHVAQILDSRMNTKYDENDKLIREVKVITLKSKLVSDFRKDFQFYKVREINNYHHAHDAYLNAVVGTALIKKYPKLESEFVYGDYKVYDVRKMIAKSEQEIGKATAKYFFYSNIMNFFKTEITLANGEIRKRPLIETNGETGEIVWDKGRDFATVRKVLSMPQVNIVKKTEVQTGGFSKESILPKRNSDKLIARKKDWDPKKYGGFDSPTVAYSVLVVAKVEKGKSKKLKSVKELLGITIMERSSFEKNPIDFLEAKGYKEVKKDLIIKLPKYSLFELENGRKRMLASAGELQKGNELALPSKYVNFLYLASHYEKLKGSPEDNEQKQLFVEQHKHYLDEIIEQISEFSKRVILADANLDKVLSAYNKHRDKPIREQAENIIHLFTLTNLGAPAAFKYFDTTIDRKRYTSTKEVLDATLIHQSITGLYETRIDLSQLGGDGGGGSGGSGGSGGSGGVLNLEEEYRLHEKPVPSSIDPSWLQLFPTVWAERAGMGLANQVPPVVVELRSGASPVAVRQYPMSKEAREGIRPHIQRFLDLGVLVPCQSPWNTPLLPVKKPGTNDYRPVQDLREINKRVQDIHPTVPNPYNLLSSLPPSHTWYSVLDLKDAFFCLKLHPNSQPLFAFEWRDPEKGNTGQLTWTRLPQGFKNSPTLFNEALHRDLAPFRALNPQVVLLQYVDDLLVAAPTYRDCKEGTQKLLQELSKLGYRVSAKKAQLCQKEVTYLGYLLKEGKRWLTPARKATVMKIPPPTTPRQVREFLGTAGFCRLWIPGFASLAAPLYPLTKPSIPFIWTEEHQKAFDRIKEALLSAPALALPDLTKPFTLYVDERAGVARGVLTQTLGPWRRPVAYLSKKLDPVASGWPTCLKAVAAVALLLKDADKLTLGQNVTVIASHSLESIVRQPPDRWMTNARMTHYQSLLLNERVSFAPPAVLNPATLLPVESEATPVHRCSEILAEETGTRRDLKDQPLPGVPAWYTDGSSFIAEGKRRAGAAIVDGKRTVWASSLPEGTSAQKAELVALTQALRLAEGKDINIYTDSRYAFATAHIHGAIYKQRGWLTSAGKDIKNKEEILALLEAIHLPKRVAIIHCPGHQKGNDPVATGNRRADEAAKQAALSTRVLAETTKPAGKRTADGSEFEKRTADGSEFESPKKKAKVE

SEQ ID NO: 825 - protein, 2094 aa, synthetic construct
MPAAKRVKLDGGDKKYSIGLDIGTNSVGWAVITDEYKVPSKKFKVLGNTDRHSIKKNLIGALLFDSGETAEATRLKRTARRRYTRRKNRICYLQEIFSNEMAKVDDSFFHRLEESFLVEEDKKHERHPIFGNIVDEVAYHEKYPTIYHLRKKLVDSTDKADLRLIYLALAHMIKFRGHFLIEGDLNPDNSDVDKLFIQLVQTYNQLFEENPINASGVDAKAILSARLSKSRRLENLIAQLPGEKKNGLFGNLIALSLGLTPNFKSNFDLAEDAKLQLSKDTYDDDLDNLLAQIGDQYADLFLAAKNLSDAILLSDILRVNTEITKAPLSASMIKRYDEHHQDLTLLKALVRQQLPEKYKEIFFDQSKNGYAGYIDGGASQEEFYKFIKPILEKMDGTEELLVKLNREDLLRKQRTFDNGSIPHQIHLGELHAILRRQEDFYPFLKDNREKIEKILTFRIPYYVGPLARGNSRFAWMTRKSEETITPWNFEEVVDKGASAQSFIERMTNFDKNLPNEKVLPKHSLLYEYFTVYNELTKVKYVTEGMRKPAFLSGEQKKAIVDLLFKTNRKVTVKQLKEDYFKKIECFDSVEISGVEDRFNASLGTYHDLLKIIKDKDFLDNEENEDILEDIVLTLTLFEDREMIEERLKTYAHLFDDKVMKQLKRRRYTGWGRLSRKLINGIRDKQSGKTILDFLKSDGFANRNFMQLIHDDSLTFKEDIQKAQVSGQGDSLHEHIANLAGSPAIKKGILQTVKVVDELVKVMGRHKPENIVIEMARENQTTQKGQKNSRERMKRIEEGIKELGSQILKEHPVENTQLQNEKLYLYYLQNGRDMYVDQELDINRLSDYDVDHIVPQSFLKDDSIDNKVLTRSDKARGKSDNVPSEEVVKKMKNYWRQLLNAKLITQRKFDNLTKAERGGLSELDKAGFIKRQLVETRQITKHVAQILDSRMNTKYDENDKLIREVKVITLKSKLVSDFRKDFQFYKVREINNYHHAHDAYLNAVVGTALIKKYPKLESEFVYGDYKVYDVRKMIAKSEQEIGKATAKYFFYSNIMNFFKTEITLANGEIRKRPLIETNGETGEIVWDKGRDFATVRKVLSMPQVNIVKKTEVQTGGFSKESILPKRNSDKLIARKKDWDPKKYGGFDSPTVAYSVLVVAKVEKGKSKKLKSVKELLGITIMERSSFEKNPIDFLEAKGYKEVKKDLIIKLPKYSLFELENGRKRMLASAGELQKGNELALPSKYVNFLYLASHYEKLKGSPEDNEQKQLFVEQHKHYLDEIIEQISEFSKRVILADANLDKVLSAYNKHRDKPIREQAENIIHLFTLTNLGAPAAFKYFDTTIDRKRYTSTKEVLDATLIHQSITGLYETRIDLSQLGGDGGGGSGSSEAAAKGGVLNLEEEYRLHEKPVPSSIDPSWLQLFPTVWAERAGMGLANQVPPVVVELRSGASPVAVRQYPMSKEAREGIRPHIQRFLDLGVLVPCQSPWNTPLLPVKKPGTNDYRPVQDLREINKRVQDIHPTVPNPYNLLSSLPPSHTWYSVLDLKDAFFCLKLHPNSQPLFAFEWRDPEKGNTGQLTWTRLPQGFKNSPTLFNEALHRDLAPFRALNPQVVLLQYVDDLLVAAPTYRDCKEGTQKLLQELSKLGYRVSAKKAQLCQKEVTYLGYLLKEGKRWLTPARKATVMKIPPPTTPRQVREFLGTAGFCRLWIPGFASLAAPLYPLTKPSIPFIWTEEHQKAFDRIKEALLSAPALALPDLTKPFTLYVDERAGVARGVLTQTLGPWRRPVAYLSKKLDPVASGWPTCLKAVAAVALLLKDADKLTLGQNVTVIASHSLESIVRQPPDRWMTNARMTHYQSLLLNERVSFAPPAVLNPATLLPVESEATPVHRCSEILAEETGTRRDLKDQPLPGVPAWYTDGSSFIAEGKRRAGAAIVDGKRTVWASSLPEGTSAQKAELVALTQALRLAEGKDINIYTDSRYAFATAHIHGAIYKQRGWLTSAGKDIKNKEEILALLEAIHLPKRVAIIHCPGHQKGNDPVATGNRRADEAAKQAALSTRVLAETTKPAGKRTADGSEFEKRTADGSEFESPKKKAKVE

SEQ ID NO: 826 - protein, 2094 aa, synthetic construct
MPAAKRVKLDGGDKKYSIGLDIGTNSVGWAVITDEYKVPSKKFKVLGNTDRHSIKKNLIGALLFDSGETAEATRLKRTARRRYTRRKNRICYLQEIFSNEMAKVDDSFFHRLEESFLVEEDKKHERHPIFGNIVDEVAYHEKYPTIYHLRKKLVDSTDKADLRLIYLALAHMIKFRGHFLIEGDLNPDNSDVDKLFIQLVQTYNQLFEENPINASGVDAKAILSARLSKSRRLENLIAQLPGEKKNGLFGNLIALSLGLTPNFKSNFDLAEDAKLQLSKDTYDDDLDNLLAQIGDQYADLFLAAKNLSDAILLSDILRVNTEITKAPLSASMIKRYDEHHQDLTLLKALVRQQLPEKYKEIFFDQSKNGYAGYIDGGASQEEFYKFIKPILEKMDGTEELLVKLNREDLLRKQRTFDNGSIPHQIHLGELHAILRRQEDFYPFLKDNREKIEKILTFRIPYYVGPLARGNSRFAWMTRKSEETITPWNFEEVVDKGASAQSFIERMTNFDKNLPNEKVLPKHSLLYEYFTVYNELTKVKYVTEGMRKPAFLSGEQKKAIVDLLFKTNRKVTVKQLKEDYFKKIECFDSVEISGVEDRFNASLGTYHDLLKIIKDKDFLDNEENEDILEDIVLTLTLFEDREMIEERLKTYAHLFDDKVMKQLKRRRYTGWGRLSRKLINGIRDKQSGKTILDFLKSDGFANRNFMQLIHDDSLTFKEDIQKAQVSGQGDSLHEHIANLAGSPAIKKGILQTVKVVDELVKVMGRHKPENIVIEMARENQTTQKGQKNSRERMKRIEEGIKELGSQILKEHPVENTQLQNEKLYLYYLQNGRDMYVDQELDINRLSDYDVDHIVPQSFLKDDSIDNKVLTRSDKARGKSDNVPSEEVVKKMKNYWRQLLNAKLITQRKFDNLTKAERGGLSELDKAGFIKRQLVETRQITKHVAQILDSRMNTKYDENDKLIREVKVITLKSKLVSDFRKDFQFYKVREINNYHHAHDAYLNAVVGTALIKKYPKLESEFVYGDYKVYDVRKMIAKSEQEIGKATAKYFFYSNIMNFFKTEITLANGEIRKRPLIETNGETGEIVWDKGRDFATVRKVLSMPQVNIVKKTEVQTGGFSKESILPKRNSDKLIARKKDWDPKKYGGFDSPTVAYSVLVVAKVEKGKSKKLKSVKELLGITIMERSSFEKNPIDFLEAKGYKEVKKDLIIKLPKYSLFELENGRKRMLASAGELQKGNELALPSKYVNFLYLASHYEKLKGSPEDNEQKQLFVEQHKHYLDEIIEQISEFSKRVILADANLDKVLSAYNKHRDKPIREQAENIIHLFTLTNLGAPAAFKYFDTTIDRKRYTSTKEVLDATLIHQSITGLYETRIDLSQLGGDGGEAAAKGGGGSSGGVLNLEEEYRLHEKPVPSSIDPSWLQLFPTVWAERAGMGLANQVPPVVVELRSGASPVAVRQYPMSKEAREGIRPHIQRFLDLGVLVPCQSPWNTPLLPVKKPGTNDYRPVQDLREINKRVQDIHPTVPNPYNLLSSLPPSHTWYSVLDLKDAFFCLKLHPNSQPLFAFEWRDPEKGNTGQLTWTRLPQGFKNSPTLFNEALHRDLAPFRALNPQVVLLQYVDDLLVAAPTYRDCKEGTQKLLQELSKLGYRVSAKKAQLCQKEVTYLGYLLKEGKRWLTPARKATVMKIPPPTTPRQVREFLGTAGFCRLWIPGFASLAAPLYPLTKPSIPFIWTEEHQKAFDRIKEALLSAPALALPDLTKPFTLYVDERAGVARGVLTQTLGPWRRPVAYLSKKLDPVASGWPTCLKAVAAVALLLKDADKLTLGQNVTVIASHSLESIVRQPPDRWMTNARMTHYQSLLLNERVSFAPPAVLNPATLLPVESEATPVHRCSEILAEETGTRRDLKDQPLPGVPAWYTDGSSFIAEGKRRAGAAIVDGKRTVWASSLPEGTSAQKAELVALTQALRLAEGKDINIYTDSRYAFATAHIHGAIYKQRGWLTSAGKDIKNKEEILALLEAIHLPKRVAIIHCPGHQKGNDPVATGNRRADEAAKQAALSTRVLAETTKPAGKRTADGSEFEKRTADGSEFESPKKKAKVE

SEQ ID NO: 827 - protein, 2103 aa, synthetic construct
MPAAKRVKLDGGDKKYSIGLDIGTNSVGWAVITDEYKVPSKKFKVLGNTDRHSIKKNLIGALLFDSGETAEATRLKRTARRRYTRRKNRICYLQEIFSNEMAKVDDSFFHRLEESFLVEEDKKHERHPIFGNIVDEVAYHEKYPTIYHLRKKLVDSTDKADLRLIYLALAHMIKFRGHFLIEGDLNPDNSDVDKLFIQLVQTYNQLFEENPINASGVDAKAILSARLSKSRRLENLIAQLPGEKKNGLFGNLIALSLGLTPNFKSNFDLAEDAKLQLSKDTYDDDLDNLLAQIGDQYADLFLAAKNLSDAILLSDILRVNTEITKAPLSASMIKRYDEHHQDLTLLKALVRQQLPEKYKEIFFDQSKNGYAGYIDGGASQEEFYKFIKPILEKMDGTEELLVKLNREDLLRKQRTFDNGSIPHQIHLGELHAILRRQEDFYPFLKDNREKIEKILTFRIPYYVGPLARGNSRFAWMTRKSEETITPWNFEEVVDKGASAQSFIERMTNFDKNLPNEKVLPKHSLLYEYFTVYNELTKVKYVTEGMRKPAFLSGEQKKAIVDLLFKTNRKVTVKQLKEDYFKKIECFDSVEISGVEDRFNASLGTYHDLLKIIKDKDFLDNEENEDILEDIVLTLTLFEDREMIEERLKTYAHLFDDKVMKQLKRRRYTGWGRLSRKLINGIRDKQSGKTILDFLKSDGFANRNFMQLIHDDSLTFKEDIQKAQVSGQGDSLHEHIANLAGSPAIKKGILQTVKVVDELVKVMGRHKPENIVIEMARENQTTQKGQKNSRERMKRIEEGIKELGSQILKEHPVENTQLQNEKLYLYYLQNGRDMYVDQELDINRLSDYDVDHIVPQSFLKDDSIDNKVLTRSDKARGKSDNVPSEEVVKKMKNYWRQLLNAKLITQRKFDNLTKAERGGLSELDKAGFIKRQLVETRQITKHVAQILDSRMNTKYDENDKLIREVKVITLKSKLVSDFRKDFQFYKVREINNYHHAHDAYLNAVVGTALIKKYPKLESEFVYGDYKVYDVRKMIAKSEQEIGKATAKYFFYSNIMNFFKTEITLANGEIRKRPLIETNGETGEIVWDKGRDFATVRKVLSMPQVNIVKKTEVQTGGFSKESILPKRNSDKLIARKKDWDPKKYGGFDSPTVAYSVLVVAKVEKGKSKKLKSVKELLGITIMERSSFEKNPIDFLEAKGYKEVKKDLIIKLPKYSLFELENGRKRMLASAGELQKGNELALPSKYVNFLYLASHYEKLKGSPEDNEQKQLFVEQHKHYLDEIIEQISEFSKRVILADANLDKVLSAYNKHRDKPIREQAENIIHLFTLTNLGAPAAFKYFDTTIDRKRYTSTKEVLDATLIHQSITGLYETRIDLSQLGGDGGEAAAKEAAAKEAAAKEAAAKGGVLNLEEEYRLHEKPVPSSIDPSWLQLFPTVWAERAGMGLANQVPPVVVELRSGASPVAVRQYPMSKEAREGIRPHIQRFLDLGVLVPCQSPWNTPLLPVKKPGTNDYRPVQDLREINKRVQDIHPTVPNPYNLLSSLPPSHTWYSVLDLKDAFFCLKLHPNSQPLFAFEWRDPEKGNTGQLTWTRLPQGFKNSPTLFNEALHRDLAPFRALNPQVVLLQYVDDLLVAAPTYRDCKEGTQKLLQELSKLGYRVSAKKAQLCQKEVTYLGYLLKEGKRWLTPARKATVMKIPPPTTPRQVREFLGTAGFCRLWIPGFASLAAPLYPLTKPSIPFIWTEEHQKAFDRIKEALLSAPALALPDLTKPFTLYVDERAGVARGVLTQTLGPWRRPVAYLSKKLDPVASGWPTCLKAVAAVALLLKDADKLTLGQNVTVIASHSLESIVRQPPDRWMTNARMTHYQSLLLNERVSFAPPAVLNPATLLPVESEATPVHRCSEILAEETGTRRDLKDQPLPGVPAWYTDGSSFIAEGKRRAGAAIVDGKRTVWASSLPEGTSAQKAELVALTQALRLAEGKDINIYTDSRYAFATAHIHGAIYKQRGWLTSAGKDIKNKEEILALLEAIHLPKRVAIIHCPGHQKGNDPVATGNRRADEAAKQAALSTRVLAETTKPAGKRTADGSEFEKRTADGSEFESPKKKAKVE

SEQ ID NO: 828 - protein, 2092 aa, synthetic construct
MPAAKRVKLDGGDKKYSIGLDIGTNSVGWAVITDEYKVPSKKFKVLGNTDRHSIKKNLIGALLFDSGETAEATRLKRTARRRYTRRKNRICYLQEIFSNEMAKVDDSFFHRLEESFLVEEDKKHERHPIFGNIVDEVAYHEKYPTIYHLRKKLVDSTDKADLRLIYLALAHMIKFRGHFLIEGDLNPDNSDVDKLFIQLVQTYNQLFEENPINASGVDAKAILSARLSKSRRLENLIAQLPGEKKNGLFGNLIALSLGLTPNFKSNFDLAEDAKLQLSKDTYDDDLDNLLAQIGDQYADLFLAAKNLSDAILLSDILRVNTEITKAPLSASMIKRYDEHHQDLTLLKALVRQQLPEKYKEIFFDQSKNGYAGYIDGGASQEEFYKFIKPILEKMDGTEELLVKLNREDLLRKQRTFDNGSIPHQIHLGELHAILRRQEDFYPFLKDNREKIEKILTFRIPYYVGPLARGNSRFAWMTRKSEETITPWNFEEVVDKGASAQSFIERMTNFDKNLPNEKVLPKHSLLYEYFTVYNELTKVKYVTEGMRKPAFLSGEQKKAIVDLLFKTNRKVTVKQLKEDYFKKIECFDSVEISGVEDRFNASLGTYHDLLKIIKDKDFLDNEENEDILEDIVLTLTLFEDREMIEERLKTYAHLFDDKVMKQLKRRRYTGWGRLSRKLINGIRDKQSGKTILDFLKSDGFANRNFMQLIHDDSLTFKEDIQKAQVSGQGDSLHEHIANLAGSPAIKKGILQTVKVVDELVKVMGRHKPENIVIEMARENQTTQKGQKNSRERMKRIEEGIKELGSQILKEHPVENTQLQNEKLYLYYLQNGRDMYVDQELDINRLSDYDVDHIVPQSFLKDDSIDNKVLTRSDKARGKSDNVPSEEVVKKMKNYWRQLLNAKLITQRKFDNLTKAERGGLSELDKAGFIKRQLVETRQITKHVAQILDSRMNTKYDENDKLIREVKVITLKSKLVSDFRKDFQFYKVREINNYHHAHDAYLNAVVGTALIKKYPKLESEFVYGDYKVYDVRKMIAKSEQEIGKATAKYFFYSNIMNFFKTEITLANGEIRKRPLIETNGETGEIVWDKGRDFATVRKVLSMPQVNIVKKTEVQTGGFSKESILPKRNSDKLIARKKDWDPKKYGGFDSPTVAYSVLVVAKVEKGKSKKLKSVKELLGITIMERSSFEKNPIDFLEAKGYKEVKKDLIIKLPKYSLFELENGRKRMLASAGELQKGNELALPSKYVNFLYLASHYEKLKGSPEDNEQKQLFVEQHKHYLDEIIEQISEFSKRVILADANLDKVLSAYNKHRDKPIREQAENIIHLFTLTNLGAPAAFKYFDTTIDRKRYTSTKEVLDATLIHQSITGLYETRIDLSQLGGDGGGGSGGGGSSGGVLNLEEEYRLHEKPVPSSIDPSWLQLFPTVWAERAGMGLANQVPPVVVELRSGASPVAVRQYPMSKEAREGIRPHIQRFLDLGVLVPCQSPWNTPLLPVKKPGTNDYRPVQDLREINKRVQDIHPTVPNPYNLLSSLPPSHTWYSVLDLKDAFFCLKLHPNSQPLFAFEWRDPEKGNTGQLTWTRLPQGFKNSPTLFNEALHRDLAPFRALNPQVVLLQYVDDLLVAAPTYRDCKEGTQKLLQELSKLGYRVSAKKAQLCQKEVTYLGYLLKEGKRWLTPARKATVMKIPPPTTPRQVREFLGTAGFCRLWIPGFASLAAPLYPLTKPSIPFIWTEEHQKAFDRIKEALLSAPALALPDLTKPFTLYVDERAGVARGVLTQTLGPWRRPVAYLSKKLDPVASGWPTCLKAVAAVALLLKDADKLTLGQNVTVIASHSLESIVRQPPDRWMTNARMTHYQSLLLNERVSFAPPAVLNPATLLPVESEATPVHRCSEILAEETGTRRDLKDQPLPGVPAWYTDGSSFIAEGKRRAGAAIVDGKRTVWASSLPEGTSAQKAELVALTQALRLAEGKDINIYTDSRYAFATAHIHGAIYKQRGWLTSAGKDIKNKEEILALLEAIHLPKRVAIIHCPGHQKGNDPVATGNRRADEAAKQAALSTRVLAETTKPAGKRTADGSEFEKRTADGSEFESPKKKAKVE

SEQ ID NO: 829 - protein, 2094 aa, synthetic construct
MPAAKRVKLDGGDKKYSIGLDIGTNSVGWAVITDEYKVPSKKFKVLGNTDRHSIKKNLIGALLFDSGETAEATRLKRTARRRYTRRKNRICYLQEIFSNEMAKVDDSFFHRLEESFLVEEDKKHERHPIFGNIVDEVAYHEKYPTIYHLRKKLVDSTDKADLRLIYLALAHMIKFRGHFLIEGDLNPDNSDVDKLFIQLVQTYNQLFEENPINASGVDAKAILSARLSKSRRLENLIAQLPGEKKNGLFGNLIALSLGLTPNFKSNFDLAEDAKLQLSKDTYDDDLDNLLAQIGDQYADLFLAAKNLSDAILLSDILRVNTEITKAPLSASMIKRYDEHHQDLTLLKALVRQQLPEKYKEIFFDQSKNGYAGYIDGGASQEEFYKFIKPILEKMDGTEELLVKLNREDLLRKQRTFDNGSIPHQIHLGELHAILRRQEDFYPFLKDNREKIEKILTFRIPYYVGPLARGNSRFAWMTRKSEETITPWNFEEVVDKGASAQSFIERMTNFDKNLPNEKVLPKHSLLYEYFTVYNELTKVKYVTEGMRKPAFLSGEQKKAIVDLLFKTNRKVTVKQLKEDYFKKIECFDSVEISGVEDRFNASLGTYHDLLKIIKDKDFLDNEENEDILEDIVLTLTLFEDREMIEERLKTYAHLFDDKVMKQLKRRRYTGWGRLSRKLINGIRDKQSGKTILDFLKSDGFANRNFMQLIHDDSLTFKEDIQKAQVSGQGDSLHEHIANLAGSPAIKKGILQTVKVVDELVKVMGRHKPENIVIEMARENQTTQKGQKNSRERMKRIEEGIKELGSQILKEHPVENTQLQNEKLYLYYLQNGRDMYVDQELDINRLSDYDVDHIVPQSFLKDDSIDNKVLTRSDKARGKSDNVPSEEVVKKMKNYWRQLLNAKLITQRKFDNLTKAERGGLSELDKAGFIKRQLVETRQITKHVAQILDSRMNTKYDENDKLIREVKVITLKSKLVSDFRKDFQFYKVREINNYHHAHDAYLNAVVGTALIKKYPKLESEFVYGDYKVYDVRKMIAKSEQEIGKATAKYFFYSNIMNFFKTEITLANGEIRKRPLIETNGETGEIVWDKGRDFATVRKVLSMPQVNIVKKTEVQTGGFSKESILPKRNSDKLIARKKDWDPKKYGGFDSPTVAYSVLVVAKVEKGKSKKLKSVKELLGITIMERSSFEKNPIDFLEAKGYKEVKKDLIIKLPKYSLFELENGRKRMLASAGELQKGNELALPSKYVNFLYLASHYEKLKGSPEDNEQKQLFVEQHKHYLDEIIEQISEFSKRVILADANLDKVLSAYNKHRDKPIREQAENIIHLFTLTNLGAPAAFKYFDTTIDRKRYTSTKEVLDATLIHQSITGLYETRIDLSQLGGDGGEAAAKGGSPAPGGVLNLEEEYRLHEKPVPSSIDPSWLQLFPTVWAERAGMGLANQVPPVVVELRSGASPVAVRQYPMSKEAREGIRPHIQRFLDLGVLVPCQSPWNTPLLPVKKPGTNDYRPVQDLREINKRVQDIHPTVPNPYNLLSSLPPSHTWYSVLDLKDAFFCLKLHPNSQPLFAFEWRDPEKGNTGQLTWTRLPQGFKNSPTLFNEALHRDLAPFRALNPQVVLLQYVDDLLVAAPTYRDCKEGTQKLLQELSKLGYRVSAKKAQLCQKEVTYLGYLLKEGKRWLTPARKATVMKIPPPTTPRQVREFLGTAGFCRLWIPGFASLAAPLYPLTKPSIPFIWTEEHQKAFDRIKEALLSAPALALPDLTKPFTLYVDERAGVARGVLTQTLGPWRRPVAYLSKKLDPVASGWPTCLKAVAAVALLLKDADKLTLGQNVTVIASHSLESIVRQPPDRWMTNARMTHYQSLLLNERVSFAPPAVLNPATLLPVESEATPVHRCSEILAEETGTRRDLKDQPLPGVPAWYTDGSSFIAEGKRRAGAAIVDGKRTVWASSLPEGTSAQKAELVALTQALRLAEGKDINIYTDSRYAFATAHIHGAIYKQRGWLTSAGKDIKNKEEILALLEAIHLPKRVAIIHCPGHQKGNDPVATGNRRADEAAKQAALSTRVLAETTKPAGKRTADGSEFEKRTADGSEFESPKKKAKVE

SEQ ID NO: 830 - protein, 2094 aa, synthetic construct
MPAAKRVKLDGGDKKYSIGLDIGTNSVGWAVITDEYKVPSKKFKVLGNTDRHSIKKNLIGALLFDSGETAEATRLKRTARRRYTRRKNRICYLQEIFSNEMAKVDDSFFHRLEESFLVEEDKKHERHPIFGNIVDEVAYHEKYPTIYHLRKKLVDSTDKADLRLIYLALAHMIKFRGHFLIEGDLNPDNSDVDKLFIQLVQTYNQLFEENPINASGVDAKAILSARLSKSRRLENLIAQLPGEKKNGLFGNLIALSLGLTPNFKSNFDLAEDAKLQLSKDTYDDDLDNLLAQIGDQYADLFLAAKNLSDAILLSDILRVNTEITKAPLSASMIKRYDEHHQDLTLLKALVRQQLPEKYKEIFFDQSKNGYAGYIDGGASQEEFYKFIKPILEKMDGTEELLVKLNREDLLRKQRTFDNGSIPHQIHLGELHAILRRQEDFYPFLKDNREKIEKILTFRIPYYVGPLARGNSRFAWMTRKSEETITPWNFEEVVDKGASAQSFIERMTNFDKNLPNEKVLPKHSLLYEYFTVYNELTKVKYVTEGMRKPAFLSGEQKKAIVDLLFKTNRKVTVKQLKEDYFKKIECFDSVEISGVEDRFNASLGTYHDLLKIIKDKDFLDNEENEDILEDIVLTLTLFEDREMIEERLKTYAHLFDDKVMKQLKRRRYTGWGRLSRKLINGIRDKQSGKTILDFLKSDGFANRNFMQLIHDDSLTFKEDIQKAQVSGQGDSLHEHIANLAGSPAIKKGILQTVKVVDELVKVMGRHKPENIVIEMARENQTTQKGQKNSRERMKRIEEGIKELGSQILKEHPVENTQLQNEKLYLYYLQNGRDMYVDQELDINRLSDYDVDHIVPQSFLKDDSIDNKVLTRSDKARGKSDNVPSEEVVKKMKNYWRQLLNAKLITQRKFDNLTKAERGGLSELDKAGFIKRQLVETRQITKHVAQILDSRMNTKYDENDKLIREVKVITLKSKLVSDFRKDFQFYKVREINNYHHAHDAYLNAVVGTALIKKYPKLESEFVYGDYKVYDVRKMIAKSEQEIGKATAKYFFYSNIMNFFKTEITLANGEIRKRPLIETNGETGEIVWDKGRDFATVRKVLSMPQVNIVKKTEVQTGGFSKESILPKRNSDKLIARKKDWDPKKYGGFDSPTVAYSVLVVAKVEKGKSKKLKSVKELLGITIMERSSFEKNPIDFLEAKGYKEVKKDLIIKLPKYSLFELENGRKRMLASAGELQKGNELALPSKYVNFLYLASHYEKLKGSPEDNEQKQLFVEQHKHYLDEIIEQISEFSKRVILADANLDKVLSAYNKHRDKPIREQAENIIHLFTLTNLGAPAAFKYFDTTIDRKRYTSTKEVLDATLIHQSITGLYETRIDLSQLGGDGGEAAAKGGGGGSGGVLNLEEEYRLHEKPVPSSIDPSWLQLFPTVWAERAGMGLANQVPPVVVELRSGASPVAVRQYPMSKEAREGIRPHIQRFLDLGVLVPCQSPWNTPLLPVKKPGTNDYRPVQDLREINKRVQDIHPTVPNPYNLLSSLPPSHTWYSVLDLKDAFFCLKLHPNSQPLFAFEWRDPEKGNTGQLTWTRLPQGFKNSPTLFNEALHRDLAPFRALNPQVVLLQYVDDLLVAAPTYRDCKEGTQKLLQELSKLGYRVSAKKAQLCQKEVTYLGYLLKEGKRWLTPARKATVMKIPPPTTPRQVREFLGTAGFCRLWIPGFASLAAPLYPLTKPSIPFIWTEEHQKAFDRIKEALLSAPALALPDLTKPFTLYVDERAGVARGVLTQTLGPWRRPVAYLSKKLDPVASGWPTCLKAVAAVALLLKDADKLTLGQNVTVIASHSLESIVRQPPDRWMTNARMTHYQSLLLNERVSFAPPAVLNPATLLPVESEATPVHRCSEILAEETGTRRDLKDQPLPGVPAWYTDGSSFIAEGKRRAGAAIVDGKRTVWASSLPEGTSAQKAELVALTQALRLAEGKDINIYTDSRYAFATAHIHGAIYKQRGWLTSAGKDIKNKEEILALLEAIHLPKRVAIIHCPGHQKGNDPVATGNRRADEAAKQAALSTRVLAETTKPAGKRTADGSEFEKRTADGSEFESPKKKAKVE

SEQ ID NO: 831 - protein, 2094 aa, synthetic construct
MPAAKRVKLDGGDKKYSIGLDIGTNSVGWAVITDEYKVPSKKFKVLGNTDRHSIKKNLIGALLFDSGETAEATRLKRTARRRYTRRKNRICYLQEIFSNEMAKVDDSFFHRLEESFLVEEDKKHERHPIFGNIVDEVAYHEKYPTIYHLRKKLVDSTDKADLRLIYLALAHMIKFRGHFLIEGDLNPDNSDVDKLFIQLVQTYNQLFEENPINASGVDAKAILSARLSKSRRLENLIAQLPGEKKNGLFGNLIALSLGLTPNFKSNFDLAEDAKLQLSKDTYDDDLDNLLAQIGDQYADLFLAAKNLSDAILLSDILRVNTEITKAPLSASMIKRYDEHHQDLTLLKALVRQQLPEKYKEIFFDQSKNGYAGYIDGGASQEEFYKFIKPILEKMDGTEELLVKLNREDLLRKQRTFDNGSIPHQIHLGELHAILRRQEDFYPFLKDNREKIEKILTFRIPYYVGPLARGNSRFAWMTRKSEETITPWNFEEVVDKGASAQSFIERMTNFDKNLPNEKVLPKHSLLYEYFTVYNELTKVKYVTEGMRKPAFLSGEQKKAIVDLLFKTNRKVTVKQLKEDYFKKIECFDSVEISGVEDRFNASLGTYHDLLKIIKDKDFLDNEENEDILEDIVLTLTLFEDREMIEERLKTYAHLFDDKVMKQLKRRRYTGWGRLSRKLINGIRDKQSGKTILDFLKSDGFANRNFMQLIHDDSLTFKEDIQKAQVSGQGDSLHEHIANLAGSPAIKKGILQTVKVVDELVKVMGRHKPENIVIEMARENQTTQKGQKNSRERMKRIEEGIKELGSQILKEHPVENTQLQNEKLYLYYLQNGRDMYVDQELDINRLSDYDVDHIVPQSFLKDDSIDNKVLTRSDKARGKSDNVPSEEVVKKMKNYWRQLLNAKLITQRKFDNLTKAERGGLSELDKAGFIKRQLVETRQITKHVAQILDSRMNTKYDENDKLIREVKVITLKSKLVSDFRKDFQFYKVREINNYHHAHDAYLNAVVGTALIKKYPKLESEFVYGDYKVYDVRKMIAKSEQEIGKATAKYFFYSNIMNFFKTEITLANGEIRKRPLIETNGETGEIVWDKGRDFATVRKVLSMPQVNIVKKTEVQTGGFSKESILPKRNSDKLIARKKDWDPKKYGGFDSPTVAYSVLVVAKVEKGKSKKLKSVKELLGITIMERSSFEKNPIDFLEAKGYKEVKKDLIIKLPKYSLFELENGRKRMLASAGELQKGNELALPSKYVNFLYLASHYEKLKGSPEDNEQKQLFVEQHKHYLDEIIEQISEFSKRVILADANLDKVLSAYNKHRDKPIREQAENIIHLFTLTNLGAPAAFKYFDTTIDRKRYTSTKEVLDATLIHQSITGLYETRIDLSQLGGDGGPAPGSSEAAAKGGVLNLEEEYRLHEKPVPSSIDPSWLQLFPTVWAERAGMGLANQVPPVVVELRSGASPVAVRQYPMSKEAREGIRPHIQRFLDLGVLVPCQSPWNTPLLPVKKPGTNDYRPVQDLREINKRVQDIHPTVPNPYNLLSSLPPSHTWYSVLDLKDAFFCLKLHPNSQPLFAFEWRDPEKGNTGQLTWTRLPQGFKNSPTLFNEALHRDLAPFRALNPQVVLLQYVDDLLVAAPTYRDCKEGTQKLLQELSKLGYRVSAKKAQLCQKEVTYLGYLLKEGKRWLTPARKATVMKIPPPTTPRQVREFLGTAGFCRLWIPGFASLAAPLYPLTKPSIPFIWTEEHQKAFDRIKEALLSAPALALPDLTKPFTLYVDERAGVARGVLTQTLGPWRRPVAYLSKKLDPVASGWPTCLKAVAAVALLLKDADKLTLGQNVTVIASHSLESIVRQPPDRWMTNARMTHYQSLLLNERVSFAPPAVLNPATLLPVESEATPVHRCSEILAEETGTRRDLKDQPLPGVPAWYTDGSSFIAEGKRRAGAAIVDGKRTVWASSLPEGTSAQKAELVALTQALRLAEGKDINIYTDSRYAFATAHIHGAIYKQRGWLTSAGKDIKNKEEILALLEAIHLPKRVAIIHCPGHQKGNDPVATGNRRADEAAKQAALSTRVLAETTKPAGKRTADGSEFEKRTADGSEFESPKKKAKVE

SEQ ID NO: 832 - protein, 2091 aa, synthetic construct
MPAAKRVKLDGGDKKYSIGLDIGTNSVGWAVITDEYKVPSKKFKVLGNTDRHSIKKNLIGALLFDSGETAEATRLKRTARRRYTRRKNRICYLQEIFSNEMAKVDDSFFHRLEESFLVEEDKKHERHPIFGNIVDEVAYHEKYPTIYHLRKKLVDSTDKADLRLIYLALAHMIKFRGHFLIEGDLNPDNSDVDKLFIQLVQTYNQLFEENPINASGVDAKAILSARLSKSRRLENLIAQLPGEKKNGLFGNLIALSLGLTPNFKSNFDLAEDAKLQLSKDTYDDDLDNLLAQIGDQYADLFLAAKNLSDAILLSDILRVNTEITKAPLSASMIKRYDEHHQDLTLLKALVRQQLPEKYKEIFFDQSKNGYAGYIDGGASQEEFYKFIKPILEKMDGTEELLVKLNREDLLRKQRTFDNGSIPHQIHLGELHAILRRQEDFYPFLKDNREKIEKILTFRIPYYVGPLARGNSRFAWMTRKSEETITPWNFEEVVDKGASAQSFIERMTNFDKNLPNEKVLPKHSLLYEYFTVYNELTKVKYVTEGMRKPAFLSGEQKKAIVDLLFKTNRKVTVKQLKEDYFKKIECFDSVEISGVEDRFNASLGTYHDLLKIIKDKDFLDNEENEDILEDIVLTLTLFEDREMIEERLKTYAHLFDDKVMKQLKRRRYTGWGRLSRKLINGIRDKQSGKTILDFLKSDGFANRNFMQLIHDDSLTFKEDIQKAQVSGQGDSLHEHIANLAGSPAIKKGILQTVKVVDELVKVMGRHKPENIVIEMARENQTTQKGQKNSRERMKRIEEGIKELGSQILKEHPVENTQLQNEKLYLYYLQNGRDMYVDQELDINRLSDYDVDHIVPQSFLKDDSIDNKVLTRSDKARGKSDNVPSEEVVKKMKNYWRQLLNAKLITQRKFDNLTKAERGGLSELDKAGFIKRQLVETRQITKHVAQILDSRMNTKYDENDKLIREVKVITLKSKLVSDFRKDFQFYKVREINNYHHAHDAYLNAVVGTALIKKYPKLESEFVYGDYKVYDVRKMIAKSEQEIGKATAKYFFYSNIMNFFKTEITLANGEIRKRPLIETNGETGEIVWDKGRDFATVRKVLSMPQVNIVKKTEVQTGGFSKESILPKRNSDKLIARKKDWDPKKYGGFDSPTVAYSVLVVAKVEKGKSKKLKSVKELLGITIMERSSFEKNPIDFLEAKGYKEVKKDLIIKLPKYSLFELENGRKRMLASAGELQKGNELALPSKYVNFLYLASHYEKLKGSPEDNEQKQLFVEQHKHYLDEIIEQISEFSKRVILADANLDKVLSAYNKHRDKPIREQAENIIHLFTLTNLGAPAAFKYFDTTIDRKRYTSTKEVLDATLIHQSITGLYETRIDLSQLGGDGGEAAAKGGSGGVLNLEEEYRLHEKPVPSSIDPSWLQLFPTVWAERAGMGLANQVPPVVVELRSGASPVAVRQYPMSKEAREGIRPHIQRFLDLGVLVPCQSPWNTPLLPVKKPGTNDYRPVQDLREINKRVQDIHPTVPNPYNLLSSLPPSHTWYSVLDLKDAFFCLKLHPNSQPLFAFEWRDPEKGNTGQLTWTRLPQGFKNSPTLFNEALHRDLAPFRALNPQVVLLQYVDDLLVAAPTYRDCKEGTQKLLQELSKLGYRVSAKKAQLCQKEVTYLGYLLKEGKRWLTPARKATVMKIPPPTTPRQVREFLGTAGFCRLWIPGFASLAAPLYPLTKPSIPFIWTEEHQKAFDRIKEALLSAPALALPDLTKPFTLYVDERAGVARGVLTQTLGPWRRPVAYLSKKLDPVASGWPTCLKAVAAVALLLKDADKLTLGQNVTVIASHSLESIVRQPPDRWMTNARMTHYQSLLLNERVSFAPPAVLNPATLLPVESEATPVHRCSEILAEETGTRRDLKDQPLPGVPAWYTDGSSFIAEGKRRAGAAIVDGKRTVWASSLPEGTSAQKAELVALTQALRLAEGKDINIYTDSRYAFATAHIHGAIYKQRGWLTSAGKDIKNKEEILALLEAIHLPKRVAIIHCPGHQKGNDPVATGNRRADEAAKQAALSTRVLAETTKPAGKRTADGSEFEKRTADGSEFESPKKKAKVE

SEQ ID NO: 833 - protein, 2093 aa, synthetic construct
MPAAKRVKLDGGDKKYSIGLDIGTNSVGWAVITDEYKVPSKKFKVLGNTDRHSIKKNLIGALLFDSGETAEATRLKRTARRRYTRRKNRICYLQEIFSNEMAKVDDSFFHRLEESFLVEEDKKHERHPIFGNIVDEVAYHEKYPTIYHLRKKLVDSTDKADLRLIYLALAHMIKFRGHFLIEGDLNPDNSDVDKLFIQLVQTYNQLFEENPINASGVDAKAILSARLSKSRRLENLIAQLPGEKKNGLFGNLIALSLGLTPNFKSNFDLAEDAKLQLSKDTYDDDLDNLLAQIGDQYADLFLAAKNLSDAILLSDILRVNTEITKAPLSASMIKRYDEHHQDLTLLKALVRQQLPEKYKEIFFDQSKNGYAGYIDGGASQEEFYKFIKPILEKMDGTEELLVKLNREDLLRKQRTFDNGSIPHQIHLGELHAILRRQEDFYPFLKDNREKIEKILTFRIPYYVGPLARGNSRFAWMTRKSEETITPWNFEEVVDKGASAQSFIERMTNFDKNLPNEKVLPKHSLLYEYFTVYNELTKVKYVTEGMRKPAFLSGEQKKAIVDLLFKTNRKVTVKQLKEDYFKKIECFDSVEISGVEDRFNASLGTYHDLLKIIKDKDFLDNEENEDILEDIVLTLTLFEDREMIEERLKTYAHLFDDKVMKQLKRRRYTGWGRLSRKLINGIRDKQSGKTILDFLKSDGFANRNFMQLIHDDSLTFKEDIQKAQVSGQGDSLHEHIANLAGSPAIKKGILQTVKVVDELVKVMGRHKPENIVIEMARENQTTQKGQKNSRERMKRIEEGIKELGSQILKEHPVENTQLQNEKLYLYYLQNGRDMYVDQELDINRLSDYDVDHIVPQSFLKDDSIDNKVLTRSDKARGKSDNVPSEEVVKKMKNYWRQLLNAKLITQRKFDNLTKAERGGLSELDKAGFIKRQLVETRQITKHVAQILDSRMNTKYDENDKLIREVKVITLKSKLVSDFRKDFQFYKVREINNYHHAHDAYLNAVVGTALIKKYPKLESEFVYGDYKVYDVRKMIAKSEQEIGKATAKYFFYSNIMNFFKTEITLANGEIRKRPLIETNGETGEIVWDKGRDFATVRKVLSMPQVNIVKKTEVQTGGFSKESILPKRNSDKLIARKKDWDPKKYGGFDSPTVAYSVLVVAKVEKGKSKKLKSVKELLGITIMERSSFEKNPIDFLEAKGYKEVKKDLIIKLPKYSLFELENGRKRMLASAGELQKGNELALPSKYVNFLYLASHYEKLKGSPEDNEQKQLFVEQHKHYLDEIIEQISEFSKRVILADANLDKVLSAYNKHRDKPIREQAENIIHLFTLTNLGAPAAFKYFDTTIDRKRYTSTKEVLDATLIHQSITGLYETRIDLSQLGGDGGEAAAKEAAAKGGVLNLEEEYRLHEKPVPSSIDPSWLQLFPTVWAERAGMGLANQVPPVVVELRSGASPVAVRQYPMSKEAREGIRPHIQRFLDLGVLVPCQSPWNTPLLPVKKPGTNDYRPVQDLREINKRVQDIHPTVPNPYNLLSSLPPSHTWYSVLDLKDAFFCLKLHPNSQPLFAFEWRDPEKGNTGQLTWTRLPQGFKNSPTLFNEALHRDLAPFRALNPQVVLLQYVDDLLVAAPTYRDCKEGTQKLLQELSKLGYRVSAKKAQLCQKEVTYLGYLLKEGKRWLTPARKATVMKIPPPTTPRQVREFLGTAGFCRLWIPGFASLAAPLYPLTKPSIPFIWTEEHQKAFDRIKEALLSAPALALPDLTKPFTLYVDERAGVARGVLTQTLGPWRRPVAYLSKKLDPVASGWPTCLKAVAAVALLLKDADKLTLGQNVTVIASHSLESIVRQPPDRWMTNARMTHYQSLLLNERVSFAPPAVLNPATLLPVESEATPVHRCSEILAEETGTRRDLKDQPLPGVPAWYTDGSSFIAEGKRRAGAAIVDGKRTVWASSLPEGTSAQKAELVALTQALRLAEGKDINIYTDSRYAFATAHIHGAIYKQRGWLTSAGKDIKNKEEILALLEAIHLPKRVAIIHCPGHQKGNDPVATGNRRADEAAKQAALSTRVLAETTKPAGKRTADGSEFEKRTADGSEFESPKKKAKVE

SEQ ID NO: 834 - protein, 2094 aa, synthetic construct
MPAAKRVKLDGGDKKYSIGLDIGTNSVGWAVITDEYKVPSKKFKVLGNTDRHSIKKNLIGALLFDSGETAEATRLKRTARRRYTRRKNRICYLQEIFSNEMAKVDDSFFHRLEESFLVEEDKKHERHPIFGNIVDEVAYHEKYPTIYHLRKKLVDSTDKADLRLIYLALAHMIKFRGHFLIEGDLNPDNSDVDKLFIQLVQTYNQLFEENPINASGVDAKAILSARLSKSRRLENLIAQLPGEKKNGLFGNLIALSLGLTPNFKSNFDLAEDAKLQLSKDTYDDDLDNLLAQIGDQYADLFLAAKNLSDAILLSDILRVNTEITKAPLSASMIKRYDEHHQDLTLLKALVRQQLPEKYKEIFFDQSKNGYAGYIDGGASQEEFYKFIKPILEKMDGTEELLVKLNREDLLRKQRTFDNGSIPHQIHLGELHAILRRQEDFYPFLKDNREKIEKILTFRIPYYVGPLARGNSRFAWMTRKSEETITPWNFEEVVDKGASAQSFIERMTNFDKNLPNEKVLPKHSLLYEYFTVYNELTKVKYVTEGMRKPAFLSGEQKKAIVDLLFKTNRKVTVKQLKEDYFKKIECFDSVEISGVEDRFNASLGTYHDLLKIIKDKDFLDNEENEDILEDIVLTLTLFEDREMIEERLKTYAHLFDDKVMKQLKRRRYTGWGRLSRKLINGIRDKQSGKTILDFLKSDGFANRNFMQLIHDDSLTFKEDIQKAQVSGQGDSLHEHIANLAGSPAIKKGILQTVKVVDELVKVMGRHKPENIVIEMARENQTTQKGQKNSRERMKRIEEGIKELGSQILKEHPVENTQLQNEKLYLYYLQNGRDMYVDQELDINRLSDYDVDHIVPQSFLKDDSIDNKVLTRSDKARGKSDNVPSEEVVKKMKNYWRQLLNAKLITQRKFDNLTKAERGGLSELDKAGFIKRQLVETRQITKHVAQILDSRMNTKYDENDKLIREVKVITLKSKLVSDFRKDFQFYKVREINNYHHAHDAYLNAVVGTALIKKYPKLESEFVYGDYKVYDVRKMIAKSEQEIGKATAKYFFYSNIMNFFKTEITLANGEIRKRPLIETNGETGEIVWDKGRDFATVRKVLSMPQVNIVKKTEVQTGGFSKESILPKRNSDKLIARKKDWDPKKYGGFDSPTVAYSVLVVAKVEKGKSKKLKSVKELLGITIMERSSFEKNPIDFLEAKGYKEVKKDLIIKLPKYSLFELENGRKRMLASAGELQKGNELALPSKYVNFLYLASHYEKLKGSPEDNEQKQLFVEQHKHYLDEIIEQISEFSKRVILADANLDKVLSAYNKHRDKPIREQAENIIHLFTLTNLGAPAAFKYFDTTIDRKRYTSTKEVLDATLIHQSITGLYETRIDLSQLGGDGGEAAAKPAPGSSGGVLNLEEEYRLHEKPVPSSIDPSWLQLFPTVWAERAGMGLANQVPPVVVELRSGASPVAVRQYPMSKEAREGIRPHIQRFLDLGVLVPCQSPWNTPLLPVKKPGTNDYRPVQDLREINKRVQDIHPTVPNPYNLLSSLPPSHTWYSVLDLKDAFFCLKLHPNSQPLFAFEWRDPEKGNTGQLTWTRLPQGFKNSPTLFNEALHRDLAPFRALNPQVVLLQYVDDLLVAAPTYRDCKEGTQKLLQELSKLGYRVSAKKAQLCQKEVTYLGYLLKEGKRWLTPARKATVMKIPPPTTPRQVREFLGTAGFCRLWIPGFASLAAPLYPLTKPSIPFIWTEEHQKAFDRIKEALLSAPALALPDLTKPFTLYVDERAGVARGVLTQTLGPWRRPVAYLSKKLDPVASGWPTCLKAVAAVALLLKDADKLTLGQNVTVIASHSLESIVRQPPDRWMTNARMTHYQSLLLNERVSFAPPAVLNPATLLPVESEATPVHRCSEILAEETGTRRDLKDQPLPGVPAWYTDGSSFIAEGKRRAGAAIVDGKRTVWASSLPEGTSAQKAELVALTQALRLAEGKDINIYTDSRYAFATAHIHGAIYKQRGWLTSAGKDIKNKEEILALLEAIHLPKRVAIIHCPGHQKGNDPVATGNRRADEAAKQAALSTRVLAETTKPAGKRTADGSEFEKRTADGSEFESPKKKAKVE

SEQ ID NO: 835 - protein, 2092 aa, synthetic construct
MPAAKRVKLDGGDKKYSIGLDIGTNSVGWAVITDEYKVPSKKFKVLGNTDRHSIKKNLIGALLFDSGETAEATRLKRTARRRYTRRKNRICYLQEIFSNEMAKVDDSFFHRLEESFLVEEDKKHERHPIFGNIVDEVAYHEKYPTIYHLRKKLVDSTDKADLRLIYLALAHMIKFRGHFLIEGDLNPDNSDVDKLFIQLVQTYNQLFEENPINASGVDAKAILSARLSKSRRLENLIAQLPGEKKNGLFGNLIALSLGLTPNFKSNFDLAEDAKLQLSKDTYDDDLDNLLAQIGDQYADLFLAAKNLSDAILLSDILRVNTEITKAPLSASMIKRYDEHHQDLTLLKALVRQQLPEKYKEIFFDQSKNGYAGYIDGGASQEEFYKFIKPILEKMDGTEELLVKLNREDLLRKQRTFDNGSIPHQIHLGELHAILRRQEDFYPFLKDNREKIEKILTFRIPYYVGPLARGNSRFAWMTRKSEETITPWNFEEVVDKGASAQSFIERMTNFDKNLPNEKVLPKHSLLYEYFTVYNELTKVKYVTEGMRKPAFLSGEQKKAIVDLLFKTNRKVTVKQLKEDYFKKIECFDSVEISGVEDRFNASLGTYHDLLKIIKDKDFLDNEENEDILEDIVLTLTLFEDREMIEERLKTYAHLFDDKVMKQLKRRRYTGWGRLSRKLINGIRDKQSGKTILDFLKSDGFANRNFMQLIHDDSLTFKEDIQKAQVSGQGDSLHEHIANLAGSPAIKKGILQTVKVVDELVKVMGRHKPENIVIEMARENQTTQKGQKNSRERMKRIEEGIKELGSQILKEHPVENTQLQNEKLYLYYLQNGRDMYVDQELDINRLSDYDVDHIVPQSFLKDDSIDNKVLTRSDKARGKSDNVPSEEVVKKMKNYWRQLLNAKLITQRKFDNLTKAERGGLSELDKAGFIKRQLVETRQITKHVAQILDSRMNTKYDENDKLIREVKVITLKSKLVSDFRKDFQFYKVREINNYHHAHDAYLNAVVGTALIKKYPKLESEFVYGDYKVYDVRKMIAKSEQEIGKATAKYFFYSNIMNFFKTEITLANGEIRKRPLIETNGETGEIVWDKGRDFATVRKVLSMPQVNIVKKTEVQTGGFSKESILPKRNSDKLIARKKDWDPKKYGGFDSPTVAYSVLVVAKVEKGKSKKLKSVKELLGITIMERSSFEKNPIDFLEAKGYKEVKKDLIIKLPKYSLFELENGRKRMLASAGELQKGNELALPSKYVNFLYLASHYEKLKGSPEDNEQKQLFVEQHKHYLDEIIEQISEFSKRVILADANLDKVLSAYNKHRDKPIREQAENIIHLFTLTNLGAPAAFKYFDTTIDRKRYTSTKEVLDATLIHQSITGLYETRIDLSQLGGDGGGSSGSSGSSGGVLNLEEEYRLHEKPVPSSIDPSWLQLFPTVWAERAGMGLANQVPPVVVELRSGASPVAVRQYPMSKEAREGIRPHIQRFLDLGVLVPCQSPWNTPLLPVKKPGTNDYRPVQDLREINKRVQDIHPTVPNPYNLLSSLPPSHTWYSVLDLKDAFFCLKLHPNSQPLFAFEWRDPEKGNTGQLTWTRLPQGFKNSPTLFNEALHRDLAPFRALNPQVVLLQYVDDLLVAAPTYRDCKEGTQKLLQELSKLGYRVSAKKAQLCQKEVTYLGYLLKEGKRWLTPARKATVMKIPPPTTPRQVREFLGTAGFCRLWIPGFASLAAPLYPLTKPSIPFIWTEEHQKAFDRIKEALLSAPALALPDLTKPFTLYVDERAGVARGVLTQTLGPWRRPVAYLSKKLDPVASGWPTCLKAVAAVALLLKDADKLTLGQNVTVIASHSLESIVRQPPDRWMTNARMTHYQSLLLNERVSFAPPAVLNPATLLPVESEATPVHRCSEILAEETGTRRDLKDQPLPGVPAWYTDGSSFIAEGKRRAGAAIVDGKRTVWASSLPEGTSAQKAELVALTQALRLAEGKDINIYTDSRYAFATAHIHGAIYKQRGWLTSAGKDIKNKEEILALLEAIHLPKRVAIIHCPGHQKGNDPVATGNRRADEAAKQAALSTRVLAETTKPAGKRTADGSEFEKRTADGSEFESPKKKAKVE

SEQ ID NO: 836 - protein, 2091 aa, synthetic construct
MPAAKRVKLDGGDKKYSIGLDIGTNSVGWAVITDEYKVPSKKFKVLGNTDRHSIKKNLIGALLFDSGETAEATRLKRTARRRYTRRKNRICYLQEIFSNEMAKVDDSFFHRLEESFLVEEDKKHERHPIFGNIVDEVAYHEKYPTIYHLRKKLVDSTDKADLRLIYLALAHMIKFRGHFLIEGDLNPDNSDVDKLFIQLVQTYNQLFEENPINASGVDAKAILSARLSKSRRLENLIAQLPGEKKNGLFGNLIALSLGLTPNFKSNFDLAEDAKLQLSKDTYDDDLDNLLAQIGDQYADLFLAAKNLSDAILLSDILRVNTEITKAPLSASMIKRYDEHHQDLTLLKALVRQQLPEKYKEIFFDQSKNGYAGYIDGGASQEEFYKFIKPILEKMDGTEELLVKLNREDLLRKQRTFDNGSIPHQIHLGELHAILRRQEDFYPFLKDNREKIEKILTFRIPYYVGPLARGNSRFAWMTRKSEETITPWNFEEVVDKGASAQSFIERMTNFDKNLPNEKVLPKHSLLYEYFTVYNELTKVKYVTEGMRKPAFLSGEQKKAIVDLLFKTNRKVTVKQLKEDYFKKIECFDSVEISGVEDRFNASLGTYHDLLKIIKDKDFLDNEENEDILEDIVLTLTLFEDREMIEERLKTYAHLFDDKVMKQLKRRRYTGWGRLSRKLINGIRDKQSGKTILDFLKSDGFANRNFMQLIHDDSLTFKEDIQKAQVSGQGDSLHEHIANLAGSPAIKKGILQTVKVVDELVKVMGRHKPENIVIEMARENQTTQKGQKNSRERMKRIEEGIKELGSQILKEHPVENTQLQNEKLYLYYLQNGRDMYVDQELDINRLSDYDVDHIVPQSFLKDDSIDNKVLTRSDKARGKSDNVPSEEVVKKMKNYWRQLLNAKLITQRKFDNLTKAERGGLSELDKAGFIKRQLVETRQITKHVAQILDSRMNTKYDENDKLIREVKVITLKSKLVSDFRKDFQFYKVREINNYHHAHDAYLNAVVGTALIKKYPKLESEFVYGDYKVYDVRKMIAKSEQEIGKATAKYFFYSNIMNFFKTEITLANGEIRKRPLIETNGETGEIVWDKGRDFATVRKVLSMPQVNIVKKTEVQTGGFSKESILPKRNSDKLIARKKDWDPKKYGGFDSPTVAYSVLVVAKVEKGKSKKLKSVKELLGITIMERSSFEKNPIDFLEAKGYKEVKKDLIIKLPKYSLFELENGRKRMLASAGELQKGNELALPSKYVNFLYLASHYEKLKGSPEDNEQKQLFVEQHKHYLDEIIEQISEFSKRVILADANLDKVLSAYNKHRDKPIREQAENIIHLFTLTNLGAPAAFKYFDTTIDRKRYTSTKEVLDATLIHQSITGLYETRIDLSQLGGDGGEAAAKGSSGGVLNLEEEYRLHEKPVPSSIDPSWLQLFPTVWAERAGMGLANQVPPVVVELRSGASPVAVRQYPMSKEAREGIRPHIQRFLDLGVLVPCQSPWNTPLLPVKKPGTNDYRPVQDLREINKRVQDIHPTVPNPYNLLSSLPPSHTWYSVLDLKDAFFCLKLHPNSQPLFAFEWRDPEKGNTGQLTWTRLPQGFKNSPTLFNEALHRDLAPFRALNPQVVLLQYVDDLLVAAPTYRDCKEGTQKLLQELSKLGYRVSAKKAQLCQKEVTYLGYLLKEGKRWLTPARKATVMKIPPPTTPRQVREFLGTAGFCRLWIPGFASLAAPLYPLTKPSIPFIWTEEHQKAFDRIKEALLSAPALALPDLTKPFTLYVDERAGVARGVLTQTLGPWRRPVAYLSKKLDPVASGWPTCLKAVAAVALLLKDADKLTLGQNVTVIASHSLESIVRQPPDRWMTNARMTHYQSLLLNERVSFAPPAVLNPATLLPVESEATPVHRCSEILAEETGTRRDLKDQPLPGVPAWYTDGSSFIAEGKRRAGAAIVDGKRTVWASSLPEGTSAQKAELVALTQALRLAEGKDINIYTDSRYAFATAHIHGAIYKQRGWLTSAGKDIKNKEEILALLEAIHLPKRVAIIHCPGHQKGNDPVATGNRRADEAAKQAALSTRVLAETTKPAGKRTADGSEFEKRTADGSEFESPKKKAKVE

SEQ ID NO: 837 - protein, 2091 aa, synthetic construct
MPAAKRVKLDGGDKKYSIGLDIGTNSVGWAVITDEYKVPSKKFKVLGNTDRHSIKKNLIGALLFDSGETAEATRLKRTARRRYTRRKNRICYLQEIFSNEMAKVDDSFFHRLEESFLVEEDKKHERHPIFGNIVDEVAYHEKYPTIYHLRKKLVDSTDKADLRLIYLALAHMIKFRGHFLIEGDLNPDNSDVDKLFIQLVQTYNQLFEENPINASGVDAKAILSARLSKSRRLENLIAQLPGEKKNGLFGNLIALSLGLTPNFKSNFDLAEDAKLQLSKDTYDDDLDNLLAQIGDQYADLFLAAKNLSDAILLSDILRVNTEITKAPLSASMIKRYDEHHQDLTLLKALVRQQLPEKYKEIFFDQSKNGYAGYIDGGASQEEFYKFIKPILEKMDGTEELLVKLNREDLLRKQRTFDNGSIPHQIHLGELHAILRRQEDFYPFLKDNREKIEKILTFRIPYYVGPLARGNSRFAWMTRKSEETITPWNFEEVVDKGASAQSFIERMTNFDKNLPNEKVLPKHSLLYEYFTVYNELTKVKYVTEGMRKPAFLSGEQKKAIVDLLFKTNRKVTVKQLKEDYFKKIECFDSVEISGVEDRFNASLGTYHDLLKIIKDKDFLDNEENEDILEDIVLTLTLFEDREMIEERLKTYAHLFDDKVMKQLKRRRYTGWGRLSRKLINGIRDKQSGKTILDFLKSDGFANRNFMQLIHDDSLTFKEDIQKAQVSGQGDSLHEHIANLAGSPAIKKGILQTVKVVDELVKVMGRHKPENIVIEMARENQTTQKGQKNSRERMKRIEEGIKELGSQILKEHPVENTQLQNEKLYLYYLQNGRDMYVDQELDINRLSDYDVDHIVPQSFLKDDSIDNKVLTRSDKARGKSDNVPSEEVVKKMKNYWRQLLNAKLITQRKFDNLTKAERGGLSELDKAGFIKRQLVETRQITKHVAQILDSRMNTKYDENDKLIREVKVITLKSKLVSDFRKDFQFYKVREINNYHHAHDAYLNAVVGTALIKKYPKLESEFVYGDYKVYDVRKMIAKSEQEIGKATAKYFFYSNIMNFFKTEITLANGEIRKRPLIETNGETGEIVWDKGRDFATVRKVLSMPQVNIVKKTEVQTGGFSKESILPKRNSDKLIARKKDWDPKKYGGFDSPTVAYSVLVVAKVEKGKSKKLKSVKELLGITIMERSSFEKNPIDFLEAKGYKEVKKDLIIKLPKYSLFELENGRKRMLASAGELQKGNELALPSKYVNFLYLASHYEKLKGSPEDNEQKQLFVEQHKHYLDEIIEQISEFSKRVILADANLDKVLSAYNKHRDKPIREQAENIIHLFTLTNLGAPAAFKYFDTTIDRKRYTSTKEVLDATLIHQSITGLYETRIDLSQLGGDGGGGGEAAAKGGVLNLEEEYRLHEKPVPSSIDPSWLQLFPTVWAERAGMGLANQVPPVVVELRSGASPVAVRQYPMSKEAREGIRPHIQRFLDLGVLVPCQSPWNTPLLPVKKPGTNDYRPVQDLREINKRVQDIHPTVPNPYNLLSSLPPSHTWYSVLDLKDAFFCLKLHPNSQPLFAFEWRDPEKGNTGQLTWTRLPQGFKNSPTLFNEALHRDLAPFRALNPQVVLLQYVDDLLVAAPTYRDCKEGTQKLLQELSKLGYRVSAKKAQLCQKEVTYLGYLLKEGKRWLTPARKATVMKIPPPTTPRQVREFLGTAGFCRLWIPGFASLAAPLYPLTKPSIPFIWTEEHQKAFDRIKEALLSAPALALPDLTKPFTLYVDERAGVARGVLTQTLGPWRRPVAYLSKKLDPVASGWPTCLKAVAAVALLLKDADKLTLGQNVTVIASHSLESIVRQPPDRWMTNARMTHYQSLLLNERVSFAPPAVLNPATLLPVESEATPVHRCSEILAEETGTRRDLKDQPLPGVPAWYTDGSSFIAEGKRRAGAAIVDGKRTVWASSLPEGTSAQKAELVALTQALRLAEGKDINIYTDSRYAFATAHIHGAIYKQRGWLTSAGKDIKNKEEILALLEAIHLPKRVAIIHCPGHQKGNDPVATGNRRADEAAKQAALSTRVLAETTKPAGKRTADGSEFEKRTADGSEFESPKKKAKVE

SEQ ID NO: 838 - protein, 2091 aa, synthetic construct
MPAAKRVKLDGGDKKYSIGLDIGTNSVGWAVITDEYKVPSKKFKVLGNTDRHSIKKNLIGALLFDSGETAEATRLKRTARRRYTRRKNRICYLQEIFSNEMAKVDDSFFHRLEESFLVEEDKKHERHPIFGNIVDEVAYHEKYPTIYHLRKKLVDSTDKADLRLIYLALAHMIKFRGHFLIEGDLNPDNSDVDKLFIQLVQTYNQLFEENPINASGVDAKAILSARLSKSRRLENLIAQLPGEKKNGLFGNLIALSLGLTPNFKSNFDLAEDAKLQLSKDTYDDDLDNLLAQIGDQYADLFLAAKNLSDAILLSDILRVNTEITKAPLSASMIKRYDEHHQDLTLLKALVRQQLPEKYKEIFFDQSKNGYAGYIDGGASQEEFYKFIKPILEKMDGTEELLVKLNREDLLRKQRTFDNGSIPHQIHLGELHAILRRQEDFYPFLKDNREKIEKILTFRIPYYVGPLARGNSRFAWMTRKSEETITPWNFEEVVDKGASAQSFIERMTNFDKNLPNEKVLPKHSLLYEYFTVYNELTKVKYVTEGMRKPAFLSGEQKKAIVDLLFKTNRKVTVKQLKEDYFKKIECFDSVEISGVEDRFNASLGTYHDLLKIIKDKDFLDNEENEDILEDIVLTLTLFEDREMIEERLKTYAHLFDDKVMKQLKRRRYTGWGRLSRKLINGIRDKQSGKTILDFLKSDGFANRNFMQLIHDDSLTFKEDIQKAQVSGQGDSLHEHIANLAGSPAIKKGILQTVKVVDELVKVMGRHKPENIVIEMARENQTTQKGQKNSRERMKRIEEGIKELGSQILKEHPVENTQLQNEKLYLYYLQNGRDMYVDQELDINRLSDYDVDHIVPQSFLKDDSIDNKVLTRSDKARGKSDNVPSEEVVKKMKNYWRQLLNAKLITQRKFDNLTKAERGGLSELDKAGFIKRQLVETRQITKHVAQILDSRMNTKYDENDKLIREVKVITLKSKLVSDFRKDFQFYKVREINNYHHAHDAYLNAVVGTALIKKYPKLESEFVYGDYKVYDVRKMIAKSEQEIGKATAKYFFYSNIMNFFKTEITLANGEIRKRPLIETNGETGEIVWDKGRDFATVRKVLSMPQVNIVKKTEVQTGGFSKESILPKRNSDKLIARKKDWDPKKYGGFDSPTVAYSVLVVAKVEKGKSKKLKSVKELLGITIMERSSFEKNPIDFLEAKGYKEVKKDLIIKLPKYSLFELENGRKRMLASAGELQKGNELALPSKYVNFLYLASHYEKLKGSPEDNEQKQLFVEQHKHYLDEIIEQISEFSKRVILADANLDKVLSAYNKHRDKPIREQAENIIHLFTLTNLGAPAAFKYFDTTIDRKRYTSTKEVLDATLIHQSITGLYETRIDLSQLGGDGGGSSEAAAKGGVLNLEEEYRLHEKPVPSSIDPSWLQLFPTVWAERAGMGLANQVPPVVVELRSGASPVAVRQYPMSKEAREGIRPHIQRFLDLGVLVPCQSPWNTPLLPVKKPGTNDYRPVQDLREINKRVQDIHPTVPNPYNLLSSLPPSHTWYSVLDLKDAFFCLKLHPNSQPLFAFEWRDPEKGNTGQLTWTRLPQGFKNSPTLFNEALHRDLAPFRALNPQVVLLQYVDDLLVAAPTYRDCKEGTQKLLQELSKLGYRVSAKKAQLCQKEVTYLGYLLKEGKRWLTPARKATVMKIPPPTTPRQVREFLGTAGFCRLWIPGFASLAAPLYPLTKPSIPFIWTEEHQKAFDRIKEALLSAPALALPDLTKPFTLYVDERAGVARGVLTQTLGPWRRPVAYLSKKLDPVASGWPTCLKAVAAVALLLKDADKLTLGQNVTVIASHSLESIVRQPPDRWMTNARMTHYQSLLLNERVSFAPPAVLNPATLLPVESEATPVHRCSEILAEETGTRRDLKDQPLPGVPAWYTDGSSFIAEGKRRAGAAIVDGKRTVWASSLPEGTSAQKAELVALTQALRLAEGKDINIYTDSRYAFATAHIHGAIYKQRGWLTSAGKDIKNKEEILALLEAIHLPKRVAIIHCPGHQKGNDPVATGNRRADEAAKQAALSTRVLAETTKPAGKRTADGSEFEKRTADGSEFESPKKKAKVE

SEQ ID NO: 839 - protein, 2094 aa, synthetic construct
MPAAKRVKLDGGDKKYSIGLDIGTNSVGWAVITDEYKVPSKKFKVLGNTDRHSIKKNLIGALLFDSGETAEATRLKRTARRRYTRRKNRICYLQEIFSNEMAKVDDSFFHRLEESFLVEEDKKHERHPIFGNIVDEVAYHEKYPTIYHLRKKLVDSTDKADLRLIYLALAHMIKFRGHFLIEGDLNPDNSDVDKLFIQLVQTYNQLFEENPINASGVDAKAILSARLSKSRRLENLIAQLPGEKKNGLFGNLIALSLGLTPNFKSNFDLAEDAKLQLSKDTYDDDLDNLLAQIGDQYADLFLAAKNLSDAILLSDILRVNTEITKAPLSASMIKRYDEHHQDLTLLKALVRQQLPEKYKEIFFDQSKNGYAGYIDGGASQEEFYKFIKPILEKMDGTEELLVKLNREDLLRKQRTFDNGSIPHQIHLGELHAILRRQEDFYPFLKDNREKIEKILTFRIPYYVGPLARGNSRFAWMTRKSEETITPWNFEEVVDKGASAQSFIERMTNFDKNLPNEKVLPKHSLLYEYFTVYNELTKVKYVTEGMRKPAFLSGEQKKAIVDLLFKTNRKVTVKQLKEDYFKKIECFDSVEISGVEDRFNASLGTYHDLLKIIKDKDFLDNEENEDILEDIVLTLTLFEDREMIEERLKTYAHLFDDKVMKQLKRRRYTGWGRLSRKLINGIRDKQSGKTILDFLKSDGFANRNFMQLIHDDSLTFKEDIQKAQVSGQGDSLHEHIANLAGSPAIKKGILQTVKVVDELVKVMGRHKPENIVIEMARENQTTQKGQKNSRERMKRIEEGIKELGSQILKEHPVENTQLQNEKLYLYYLQNGRDMYVDQELDINRLSDYDVDHIVPQSFLKDDSIDNKVLTRSDKARGKSDNVPSEEVVKKMKNYWRQLLNAKLITQRKFDNLTKAERGGLSELDKAGFIKRQLVETRQITKHVAQILDSRMNTKYDENDKLIREVKVITLKSKLVSDFRKDFQFYKVREINNYHHAHDAYLNAVVGTALIKKYPKLESEFVYGDYKVYDVRKMIAKSEQEIGKATAKYFFYSNIMNFFKTEITLANGEIRKRPLIETNGETGEIVWDKGRDFATVRKVLSMPQVNIVKKTEVQTGGFSKESILPKRNSDKLIARKKDWDPKKYGGFDSPTVAYSVLVVAKVEKGKSKKLKSVKELLGITIMERSSFEKNPIDFLEAKGYKEVKKDLIIKLPKYSLFELENGRKRMLASAGELQKGNELALPSKYVNFLYLASHYEKLKGSPEDNEQKQLFVEQHKHYLDEIIEQISEFSKRVILADANLDKVLSAYNKHRDKPIREQAENIIHLFTLTNLGAPAAFKYFDTTIDRKRYTSTKEVLDATLIHQSITGLYETRIDLSQLGGDGGGSSPAPEAAAKGGVLNLEEEYRLHEKPVPSSIDPSWLQLFPTVWAERAGMGLANQVPPVVVELRSGASPVAVRQYPMSKEAREGIRPHIQRFLDLGVLVPCQSPWNTPLLPVKKPGTNDYRPVQDLREINKRVQDIHPTVPNPYNLLSSLPPSHTWYSVLDLKDAFFCLKLHPNSQPLFAFEWRDPEKGNTGQLTWTRLPQGFKNSPTLFNEALHRDLAPFRALNPQVVLLQYVDDLLVAAPTYRDCKEGTQKLLQELSKLGYRVSAKKAQLCQKEVTYLGYLLKEGKRWLTPARKATVMKIPPPTTPRQVREFLGTAGFCRLWIPGFASLAAPLYPLTKPSIPFIWTEEHQKAFDRIKEALLSAPALALPDLTKPFTLYVDERAGVARGVLTQTLGPWRRPVAYLSKKLDPVASGWPTCLKAVAAVALLLKDADKLTLGQNVTVIASHSLESIVRQPPDRWMTNARMTHYQSLLLNERVSFAPPAVLNPATLLPVESEATPVHRCSEILAEETGTRRDLKDQPLPGVPAWYTDGSSFIAEGKRRAGAAIVDGKRTVWASSLPEGTSAQKAELVALTQALRLAEGKDINIYTDSRYAFATAHIHGAIYKQRGWLTSAGKDIKNKEEILALLEAIHLPKRVAIIHCPGHQKGNDPVATGNRRADEAAKQAALSTRVLAETTKPAGKRTADGSEFEKRTADGSEFESPKKKAKVE

SEQ ID NO: 840 - protein, 2092 aa, synthetic construct
MPAAKRVKLDGGDKKYSIGLDIGTNSVGWAVITDEYKVPSKKFKVLGNTDRHSIKKNLIGALLFDSGETAEATRLKRTARRRYTRRKNRICYLQEIFSNEMAKVDDSFFHRLEESFLVEEDKKHERHPIFGNIVDEVAYHEKYPTIYHLRKKLVDSTDKADLRLIYLALAHMIKFRGHFLIEGDLNPDNSDVDKLFIQLVQTYNQLFEENPINASGVDAKAILSARLSKSRRLENLIAQLPGEKKNGLFGNLIALSLGLTPNFKSNFDLAEDAKLQLSKDTYDDDLDNLLAQIGDQYADLFLAAKNLSDAILLSDILRVNTEITKAPLSASMIKRYDEHHQDLTLLKALVRQQLPEKYKEIFFDQSKNGYAGYIDGGASQEEFYKFIKPILEKMDGTEELLVKLNREDLLRKQRTFDNGSIPHQIHLGELHAILRRQEDFYPFLKDNREKIEKILTFRIPYYVGPLARGNSRFAWMTRKSEETITPWNFEEVVDKGASAQSFIERMTNFDKNLPNEKVLPKHSLLYEYFTVYNELTKVKYVTEGMRKPAFLSGEQKKAIVDLLFKTNRKVTVKQLKEDYFKKIECFDSVEISGVEDRFNASLGTYHDLLKIIKDKDFLDNEENEDILEDIVLTLTLFEDREMIEERLKTYAHLFDDKVMKQLKRRRYTGWGRLSRKLINGIRDKQSGKTILDFLKSDGFANRNFMQLIHDDSLTFKEDIQKAQVSGQGDSLHEHIANLAGSPAIKKGILQTVKVVDELVKVMGRHKPENIVIEMARENQTTQKGQKNSRERMKRIEEGIKELGSQILKEHPVENTQLQNEKLYLYYLQNGRDMYVDQELDINRLSDYDVDHIVPQSFLKDDSIDNKVLTRSDKARGKSDNVPSEEVVKKMKNYWRQLLNAKLITQRKFDNLTKAERGGLSELDKAGFIKRQLVETRQITKHVAQILDSRMNTKYDENDKLIREVKVITLKSKLVSDFRKDFQFYKVREINNYHHAHDAYLNAVVGTALIKKYPKLESEFVYGDYKVYDVRKMIAKSEQEIGKATAKYFFYSNIMNFFKTEITLANGEIRKRPLIETNGETGEIVWDKGRDFATVRKVLSMPQVNIVKKTEVQTGGFSKESILPKRNSDKLIARKKDWDPKKYGGFDSPTVAYSVLVVAKVEKGKSKKLKSVKELLGITIMERSSFEKNPIDFLEAKGYKEVKKDLIIKLPKYSLFELENGRKRMLASAGELQKGNELALPSKYVNFLYLASHYEKLKGSPEDNEQKQLFVEQHKHYLDEIIEQISEFSKRVILADANLDKVLSAYNKHRDKPIREQAENIIHLFTLTNLGAPAAFKYFDTTIDRKRYTSTKEVLDATLIHQSITGLYETRIDLSQLGGDGGGSSPAPGGSGGVLNLEEEYRLHEKPVPSSIDPSWLQLFPTVWAERAGMGLANQVPPVVVELRSGASPVAVRQYPMSKEAREGIRPHIQRFLDLGVLVPCQSPWNTPLLPVKKPGTNDYRPVQDLREINKRVQDIHPTVPNPYNLLSSLPPSHTWYSVLDLKDAFFCLKLHPNSQPLFAFEWRDPEKGNTGQLTWTRLPQGFKNSPTLFNEALHRDLAPFRALNPQVVLLQYVDDLLVAAPTYRDCKEGTQKLLQELSKLGYRVSAKKAQLCQKEVTYLGYLLKEGKRWLTPARKATVMKIPPPTTPRQVREFLGTAGFCRLWIPGFASLAAPLYPLTKPSIPFIWTEEHQKAFDRIKEALLSAPALALPDLTKPFTLYVDERAGVARGVLTQTLGPWRRPVAYLSKKLDPVASGWPTCLKAVAAVALLLKDADKLTLGQNVTVIASHSLESIVRQPPDRWMTNARMTHYQSLLLNERVSFAPPAVLNPATLLPVESEATPVHRCSEILAEETGTRRDLKDQPLPGVPAWYTDGSSFIAEGKRRAGAAIVDGKRTVWASSLPEGTSAQKAELVALTQALRLAEGKDINIYTDSRYAFATAHIHGAIYKQRGWLTSAGKDIKNKEEILALLEAIHLPKRVAIIHCPGHQKGNDPVATGNRRADEAAKQAALSTRVLAETTKPAGKRTADGSEFEKRTADGSEFESPKKKAKVE

SEQ ID NO: 841 - protein, 2094 aa, synthetic construct
MPAAKRVKLDGGDKKYSIGLDIGTNSVGWAVITDEYKVPSKKFKVLGNTDRHSIKKNLIGALLFDSGETAEATRLKRTARRRYTRRKNRICYLQEIFSNEMAKVDDSFFHRLEESFLVEEDKKHERHPIFGNIVDEVAYHEKYPTIYHLRKKLVDSTDKADLRLIYLALAHMIKFRGHFLIEGDLNPDNSDVDKLFIQLVQTYNQLFEENPINASGVDAKAILSARLSKSRRLENLIAQLPGEKKNGLFGNLIALSLGLTPNFKSNFDLAEDAKLQLSKDTYDDDLDNLLAQIGDQYADLFLAAKNLSDAILLSDILRVNTEITKAPLSASMIKRYDEHHQDLTLLKALVRQQLPEKYKEIFFDQSKNGYAGYIDGGASQEEFYKFIKPILEKMDGTEELLVKLNREDLLRKQRTFDNGSIPHQIHLGELHAILRRQEDFYPFLKDNREKIEKILTFRIPYYVGPLARGNSRFAWMTRKSEETITPWNFEEVVDKGASAQSFIERMTNFDKNLPNEKVLPKHSLLYEYFTVYNELTKVKYVTEGMRKPAFLSGEQKKAIVDLLFKTNRKVTVKQLKEDYFKKIECFDSVEISGVEDRFNASLGTYHDLLKIIKDKDFLDNEENEDILEDIVLTLTLFEDREMIEERLKTYAHLFDDKVMKQLKRRRYTGWGRLSRKLINGIRDKQSGKTILDFLKSDGFANRNFMQLIHDDSLTFKEDIQKAQVSGQGDSLHEHIANLAGSPAIKKGILQTVKVVDELVKVMGRHKPENIVIEMARENQTTQKGQKNSRERMKRIEEGIKELGSQILKEHPVENTQLQNEKLYLYYLQNGRDMYVDQELDINRLSDYDVDHIVPQSFLKDDSIDNKVLTRSDKARGKSDNVPSEEVVKKMKNYWRQLLNAKLITQRKFDNLTKAERGGLSELDKAGFIKRQLVETRQITKHVAQILDSRMNTKYDENDKLIREVKVITLKSKLVSDFRKDFQFYKVREINNYHHAHDAYLNAVVGTALIKKYPKLESEFVYGDYKVYDVRKMIAKSEQEIGKATAKYFFYSNIMNFFKTEITLANGEIRKRPLIETNGETGEIVWDKGRDFATVRKVLSMPQVNIVKKTEVQTGGFSKESILPKRNSDKLIARKKDWDPKKYGGFDSPTVAYSVLVVAKVEKGKSKKLKSVKELLGITIMERSSFEKNPIDFLEAKGYKEVKKDLIIKLPKYSLFELENGRKRMLASAGELQKGNELALPSKYVNFLYLASHYEKLKGSPEDNEQKQLFVEQHKHYLDEIIEQISEFSKRVILADANLDKVLSAYNKHRDKPIREQAENIIHLFTLTNLGAPAAFKYFDTTIDRKRYTSTKEVLDATLIHQSITGLYETRIDLSQLGGDGGGGGEAAAKGGSGGVLNLEEEYRLHEKPVPSSIDPSWLQLFPTVWAERAGMGLANQVPPVVVELRSGASPVAVRQYPMSKEAREGIRPHIQRFLDLGVLVPCQSPWNTPLLPVKKPGTNDYRPVQDLREINKRVQDIHPTVPNPYNLLSSLPPSHTWYSVLDLKDAFFCLKLHPNSQPLFAFEWRDPEKGNTGQLTWTRLPQGFKNSPTLFNEALHRDLAPFRALNPQVVLLQYVDDLLVAAPTYRDCKEGTQKLLQELSKLGYRVSAKKAQLCQKEVTYLGYLLKEGKRWLTPARKATVMKIPPPTTPRQVREFLGTAGFCRLWIPGFASLAAPLYPLTKPSIPFIWTEEHQKAFDRIKEALLSAPALALPDLTKPFTLYVDERAGVARGVLTQTLGPWRRPVAYLSKKLDPVASGWPTCLKAVAAVALLLKDADKLTLGQNVTVIASHSLESIVRQPPDRWMTNARMTHYQSLLLNERVSFAPPAVLNPATLLPVESEATPVHRCSEILAEETGTRRDLKDQPLPGVPAWYTDGSSFIAEGKRRAGAAIVDGKRTVWASSLPEGTSAQKAELVALTQALRLAEGKDINIYTDSRYAFATAHIHGAIYKQRGWLTSAGKDIKNKEEILALLEAIHLPKRVAIIHCPGHQKGNDPVATGNRRADEAAKQAALSTRVLAETTKPAGKRTADGSEFEKRTADGSEFESPKKKAKVE

SEQ ID NO: 842 - protein, 2091 aa, synthetic construct
MPAAKRVKLDGGDKKYSIGLDIGTNSVGWAVITDEYKVPSKKFKVLGNTDRHSIKKNLIGALLFDSGETAEATRLKRTARRRYTRRKNRICYLQEIFSNEMAKVDDSFFHRLEESFLVEEDKKHERHPIFGNIVDEVAYHEKYPTIYHLRKKLVDSTDKADLRLIYLALAHMIKFRGHFLIEGDLNPDNSDVDKLFIQLVQTYNQLFEENPINASGVDAKAILSARLSKSRRLENLIAQLPGEKKNGLFGNLIALSLGLTPNFKSNFDLAEDAKLQLSKDTYDDDLDNLLAQIGDQYADLFLAAKNLSDAILLSDILRVNTEITKAPLSASMIKRYDEHHQDLTLLKALVRQQLPEKYKEIFFDQSKNGYAGYIDGGASQEEFYKFIKPILEKMDGTEELLVKLNREDLLRKQRTFDNGSIPHQIHLGELHAILRRQEDFYPFLKDNREKIEKILTFRIPYYVGPLARGNSRFAWMTRKSEETITPWNFEEVVDKGASAQSFIERMTNFDKNLPNEKVLPKHSLLYEYFTVYNELTKVKYVTEGMRKPAFLSGEQKKAIVDLLFKTNRKVTVKQLKEDYFKKIECFDSVEISGVEDRFNASLGTYHDLLKIIKDKDFLDNEENEDILEDIVLTLTLFEDREMIEERLKTYAHLFDDKVMKQLKRRRYTGWGRLSRKLINGIRDKQSGKTILDFLKSDGFANRNFMQLIHDDSLTFKEDIQKAQVSGQGDSLHEHIANLAGSPAIKKGILQTVKVVDELVKVMGRHKPENIVIEMARENQTTQKGQKNSRERMKRIEEGIKELGSQILKEHPVENTQLQNEKLYLYYLQNGRDMYVDQELDINRLSDYDVDHIVPQSFLKDDSIDNKVLTRSDKARGKSDNVPSEEVVKKMKNYWRQLLNAKLITQRKFDNLTKAERGGLSELDKAGFIKRQLVETRQITKHVAQILDSRMNTKYDENDKLIREVKVITLKSKLVSDFRKDFQFYKVREINNYHHAHDAYLNAVVGTALIKKYPKLESEFVYGDYKVYDVRKMIAKSEQEIGKATAKYFFYSNIMNFFKTEITLANGEIRKRPLIETNGETGEIVWDKGRDFATVRKVLSMPQVNIVKKTEVQTGGFSKESILPKRNSDKLIARKKDWDPKKYGGFDSPTVAYSVLVVAKVEKGKSKKLKSVKELLGITIMERSSFEKNPIDFLEAKGYKEVKKDLIIKLPKYSLFELENGRKRMLASAGELQKGNELALPSKYVNFLYLASHYEKLKGSPEDNEQKQLFVEQHKHYLDEIIEQISEFSKRVILADANLDKVLSAYNKHRDKPIREQAENIIHLFTLTNLGAPAAFKYFDTTIDRKRYTSTKEVLDATLIHQSITGLYETRIDLSQLGGDGGGGGGGGGGGGVLNLEEEYRLHEKPVPSSIDPSWLQLFPTVWAERAGMGLANQVPPVVVELRSGASPVAVRQYPMSKEAREGIRPHIQRFLDLGVLVPCQSPWNTPLLPVKKPGTNDYRPVQDLREINKRVQDIHPTVPNPYNLLSSLPPSHTWYSVLDLKDAFFCLKLHPNSQPLFAFEWRDPEKGNTGQLTWTRLPQGFKNSPTLFNEALHRDLAPFRALNPQVVLLQYVDDLLVAAPTYRDCKEGTQKLLQELSKLGYRVSAKKAQLCQKEVTYLGYLLKEGKRWLTPARKATVMKIPPPTTPRQVREFLGTAGFCRLWIPGFASLAAPLYPLTKPSIPFIWTEEHQKAFDRIKEALLSAPALALPDLTKPFTLYVDERAGVARGVLTQTLGPWRRPVAYLSKKLDPVASGWPTCLKAVAAVALLLKDADKLTLGQNVTVIASHSLESIVRQPPDRWMTNARMTHYQSLLLNERVSFAPPAVLNPATLLPVESEATPVHRCSEILAEETGTRRDLKDQPLPGVPAWYTDGSSFIAEGKRRAGAAIVDGKRTVWASSLPEGTSAQKAELVALTQALRLAEGKDINIYTDSRYAFATAHIHGAIYKQRGWLTSAGKDIKNKEEILALLEAIHLPKRVAIIHCPGHQKGNDPVATGNRRADEAAKQAALSTRVLAETTKPAGKRTADGSEFEKRTADGSEFESPKKKAKVE

SEQ ID NO: 843 - protein, 2103 aa, synthetic construct
MPAAKRVKLDGGDKKYSIGLDIGTNSVGWAVITDEYKVPSKKFKVLGNTDRHSIKKNLIGALLFDSGETAEATRLKRTARRRYTRRKNRICYLQEIFSNEMAKVDDSFFHRLEESFLVEEDKKHERHPIFGNIVDEVAYHEKYPTIYHLRKKLVDSTDKADLRLIYLALAHMIKFRGHFLIEGDLNPDNSDVDKLFIQLVQTYNQLFEENPINASGVDAKAILSARLSKSRRLENLIAQLPGEKKNGLFGNLIALSLGLTPNFKSNFDLAEDAKLQLSKDTYDDDLDNLLAQIGDQYADLFLAAKNLSDAILLSDILRVNTEITKAPLSASMIKRYDEHHQDLTLLKALVRQQLPEKYKEIFFDQSKNGYAGYIDGGASQEEFYKFIKPILEKMDGTEELLVKLNREDLLRKQRTFDNGSIPHQIHLGELHAILRRQEDFYPFLKDNREKIEKILTFRIPYYVGPLARGNSRFAWMTRKSEETITPWNFEEVVDKGASAQSFIERMTNFDKNLPNEKVLPKHSLLYEYFTVYNELTKVKYVTEGMRKPAFLSGEQKKAIVDLLFKTNRKVTVKQLKEDYFKKIECFDSVEISGVEDRFNASLGTYHDLLKIIKDKDFLDNEENEDILEDIVLTLTLFEDREMIEERLKTYAHLFDDKVMKQLKRRRYTGWGRLSRKLINGIRDKQSGKTILDFLKSDGFANRNFMQLIHDDSLTFKEDIQKAQVSGQGDSLHEHIANLAGSPAIKKGILQTVKVVDELVKVMGRHKPENIVIEMARENQTTQKGQKNSRERMKRIEEGIKELGSQILKEHPVENTQLQNEKLYLYYLQNGRDMYVDQELDINRLSDYDVDHIVPQSFLKDDSIDNKVLTRSDKARGKSDNVPSEEVVKKMKNYWRQLLNAKLITQRKFDNLTKAERGGLSELDKAGFIKRQLVETRQITKHVAQILDSRMNTKYDENDKLIREVKVITLKSKLVSDFRKDFQFYKVREINNYHHAHDAYLNAVVGTALIKKYPKLESEFVYGDYKVYDVRKMIAKSEQEIGKATAKYFFYSNIMNFFKTEITLANGEIRKRPLIETNGETGEIVWDKGRDFATVRKVLSMPQVNIVKKTEVQTGGFSKESILPKRNSDKLIARKKDWDPKKYGGFDSPTVAYSVLVVAKVEKGKSKKLKSVKELLGITIMERSSFEKNPIDFLEAKGYKEVKKDLIIKLPKYSLFELENGRKRMLASAGELQKGNELALPSKYVNFLYLASHYEKLKGSPEDNEQKQLFVEQHKHYLDEIIEQISEFSKRVILADANLDKVLSAYNKHRDKPIREQAENIIHLFTLTNLGAPAAFKYFDTTIDRKRYTSTKEVLDATLIHQSITGLYETRIDLSQLGGDGGGGGGSGGGGSGGGGSGGGGSGGVLNLEEEYRLHEKPVPSSIDPSWLQLFPTVWAERAGMGLANQVPPVVVELRSGASPVAVRQYPMSKEAREGIRPHIQRFLDLGVLVPCQSPWNTPLLPVKKPGTNDYRPVQDLREINKRVQDIHPTVPNPYNLLSSLPPSHTWYSVLDLKDAFFCLKLHPNSQPLFAFEWRDPEKGNTGQLTWTRLPQGFKNSPTLFNEALHRDLAPFRALNPQVVLLQYVDDLLVAAPTYRDCKEGTQKLLQELSKLGYRVSAKKAQLCQKEVTYLGYLLKEGKRWLTPARKATVMKIPPPTTPRQVREFLGTAGFCRLWIPGFASLAAPLYPLTKPSIPFIWTEEHQKAFDRIKEALLSAPALALPDLTKPFTLYVDERAGVARGVLTQTLGPWRRPVAYLSKKLDPVASGWPTCLKAVAAVALLLKDADKLTLGQNVTVIASHSLESIVRQPPDRWMTNARMTHYQSLLLNERVSFAPPAVLNPATLLPVESEATPVHRCSEILAEETGTRRDLKDQPLPGVPAWYTDGSSFIAEGKRRAGAAIVDGKRTVWASSLPEGTSAQKAELVALTQALRLAEGKDINIYTDSRYAFATAHIHGAIYKQRGWLTSAGKDIKNKEEILALLEAIHLPKRVAIIHCPGHQKGNDPVATGNRRADEAAKQAALSTRVLAETTKPAGKRTADGSEFEKRTADGSEFESPKKKAKVE

SEQ ID NO: 844 - protein, 2094 aa, synthetic construct
MPAAKRVKLDGGDKKYSIGLDIGTNSVGWAVITDEYKVPSKKFKVLGNTDRHSIKKNLIGALLFDSGETAEATRLKRTARRRYTRRKNRICYLQEIFSNEMAKVDDSFFHRLEESFLVEEDKKHERHPIFGNIVDEVAYHEKYPTIYHLRKKLVDSTDKADLRLIYLALAHMIKFRGHFLIEGDLNPDNSDVDKLFIQLVQTYNQLFEENPINASGVDAKAILSARLSKSRRLENLIAQLPGEKKNGLFGNLIALSLGLTPNFKSNFDLAEDAKLQLSKDTYDDDLDNLLAQIGDQYADLFLAAKNLSDAILLSDILRVNTEITKAPLSASMIKRYDEHHQDLTLLKALVRQQLPEKYKEIFFDQSKNGYAGYIDGGASQEEFYKFIKPILEKMDGTEELLVKLNREDLLRKQRTFDNGSIPHQIHLGELHAILRRQEDFYPFLKDNREKIEKILTFRIPYYVGPLARGNSRFAWMTRKSEETITPWNFEEVVDKGASAQSFIERMTNFDKNLPNEKVLPKHSLLYEYFTVYNELTKVKYVTEGMRKPAFLSGEQKKAIVDLLFKTNRKVTVKQLKEDYFKKIECFDSVEISGVEDRFNASLGTYHDLLKIIKDKDFLDNEENEDILEDIVLTLTLFEDREMIEERLKTYAHLFDDKVMKQLKRRRYTGWGRLSRKLINGIRDKQSGKTILDFLKSDGFANRNFMQLIHDDSLTFKEDIQKAQVSGQGDSLHEHIANLAGSPAIKKGILQTVKVVDELVKVMGRHKPENIVIEMARENQTTQKGQKNSRERMKRIEEGIKELGSQILKEHPVENTQLQNEKLYLYYLQNGRDMYVDQELDINRLSDYDVDHIVPQSFLKDDSIDNKVLTRSDKARGKSDNVPSEEVVKKMKNYWRQLLNAKLITQRKFDNLTKAERGGLSELDKAGFIKRQLVETRQITKHVAQILDSRMNTKYDENDKLIREVKVITLKSKLVSDFRKDFQFYKVREINNYHHAHDAYLNAVVGTALIKKYPKLESEFVYGDYKVYDVRKMIAKSEQEIGKATAKYFFYSNIMNFFKTEITLANGEIRKRPLIETNGETGEIVWDKGRDFATVRKVLSMPQVNIVKKTEVQTGGFSKESILPKRNSDKLIARKKDWDPKKYGGFDSPTVAYSVLVVAKVEKGKSKKLKSVKELLGITIMERSSFEKNPIDFLEAKGYKEVKKDLIIKLPKYSLFELENGRKRMLASAGELQKGNELALPSKYVNFLYLASHYEKLKGSPEDNEQKQLFVEQHKHYLDEIIEQISEFSKRVILADANLDKVLSAYNKHRDKPIREQAENIIHLFTLTNLGAPAAFKYFDTTIDRKRYTSTKEVLDATLIHQSITGLYETRIDLSQLGGDGGGGSEAAAKPAPGGVLNLEEEYRLHEKPVPSSIDPSWLQLFPTVWAERAGMGLANQVPPVVVELRSGASPVAVRQYPMSKEAREGIRPHIQRFLDLGVLVPCQSPWNTPLLPVKKPGTNDYRPVQDLREINKRVQDIHPTVPNPYNLLSSLPPSHTWYSVLDLKDAFFCLKLHPNSQPLFAFEWRDPEKGNTGQLTWTRLPQGFKNSPTLFNEALHRDLAPFRALNPQVVLLQYVDDLLVAAPTYRDCKEGTQKLLQELSKLGYRVSAKKAQLCQKEVTYLGYLLKEGKRWLTPARKATVMKIPPPTTPRQVREFLGTAGFCRLWIPGFASLAAPLYPLTKPSIPFIWTEEHQKAFDRIKEALLSAPALALPDLTKPFTLYVDERAGVARGVLTQTLGPWRRPVAYLSKKLDPVASGWPTCLKAVAAVALLLKDADKLTLGQNVTVIASHSLESIVRQPPDRWMTNARMTHYQSLLLNERVSFAPPAVLNPATLLPVESEATPVHRCSEILAEETGTRRDLKDQPLPGVPAWYTDGSSFIAEGKRRAGAAIVDGKRTVWASSLPEGTSAQKAELVALTQALRLAEGKDINIYTDSRYAFATAHIHGAIYKQRGWLTSAGKDIKNKEEILALLEAIHLPKRVAIIHCPGHQKGNDPVATGNRRADEAAKQAALSTRVLAETTKPAGKRTADGSEFEKRTADGSEFESPKKKAKVE

SEQ ID NO: 845 - protein, 2092 aa, synthetic construct
MPAAKRVKLDGGDKKYSIGLDIGTNSVGWAVITDEYKVPSKKFKVLGNTDRHSIKKNLIGALLFDSGETAEATRLKRTARRRYTRRKNRICYLQEIFSNEMAKVDDSFFHRLEESFLVEEDKKHERHPIFGNIVDEVAYHEKYPTIYHLRKKLVDSTDKADLRLIYLALAHMIKFRGHFLIEGDLNPDNSDVDKLFIQLVQTYNQLFEENPINASGVDAKAILSARLSKSRRLENLIAQLPGEKKNGLFGNLIALSLGLTPNFKSNFDLAEDAKLQLSKDTYDDDLDNLLAQIGDQYADLFLAAKNLSDAILLSDILRVNTEITKAPLSASMIKRYDEHHQDLTLLKALVRQQLPEKYKEIFFDQSKNGYAGYIDGGASQEEFYKFIKPILEKMDGTEELLVKLNREDLLRKQRTFDNGSIPHQIHLGELHAILRRQEDFYPFLKDNREKIEKILTFRIPYYVGPLARGNSRFAWMTRKSEETITPWNFEEVVDKGASAQSFIERMTNFDKNLPNEKVLPKHSLLYEYFTVYNELTKVKYVTEGMRKPAFLSGEQKKAIVDLLFKTNRKVTVKQLKEDYFKKIECFDSVEISGVEDRFNASLGTYHDLLKIIKDKDFLDNEENEDILEDIVLTLTLFEDREMIEERLKTYAHLFDDKVMKQLKRRRYTGWGRLSRKLINGIRDKQSGKTILDFLKSDGFANRNFMQLIHDDSLTFKEDIQKAQVSGQGDSLHEHIANLAGSPAIKKGILQTVKVVDELVKVMGRHKPENIVIEMARENQTTQKGQKNSRERMKRIEEGIKELGSQILKEHPVENTQLQNEKLYLYYLQNGRDMYVDQELDINRLSDYDVDHIVPQSFLKDDSIDNKVLTRSDKARGKSDNVPSEEVVKKMKNYWRQLLNAKLITQRKFDNLTKAERGGLSELDKAGFIKRQLVETRQITKHVAQILDSRMNTKYDENDKLIREVKVITLKSKLVSDFRKDFQFYKVREINNYHHAHDAYLNAVVGTALIKKYPKLESEFVYGDYKVYDVRKMIAKSEQEIGKATAKYFFYSNIMNFFKTEITLANGEIRKRPLIETNGETGEIVWDKGRDFATVRKVLSMPQVNIVKKTEVQTGGFSKESILPKRNSDKLIARKKDWDPKKYGGFDSPTVAYSVLVVAKVEKGKSKKLKSVKELLGITIMERSSFEKNPIDFLEAKGYKEVKKDLIIKLPKYSLFELENGRKRMLASAGELQKGNELALPSKYVNFLYLASHYEKLKGSPEDNEQKQLFVEQHKHYLDEIIEQISEFSKRVILADANLDKVLSAYNKHRDKPIREQAENIIHLFTLTNLGAPAAFKYFDTTIDRKRYTSTKEVLDATLIHQSITGLYETRIDLSQLGGDGGGSSPAPGGGGGVLNLEEEYRLHEKPVPSSIDPSWLQLFPTVWAERAGMGLANQVPPVVVELRSGASPVAVRQYPMSKEAREGIRPHIQRFLDLGVLVPCQSPWNTPLLPVKKPGTNDYRPVQDLREINKRVQDIHPTVPNPYNLLSSLPPSHTWYSVLDLKDAFFCLKLHPNSQPLFAFEWRDPEKGNTGQLTWTRLPQGFKNSPTLFNEALHRDLAPFRALNPQVVLLQYVDDLLVAAPTYRDCKEGTQKLLQELSKLGYRVSAKKAQLCQKEVTYLGYLLKEGKRWLTPARKATVMKIPPPTTPRQVREFLGTAGFCRLWIPGFASLAAPLYPLTKPSIPFIWTEEHQKAFDRIKEALLSAPALALPDLTKPFTLYVDERAGVARGVLTQTLGPWRRPVAYLSKKLDPVASGWPTCLKAVAAVALLLKDADKLTLGQNVTVIASHSLESIVRQPPDRWMTNARMTHYQSLLLNERVSFAPPAVLNPATLLPVESEATPVHRCSEILAEETGTRRDLKDQPLPGVPAWYTDGSSFIAEGKRRAGAAIVDGKRTVWASSLPEGTSAQKAELVALTQALRLAEGKDINIYTDSRYAFATAHIHGAIYKQRGWLTSAGKDIKNKEEILALLEAIHLPKRVAIIHCPGHQKGNDPVATGNRRADEAAKQAALSTRVLAETTKPAGKRTADGSEFEKRTADGSEFESPKKKAKVE

SEQ ID NO: 846 - protein, 2095 aa, synthetic construct
MPAAKRVKLDGGDKKYSIGLDIGTNSVGWAVITDEYKVPSKKFKVLGNTDRHSIKKNLIGALLFDSGETAEATRLKRTARRRYTRRKNRICYLQEIFSNEMAKVDDSFFHRLEESFLVEEDKKHERHPIFGNIVDEVAYHEKYPTIYHLRKKLVDSTDKADLRLIYLALAHMIKFRGHFLIEGDLNPDNSDVDKLFIQLVQTYNQLFEENPINASGVDAKAILSARLSKSRRLENLIAQLPGEKKNGLFGNLIALSLGLTPNFKSNFDLAEDAKLQLSKDTYDDDLDNLLAQIGDQYADLFLAAKNLSDAILLSDILRVNTEITKAPLSASMIKRYDEHHQDLTLLKALVRQQLPEKYKEIFFDQSKNGYAGYIDGGASQEEFYKFIKPILEKMDGTEELLVKLNREDLLRKQRTFDNGSIPHQIHLGELHAILRRQEDFYPFLKDNREKIEKILTFRIPYYVGPLARGNSRFAWMTRKSEETITPWNFEEVVDKGASAQSFIERMTNFDKNLPNEKVLPKHSLLYEYFTVYNELTKVKYVTEGMRKPAFLSGEQKKAIVDLLFKTNRKVTVKQLKEDYFKKIECFDSVEISGVEDRFNASLGTYHDLLKIIKDKDFLDNEENEDILEDIVLTLTLFEDREMIEERLKTYAHLFDDKVMKQLKRRRYTGWGRLSRKLINGIRDKQSGKTILDFLKSDGFANRNFMQLIHDDSLTFKEDIQKAQVSGQGDSLHEHIANLAGSPAIKKGILQTVKVVDELVKVMGRHKPENIVIEMARENQTTQKGQKNSRERMKRIEEGIKELGSQILKEHPVENTQLQNEKLYLYYLQNGRDMYVDQELDINRLSDYDVDHIVPQSFLKDDSIDNKVLTRSDKARGKSDNVPSEEVVKKMKNYWRQLLNAKLITQRKFDNLTKAERGGLSELDKAGFIKRQLVETRQITKHVAQILDSRMNTKYDENDKLIREVKVITLKSKLVSDFRKDFQFYKVREINNYHHAHDAYLNAVVGTALIKKYPKLESEFVYGDYKVYDVRKMIAKSEQEIGKATAKYFFYSNIMNFFKTEITLANGEIRKRPLIETNGETGEIVWDKGRDFATVRKVLSMPQVNIVKKTEVQTGGFSKESILPKRNSDKLIARKKDWDPKKYGGFDSPTVAYSVLVVAKVEKGKSKKLKSVKELLGITIMERSSFEKNPIDFLEAKGYKEVKKDLIIKLPKYSLFELENGRKRMLASAGELQKGNELALPSKYVNFLYLASHYEKLKGSPEDNEQKQLFVEQHKHYLDEIIEQISEFSKRVILADANLDKVLSAYNKHRDKPIREQAENIIHLFTLTNLGAPAAFKYFDTTIDRKRYTSTKEVLDATLIHQSITGLYETRIDLSQLGGDGGGSSGSSGSSGSSGGVLNLEEEYRLHEKPVPSSIDPSWLQLFPTVWAERAGMGLANQVPPVVVELRSGASPVAVRQYPMSKEAREGIRPHIQRFLDLGVLVPCQSPWNTPLLPVKKPGTNDYRPVQDLREINKRVQDIHPTVPNPYNLLSSLPPSHTWYSVLDLKDAFFCLKLHPNSQPLFAFEWRDPEKGNTGQLTWTRLPQGFKNSPTLFNEALHRDLAPFRALNPQVVLLQYVDDLLVAAPTYRDCKEGTQKLLQELSKLGYRVSAKKAQLCQKEVTYLGYLLKEGKRWLTPARKATVMKIPPPTTPRQVREFLGTAGFCRLWIPGFASLAAPLYPLTKPSIPFIWTEEHQKAFDRIKEALLSAPALALPDLTKPFTLYVDERAGVARGVLTQTLGPWRRPVAYLSKKLDPVASGWPTCLKAVAAVALLLKDADKLTLGQNVTVIASHSLESIVRQPPDRWMTNARMTHYQSLLLNERVSFAPPAVLNPATLLPVESEATPVHRCSEILAEETGTRRDLKDQPLPGVPAWYTDGSSFIAEGKRRAGAAIVDGKRTVWASSLPEGTSAQKAELVALTQALRLAEGKDINIYTDSRYAFATAHIHGAIYKQRGWLTSAGKDIKNKEEILALLEAIHLPKRVAIIHCPGHQKGNDPVATGNRRADEAAKQAALSTRVLAETTKPAGKRTADGSEFEKRTADGSEFESPKKKAKVE

SEQ ID NO: 847 - protein, 2094 aa, synthetic construct
MPAAKRVKLDGGDKKYSIGLDIGTNSVGWAVITDEYKVPSKKFKVLGNTDRHSIKKNLIGALLFDSGETAEATRLKRTARRRYTRRKNRICYLQEIFSNEMAKVDDSFFHRLEESFLVEEDKKHERHPIFGNIVDEVAYHEKYPTIYHLRKKLVDSTDKADLRLIYLALAHMIKFRGHFLIEGDLNPDNSDVDKLFIQLVQTYNQLFEENPINASGVDAKAILSARLSKSRRLENLIAQLPGEKKNGLFGNLIALSLGLTPNFKSNFDLAEDAKLQLSKDTYDDDLDNLLAQIGDQYADLFLAAKNLSDAILLSDILRVNTEITKAPLSASMIKRYDEHHQDLTLLKALVRQQLPEKYKEIFFDQSKNGYAGYIDGGASQEEFYKFIKPILEKMDGTEELLVKLNREDLLRKQRTFDNGSIPHQIHLGELHAILRRQEDFYPFLKDNREKIEKILTFRIPYYVGPLARGNSRFAWMTRKSEETITPWNFEEVVDKGASAQSFIERMTNFDKNLPNEKVLPKHSLLYEYFTVYNELTKVKYVTEGMRKPAFLSGEQKKAIVDLLFKTNRKVTVKQLKEDYFKKIECFDSVEISGVEDRFNASLGTYHDLLKIIKDKDFLDNEENEDILEDIVLTLTLFEDREMIEERLKTYAHLFDDKVMKQLKRRRYTGWGRLSRKLINGIRDKQSGKTILDFLKSDGFANRNFMQLIHDDSLTFKEDIQKAQVSGQGDSLHEHIANLAGSPAIKKGILQTVKVVDELVKVMGRHKPENIVIEMARENQTTQKGQKNSRERMKRIEEGIKELGSQILKEHPVENTQLQNEKLYLYYLQNGRDMYVDQELDINRLSDYDVDHIVPQSFLKDDSIDNKVLTRSDKARGKSDNVPSEEVVKKMKNYWRQLLNAKLITQRKFDNLTKAERGGLSELDKAGFIKRQLVETRQITKHVAQILDSRMNTKYDENDKLIREVKVITLKSKLVSDFRKDFQFYKVREINNYHHAHDAYLNAVVGTALIKKYPKLESEFVYGDYKVYDVRKMIAKSEQEIGKATAKYFFYSNIMNFFKTEITLANGEIRKRPLIETNGETGEIVWDKGRDFATVRKVLSMPQVNIVKKTEVQTGGFSKESILPKRNSDKLIARKKDWDPKKYGGFDSPTVAYSVLVVAKVEKGKSKKLKSVKELLGITIMERSSFEKNPIDFLEAKGYKEVKKDLIIKLPKYSLFELENGRKRMLASAGELQKGNELALPSKYVNFLYLASHYEKLKGSPEDNEQKQLFVEQHKHYLDEIIEQISEFSKRVILADANLDKVLSAYNKHRDKPIREQAENIIHLFTLTNLGAPAAFKYFDTTIDRKRYTSTKEVLDATLIHQSITGLYETRIDLSQLGGDGGPAPGGSEAAAKGGVLNLEEEYRLHEKPVPSSIDPSWLQLFPTVWAERAGMGLANQVPPVVVELRSGASPVAVRQYPMSKEAREGIRPHIQRFLDLGVLVPCQSPWNTPLLPVKKPGTNDYRPVQDLREINKRVQDIHPTVPNPYNLLSSLPPSHTWYSVLDLKDAFFCLKLHPNSQPLFAFEWRDPEKGNTGQLTWTRLPQGFKNSPTLFNEALHRDLAPFRALNPQVVLLQYVDDLLVAAPTYRDCKEGTQKLLQELSKLGYRVSAKKAQLCQKEVTYLGYLLKEGKRWLTPARKATVMKIPPPTTPRQVREFLGTAGFCRLWIPGFASLAAPLYPLTKPSIPFIWTEEHQKAFDRIKEALLSAPALALPDLTKPFTLYVDERAGVARGVLTQTLGPWRRPVAYLSKKLDPVASGWPTCLKAVAAVALLLKDADKLTLGQNVTVIASHSLESIVRQPPDRWMTNARMTHYQSLLLNERVSFAPPAVLNPATLLPVESEATPVHRCSEILAEETGTRRDLKDQPLPGVPAWYTDGSSFIAEGKRRAGAAIVDGKRTVWASSLPEGTSAQKAELVALTQALRLAEGKDINIYTDSRYAFATAHIHGAIYKQRGWLTSAGKDIKNKEEILALLEAIHLPKRVAIIHCPGHQKGNDPVATGNRRADEAAKQAALSTRVLAETTKPAGKRTADGSEFEKRTADGSEFESPKKKAKVE

SEQ ID NO: 848 - protein, 2088 aa, synthetic construct
MPAAKRVKLDGGDKKYSIGLDIGTNSVGWAVITDEYKVPSKKFKVLGNTDRHSIKKNLIGALLFDSGETAEATRLKRTARRRYTRRKNRICYLQEIFSNEMAKVDDSFFHRLEESFLVEEDKKHERHPIFGNIVDEVAYHEKYPTIYHLRKKLVDSTDKADLRLIYLALAHMIKFRGHFLIEGDLNPDNSDVDKLFIQLVQTYNQLFEENPINASGVDAKAILSARLSKSRRLENLIAQLPGEKKNGLFGNLIALSLGLTPNFKSNFDLAEDAKLQLSKDTYDDDLDNLLAQIGDQYADLFLAAKNLSDAILLSDILRVNTEITKAPLSASMIKRYDEHHQDLTLLKALVRQQLPEKYKEIFFDQSKNGYAGYIDGGASQEEFYKFIKPILEKMDGTEELLVKLNREDLLRKQRTFDNGSIPHQIHLGELHAILRRQEDFYPFLKDNREKIEKILTFRIPYYVGPLARGNSRFAWMTRKSEETITPWNFEEVVDKGASAQSFIERMTNFDKNLPNEKVLPKHSLLYEYFTVYNELTKVKYVTEGMRKPAFLSGEQKKAIVDLLFKTNRKVTVKQLKEDYFKKIECFDSVEISGVEDRFNASLGTYHDLLKIIKDKDFLDNEENEDILEDIVLTLTLFEDREMIEERLKTYAHLFDDKVMKQLKRRRYTGWGRLSRKLINGIRDKQSGKTILDFLKSDGFANRNFMQLIHDDSLTFKEDIQKAQVSGQGDSLHEHIANLAGSPAIKKGILQTVKVVDELVKVMGRHKPENIVIEMARENQTTQKGQKNSRERMKRIEEGIKELGSQILKEHPVENTQLQNEKLYLYYLQNGRDMYVDQELDINRLSDYDVDHIVPQSFLKDDSIDNKVLTRSDKARGKSDNVPSEEVVKKMKNYWRQLLNAKLITQRKFDNLTKAERGGLSELDKAGFIKRQLVETRQITKHVAQILDSRMNTKYDENDKLIREVKVITLKSKLVSDFRKDFQFYKVREINNYHHAHDAYLNAVVGTALIKKYPKLESEFVYGDYKVYDVRKMIAKSEQEIGKATAKYFFYSNIMNFFKTEITLANGEIRKRPLIETNGETGEIVWDKGRDFATVRKVLSMPQVNIVKKTEVQTGGFSKESILPKRNSDKLIARKKDWDPKKYGGFDSPTVAYSVLVVAKVEKGKSKKLKSVKELLGITIMERSSFEKNPIDFLEAKGYKEVKKDLIIKLPKYSLFELENGRKRMLASAGELQKGNELALPSKYVNFLYLASHYEKLKGSPEDNEQKQLFVEQHKHYLDEIIEQISEFSKRVILADANLDKVLSAYNKHRDKPIREQAENIIHLFTLTNLGAPAAFKYFDTTIDRKRYTSTKEVLDATLIHQSITGLYETRIDLSQLGGDGGPAPAPGGVLNLEEEYRLHEKPVPSSIDPSWLQLFPTVWAERAGMGLANQVPPVVVELRSGASPVAVRQYPMSKEAREGIRPHIQRFLDLGVLVPCQSPWNTPLLPVKKPGTNDYRPVQDLREINKRVQDIHPTVPNPYNLLSSLPPSHTWYSVLDLKDAFFCLKLHPNSQPLFAFEWRDPEKGNTGQLTWTRLPQGFKNSPTLFNEALHRDLAPFRALNPQVVLLQYVDDLLVAAPTYRDCKEGTQKLLQELSKLGYRVSAKKAQLCQKEVTYLGYLLKEGKRWLTPARKATVMKIPPPTTPRQVREFLGTAGFCRLWIPGFASLAAPLYPLTKPSIPFIWTEEHQKAFDRIKEALLSAPALALPDLTKPFTLYVDERAGVARGVLTQTLGPWRRPVAYLSKKLDPVASGWPTCLKAVAAVALLLKDADKLTLGQNVTVIASHSLESIVRQPPDRWMTNARMTHYQSLLLNERVSFAPPAVLNPATLLPVESEATPVHRCSEILAEETGTRRDLKDQPLPGVPAWYTDGSSFIAEGKRRAGAAIVDGKRTVWASSLPEGTSAQKAELVALTQALRLAEGKDINIYTDSRYAFATAHIHGAIYKQRGWLTSAGKDIKNKEEILALLEAIHLPKRVAIIHCPGHQKGNDPVATGNRRADEAAKQAALSTRVLAETTKPAGKRTADGSEFEKRTADGSEFESPKKKAKVE

SEQ ID NO: 849 - protein, 2092 aa, synthetic construct
MPAAKRVKLDGGDKKYSIGLDIGTNSVGWAVITDEYKVPSKKFKVLGNTDRHSIKKNLIGALLFDSGETAEATRLKRTARRRYTRRKNRICYLQEIFSNEMAKVDDSFFHRLEESFLVEEDKKHERHPIFGNIVDEVAYHEKYPTIYHLRKKLVDSTDKADLRLIYLALAHMIKFRGHFLIEGDLNPDNSDVDKLFIQLVQTYNQLFEENPINASGVDAKAILSARLSKSRRLENLIAQLPGEKKNGLFGNLIALSLGLTPNFKSNFDLAEDAKLQLSKDTYDDDLDNLLAQIGDQYADLFLAAKNLSDAILLSDILRVNTEITKAPLSASMIKRYDEHHQDLTLLKALVRQQLPEKYKEIFFDQSKNGYAGYIDGGASQEEFYKFIKPILEKMDGTEELLVKLNREDLLRKQRTFDNGSIPHQIHLGELHAILRRQEDFYPFLKDNREKIEKILTFRIPYYVGPLARGNSRFAWMTRKSEETITPWNFEEVVDKGASAQSFIERMTNFDKNLPNEKVLPKHSLLYEYFTVYNELTKVKYVTEGMRKPAFLSGEQKKAIVDLLFKTNRKVTVKQLKEDYFKKIECFDSVEISGVEDRFNASLGTYHDLLKIIKDKDFLDNEENEDILEDIVLTLTLFEDREMIEERLKTYAHLFDDKVMKQLKRRRYTGWGRLSRKLINGIRDKQSGKTILDFLKSDGFANRNFMQLIHDDSLTFKEDIQKAQVSGQGDSLHEHIANLAGSPAIKKGILQTVKVVDELVKVMGRHKPENIVIEMARENQTTQKGQKNSRERMKRIEEGIKELGSQILKEHPVENTQLQNEKLYLYYLQNGRDMYVDQELDINRLSDYDVDHIVPQSFLKDDSIDNKVLTRSDKARGKSDNVPSEEVVKKMKNYWRQLLNAKLITQRKFDNLTKAERGGLSELDKAGFIKRQLVETRQITKHVAQILDSRMNTKYDENDKLIREVKVITLKSKLVSDFRKDFQFYKVREINNYHHAHDAYLNAVVGTALIKKYPKLESEFVYGDYKVYDVRKMIAKSEQEIGKATAKYFFYSNIMNFFKTEITLANGEIRKRPLIETNGETGEIVWDKGRDFATVRKVLSMPQVNIVKKTEVQTGGFSKESILPKRNSDKLIARKKDWDPKKYGGFDSPTVAYSVLVVAKVEKGKSKKLKSVKELLGITIMERSSFEKNPIDFLEAKGYKEVKKDLIIKLPKYSLFELENGRKRMLASAGELQKGNELALPSKYVNFLYLASHYEKLKGSPEDNEQKQLFVEQHKHYLDEIIEQISEFSKRVILADANLDKVLSAYNKHRDKPIREQAENIIHLFTLTNLGAPAAFKYFDTTIDRKRYTSTKEVLDATLIHQSITGLYETRIDLSQLGGDGGGSSGGGGGSGGVLNLEEEYRLHEKPVPSSIDPSWLQLFPTVWAERAGMGLANQVPPVVVELRSGASPVAVRQYPMSKEAREGIRPHIQRFLDLGVLVPCQSPWNTPLLPVKKPGTNDYRPVQDLREINKRVQDIHPTVPNPYNLLSSLPPSHTWYSVLDLKDAFFCLKLHPNSQPLFAFEWRDPEKGNTGQLTWTRLPQGFKNSPTLFNEALHRDLAPFRALNPQVVLLQYVDDLLVAAPTYRDCKEGTQKLLQELSKLGYRVSAKKAQLCQKEVTYLGYLLKEGKRWLTPARKATVMKIPPPTTPRQVREFLGTAGFCRLWIPGFASLAAPLYPLTKPSIPFIWTEEHQKAFDRIKEALLSAPALALPDLTKPFTLYVDERAGVARGVLTQTLGPWRRPVAYLSKKLDPVASGWPTCLKAVAAVALLLKDADKLTLGQNVTVIASHSLESIVRQPPDRWMTNARMTHYQSLLLNERVSFAPPAVLNPATLLPVESEATPVHRCSEILAEETGTRRDLKDQPLPGVPAWYTDGSSFIAEGKRRAGAAIVDGKRTVWASSLPEGTSAQKAELVALTQALRLAEGKDINIYTDSRYAFATAHIHGAIYKQRGWLTSAGKDIKNKEEILALLEAIHLPKRVAIIHCPGHQKGNDPVATGNRRADEAAKQAALSTRVLAETTKPAGKRTADGSEFEKRTADGSEFESPKKKAKVE

SEQ ID NO: 850 - protein, 2092 aa, synthetic construct
MPAAKRVKLDGGDKKYSIGLDIGTNSVGWAVITDEYKVPSKKFKVLGNTDRHSIKKNLIGALLFDSGETAEATRLKRTARRRYTRRKNRICYLQEIFSNEMAKVDDSFFHRLEESFLVEEDKKHERHPIFGNIVDEVAYHEKYPTIYHLRKKLVDSTDKADLRLIYLALAHMIKFRGHFLIEGDLNPDNSDVDKLFIQLVQTYNQLFEENPINASGVDAKAILSARLSKSRRLENLIAQLPGEKKNGLFGNLIALSLGLTPNFKSNFDLAEDAKLQLSKDTYDDDLDNLLAQIGDQYADLFLAAKNLSDAILLSDILRVNTEITKAPLSASMIKRYDEHHQDLTLLKALVRQQLPEKYKEIFFDQSKNGYAGYIDGGASQEEFYKFIKPILEKMDGTEELLVKLNREDLLRKQRTFDNGSIPHQIHLGELHAILRRQEDFYPFLKDNREKIEKILTFRIPYYVGPLARGNSRFAWMTRKSEETITPWNFEEVVDKGASAQSFIERMTNFDKNLPNEKVLPKHSLLYEYFTVYNELTKVKYVTEGMRKPAFLSGEQKKAIVDLLFKTNRKVTVKQLKEDYFKKIECFDSVEISGVEDRFNASLGTYHDLLKIIKDKDFLDNEENEDILEDIVLTLTLFEDREMIEERLKTYAHLFDDKVMKQLKRRRYTGWGRLSRKLINGIRDKQSGKTILDFLKSDGFANRNFMQLIHDDSLTFKEDIQKAQVSGQGDSLHEHIANLAGSPAIKKGILQTVKVVDELVKVMGRHKPENIVIEMARENQTTQKGQKNSRERMKRIEEGIKELGSQILKEHPVENTQLQNEKLYLYYLQNGRDMYVDQELDINRLSDYDVDHIVPQSFLKDDSIDNKVLTRSDKARGKSDNVPSEEVVKKMKNYWRQLLNAKLITQRKFDNLTKAERGGLSELDKAGFIKRQLVETRQITKHVAQILDSRMNTKYDENDKLIREVKVITLKSKLVSDFRKDFQFYKVREINNYHHAHDAYLNAVVGTALIKKYPKLESEFVYGDYKVYDVRKMIAKSEQEIGKATAKYFFYSNIMNFFKTEITLANGEIRKRPLIETNGETGEIVWDKGRDFATVRKVLSMPQVNIVKKTEVQTGGFSKESILPKRNSDKLIARKKDWDPKKYGGFDSPTVAYSVLVVAKVEKGKSKKLKSVKELLGITIMERSSFEKNPIDFLEAKGYKEVKKDLIIKLPKYSLFELENGRKRMLASAGELQKGNELALPSKYVNFLYLASHYEKLKGSPEDNEQKQLFVEQHKHYLDEIIEQISEFSKRVILADANLDKVLSAYNKHRDKPIREQAENIIHLFTLTNLGAPAAFKYFDTTIDRKRYTSTKEVLDATLIHQSITGLYETRIDLSQLGGDGGGGSGGSGGSGGVLNLEEEYRLHEKPVPSSIDPSWLQLFPTVWAERAGMGLANQVPPVVVELRSGASPVAVRQYPMSKEAREGIRPHIQRFLDLGVLVPCQSPWNTPLLPVKKPGTNDYRPVQDLREINKRVQDIHPTVPNPYNLLSSLPPSHTWYSVLDLKDAFFCLKLHPNSQPLFAFEWRDPEKGNTGQLTWTRLPQGFKNSPTLFNEALHRDLAPFRALNPQVVLLQYVDDLLVAAPTYRDCKEGTQKLLQELSKLGYRVSAKKAQLCQKEVTYLGYLLKEGKRWLTPARKATVMKIPPPTTPRQVREFLGTAGFCRLWIPGFASLAAPLYPLTKPSIPFIWTEEHQKAFDRIKEALLSAPALALPDLTKPFTLYVDERAGVARGVLTQTLGPWRRPVAYLSKKLDPVASGWPTCLKAVAAVALLLKDADKLTLGQNVTVIASHSLESIVRQPPDRWMTNARMTHYQSLLLNERVSFAPPAVLNPATLLPVESEATPVHRCSEILAEETGTRRDLKDQPLPGVPAWYTDGSSFIAEGKRRAGAAIVDGKRTVWASSLPEGTSAQKAELVALTQALRLAEGKDINIYTDSRYAFATAHIHGAIYKQRGWLTSAGKDIKNKEEILALLEAIHLPKRVAIIHCPGHQKGNDPVATGNRRADEAAKQAALSTRVLAETTKPAGKRTADGSEFEKRTADGSEFESPKKKAKVE

SEQ ID NO: 851 - protein, 2086 aa, synthetic construct
MPAAKRVKLDGGDKKYSIGLDIGTNSVGWAVITDEYKVPSKKFKVLGNTDRHSIKKNLIGALLFDSGETAEATRLKRTARRRYTRRKNRICYLQEIFSNEMAKVDDSFFHRLEESFLVEEDKKHERHPIFGNIVDEVAYHEKYPTIYHLRKKLVDSTDKADLRLIYLALAHMIKFRGHFLIEGDLNPDNSDVDKLFIQLVQTYNQLFEENPINASGVDAKAILSARLSKSRRLENLIAQLPGEKKNGLFGNLIALSLGLTPNFKSNFDLAEDAKLQLSKDTYDDDLDNLLAQIGDQYADLFLAAKNLSDAILLSDILRVNTEITKAPLSASMIKRYDEHHQDLTLLKALVRQQLPEKYKEIFFDQSKNGYAGYIDGGASQEEFYKFIKPILEKMDGTEELLVKLNREDLLRKQRTFDNGSIPHQIHLGELHAILRRQEDFYPFLKDNREKIEKILTFRIPYYVGPLARGNSRFAWMTRKSEETITPWNFEEVVDKGASAQSFIERMTNFDKNLPNEKVLPKHSLLYEYFTVYNELTKVKYVTEGMRKPAFLSGEQKKAIVDLLFKTNRKVTVKQLKEDYFKKIECFDSVEISGVEDRFNASLGTYHDLLKIIKDKDFLDNEENEDILEDIVLTLTLFEDREMIEERLKTYAHLFDDKVMKQLKRRRYTGWGRLSRKLINGIRDKQSGKTILDFLKSDGFANRNFMQLIHDDSLTFKEDIQKAQVSGQGDSLHEHIANLAGSPAIKKGILQTVKVVDELVKVMGRHKPENIVIEMARENQTTQKGQKNSRERMKRIEEGIKELGSQILKEHPVENTQLQNEKLYLYYLQNGRDMYVDQELDINRLSDYDVDHIVPQSFLKDDSIDNKVLTRSDKARGKSDNVPSEEVVKKMKNYWRQLLNAKLITQRKFDNLTKAERGGLSELDKAGFIKRQLVETRQITKHVAQILDSRMNTKYDENDKLIREVKVITLKSKLVSDFRKDFQFYKVREINNYHHAHDAYLNAVVGTALIKKYPKLESEFVYGDYKVYDVRKMIAKSEQEIGKATAKYFFYSNIMNFFKTEITLANGEIRKRPLIETNGETGEIVWDKGRDFATVRKVLSMPQVNIVKKTEVQTGGFSKESILPKRNSDKLIARKKDWDPKKYGGFDSPTVAYSVLVVAKVEKGKSKKLKSVKELLGITIMERSSFEKNPIDFLEAKGYKEVKKDLIIKLPKYSLFELENGRKRMLASAGELQKGNELALPSKYVNFLYLASHYEKLKGSPEDNEQKQLFVEQHKHYLDEIIEQISEFSKRVILADANLDKVLSAYNKHRDKPIREQAENIIHLFTLTNLGAPAAFKYFDTTIDRKRYTSTKEVLDATLIHQSITGLYETRIDLSQLGGDGGGGSGGVLNLEEEYRLHEKPVPSSIDPSWLQLFPTVWAERAGMGLANQVPPVVVELRSGASPVAVRQYPMSKEAREGIRPHIQRFLDLGVLVPCQSPWNTPLLPVKKPGTNDYRPVQDLREINKRVQDIHPTVPNPYNLLSSLPPSHTWYSVLDLKDAFFCLKLHPNSQPLFAFEWRDPEKGNTGQLTWTRLPQGFKNSPTLFNEALHRDLAPFRALNPQVVLLQYVDDLLVAAPTYRDCKEGTQKLLQELSKLGYRVSAKKAQLCQKEVTYLGYLLKEGKRWLTPARKATVMKIPPPTTPRQVREFLGTAGFCRLWIPGFASLAAPLYPLTKPSIPFIWTEEHQKAFDRIKEALLSAPALALPDLTKPFTLYVDERAGVARGVLTQTLGPWRRPVAYLSKKLDPVASGWPTCLKAVAAVALLLKDADKLTLGQNVTVIASHSLESIVRQPPDRWMTNARMTHYQSLLLNERVSFAPPAVLNPATLLPVESEATPVHRCSEILAEETGTRRDLKDQPLPGVPAWYTDGSSFIAEGKRRAGAAIVDGKRTVWASSLPEGTSAQKAELVALTQALRLAEGKDINIYTDSRYAFATAHIHGAIYKQRGWLTSAGKDIKNKEEILALLEAIHLPKRVAIIHCPGHQKGNDPVATGNRRADEAAKQAALSTRVLAETTKPAGKRTADGSEFEKRTADGSEFESPKKKAKVE

SEQ ID NO: 852 - protein, 2091 aa, synthetic construct
MPAAKRVKLDGGDKKYSIGLDIGTNSVGWAVITDEYKVPSKKFKVLGNTDRHSIKKNLIGALLFDSGETAEATRLKRTARRRYTRRKNRICYLQEIFSNEMAKVDDSFFHRLEESFLVEEDKKHERHPIFGNIVDEVAYHEKYPTIYHLRKKLVDSTDKADLRLIYLALAHMIKFRGHFLIEGDLNPDNSDVDKLFIQLVQTYNQLFEENPINASGVDAKAILSARLSKSRRLENLIAQLPGEKKNGLFGNLIALSLGLTPNFKSNFDLAEDAKLQLSKDTYDDDLDNLLAQIGDQYADLFLAAKNLSDAILLSDILRVNTEITKAPLSASMIKRYDEHHQDLTLLKALVRQQLPEKYKEIFFDQSKNGYAGYIDGGASQEEFYKFIKPILEKMDGTEELLVKLNREDLLRKQRTFDNGSIPHQIHLGELHAILRRQEDFYPFLKDNREKIEKILTFRIPYYVGPLARGNSRFAWMTRKSEETITPWNFEEVVDKGASAQSFIERMTNFDKNLPNEKVLPKHSLLYEYFTVYNELTKVKYVTEGMRKPAFLSGEQKKAIVDLLFKTNRKVTVKQLKEDYFKKIECFDSVEISGVEDRFNASLGTYHDLLKIIKDKDFLDNEENEDILEDIVLTLTLFEDREMIEERLKTYAHLFDDKVMKQLKRRRYTGWGRLSRKLINGIRDKQSGKTILDFLKSDGFANRNFMQLIHDDSLTFKEDIQKAQVSGQGDSLHEHIANLAGSPAIKKGILQTVKVVDELVKVMGRHKPENIVIEMARENQTTQKGQKNSRERMKRIEEGIKELGSQILKEHPVENTQLQNEKLYLYYLQNGRDMYVDQELDINRLSDYDVDHIVPQSFLKDDSIDNKVLTRSDKARGKSDNVPSEEVVKKMKNYWRQLLNAKLITQRKFDNLTKAERGGLSELDKAGFIKRQLVETRQITKHVAQILDSRMNTKYDENDKLIREVKVITLKSKLVSDFRKDFQFYKVREINNYHHAHDAYLNAVVGTALIKKYPKLESEFVYGDYKVYDVRKMIAKSEQEIGKATAKYFFYSNIMNFFKTEITLANGEIRKRPLIETNGETGEIVWDKGRDFATVRKVLSMPQVNIVKKTEVQTGGFSKESILPKRNSDKLIARKKDWDPKKYGGFDSPTVAYSVLVVAKVEKGKSKKLKSVKELLGITIMERSSFEKNPIDFLEAKGYKEVKKDLIIKLPKYSLFELENGRKRMLASAGELQKGNELALPSKYVNFLYLASHYEKLKGSPEDNEQKQLFVEQHKHYLDEIIEQISEFSKRVILADANLDKVLSAYNKHRDKPIREQAENIIHLFTLTNLGAPAAFKYFDTTIDRKRYTSTKEVLDATLIHQSITGLYETRIDLSQLGGDGGGGSEAAAKGGVLNLEEEYRLHEKPVPSSIDPSWLQLFPTVWAERAGMGLANQVPPVVVELRSGASPVAVRQYPMSKEAREGIRPHIQRFLDLGVLVPCQSPWNTPLLPVKKPGTNDYRPVQDLREINKRVQDIHPTVPNPYNLLSSLPPSHTWYSVLDLKDAFFCLKLHPNSQPLFAFEWRDPEKGNTGQLTWTRLPQGFKNSPTLFNEALHRDLAPFRALNPQVVLLQYVDDLLVAAPTYRDCKEGTQKLLQELSKLGYRVSAKKAQLCQKEVTYLGYLLKEGKRWLTPARKATVMKIPPPTTPRQVREFLGTAGFCRLWIPGFASLAAPLYPLTKPSIPFIWTEEHQKAFDRIKEALLSAPALALPDLTKPFTLYVDERAGVARGVLTQTLGPWRRPVAYLSKKLDPVASGWPTCLKAVAAVALLLKDADKLTLGQNVTVIASHSLESIVRQPPDRWMTNARMTHYQSLLLNERVSFAPPAVLNPATLLPVESEATPVHRCSEILAEETGTRRDLKDQPLPGVPAWYTDGSSFIAEGKRRAGAAIVDGKRTVWASSLPEGTSAQKAELVALTQALRLAEGKDINIYTDSRYAFATAHIHGAIYKQRGWLTSAGKDIKNKEEILALLEAIHLPKRVAIIHCPGHQKGNDPVATGNRRADEAAKQAALSTRVLAETTKPAGKRTADGSEFEKRTADGSEFESPKKKAKVE

SEQ ID NO: 853 - protein, 2094 aa, synthetic construct
MPAAKRVKLDGGDKKYSIGLDIGTNSVGWAVITDEYKVPSKKFKVLGNTDRHSIKKNLIGALLFDSGETAEATRLKRTARRRYTRRKNRICYLQEIFSNEMAKVDDSFFHRLEESFLVEEDKKHERHPIFGNIVDEVAYHEKYPTIYHLRKKLVDSTDKADLRLIYLALAHMIKFRGHFLIEGDLNPDNSDVDKLFIQLVQTYNQLFEENPINASGVDAKAILSARLSKSRRLENLIAQLPGEKKNGLFGNLIALSLGLTPNFKSNFDLAEDAKLQLSKDTYDDDLDNLLAQIGDQYADLFLAAKNLSDAILLSDILRVNTEITKAPLSASMIKRYDEHHQDLTLLKALVRQQLPEKYKEIFFDQSKNGYAGYIDGGASQEEFYKFIKPILEKMDGTEELLVKLNREDLLRKQRTFDNGSIPHQIHLGELHAILRRQEDFYPFLKDNREKIEKILTFRIPYYVGPLARGNSRFAWMTRKSEETITPWNFEEVVDKGASAQSFIERMTNFDKNLPNEKVLPKHSLLYEYFTVYNELTKVKYVTEGMRKPAFLSGEQKKAIVDLLFKTNRKVTVKQLKEDYFKKIECFDSVEISGVEDRFNASLGTYHDLLKIIKDKDFLDNEENEDILEDIVLTLTLFEDREMIEERLKTYAHLFDDKVMKQLKRRRYTGWGRLSRKLINGIRDKQSGKTILDFLKSDGFANRNFMQLIHDDSLTFKEDIQKAQVSGQGDSLHEHIANLAGSPAIKKGILQTVKVVDELVKVMGRHKPENIVIEMARENQTTQKGQKNSRERMKRIEEGIKELGSQILKEHPVENTQLQNEKLYLYYLQNGRDMYVDQELDINRLSDYDVDHIVPQSFLKDDSIDNKVLTRSDKARGKSDNVPSEEVVKKMKNYWRQLLNAKLITQRKFDNLTKAERGGLSELDKAGFIKRQLVETRQITKHVAQILDSRMNTKYDENDKLIREVKVITLKSKLVSDFRKDFQFYKVREINNYHHAHDAYLNAVVGTALIKKYPKLESEFVYGDYKVYDVRKMIAKSEQEIGKATAKYFFYSNIMNFFKTEITLANGEIRKRPLIETNGETGEIVWDKGRDFATVRKVLSMPQVNIVKKTEVQTGGFSKESILPKRNSDKLIARKKDWDPKKYGGFDSPTVAYSVLVVAKVEKGKSKKLKSVKELLGITIMERSSFEKNPIDFLEAKGYKEVKKDLIIKLPKYSLFELENGRKRMLASAGELQKGNELALPSKYVNFLYLASHYEKLKGSPEDNEQKQLFVEQHKHYLDEIIEQISEFSKRVILADANLDKVLSAYNKHRDKPIREQAENIIHLFTLTNLGAPAAFKYFDTTIDRKRYTSTKEVLDATLIHQSITGLYETRIDLSQLGGDGGGSSEAAAKGGGGGVLNLEEEYRLHEKPVPSSIDPSWLQLFPTVWAERAGMGLANQVPPVVVELRSGASPVAVRQYPMSKEAREGIRPHIQRFLDLGVLVPCQSPWNTPLLPVKKPGTNDYRPVQDLREINKRVQDIHPTVPNPYNLLSSLPPSHTWYSVLDLKDAFFCLKLHPNSQPLFAFEWRDPEKGNTGQLTWTRLPQGFKNSPTLFNEALHRDLAPFRALNPQVVLLQYVDDLLVAAPTYRDCKEGTQKLLQELSKLGYRVSAKKAQLCQKEVTYLGYLLKEGKRWLTPARKATVMKIPPPTTPRQVREFLGTAGFCRLWIPGFASLAAPLYPLTKPSIPFIWTEEHQKAFDRIKEALLSAPALALPDLTKPFTLYVDERAGVARGVLTQTLGPWRRPVAYLSKKLDPVASGWPTCLKAVAAVALLLKDADKLTLGQNVTVIASHSLESIVRQPPDRWMTNARMTHYQSLLLNERVSFAPPAVLNPATLLPVESEATPVHRCSEILAEETGTRRDLKDQPLPGVPAWYTDGSSFIAEGKRRAGAAIVDGKRTVWASSLPEGTSAQKAELVALTQALRLAEGKDINIYTDSRYAFATAHIHGAIYKQRGWLTSAGKDIKNKEEILALLEAIHLPKRVAIIHCPGHQKGNDPVATGNRRADEAAKQAALSTRVLAETTKPAGKRTADGSEFEKRTADGSEFESPKKKAKVE

SEQ ID NO: 854 - protein, 2094 aa, synthetic construct
MPAAKRVKLDGGDKKYSIGLDIGTNSVGWAVITDEYKVPSKKFKVLGNTDRHSIKKNLIGALLFDSGETAEATRLKRTARRRYTRRKNRICYLQEIFSNEMAKVDDSFFHRLEESFLVEEDKKHERHPIFGNIVDEVAYHEKYPTIYHLRKKLVDSTDKADLRLIYLALAHMIKFRGHFLIEGDLNPDNSDVDKLFIQLVQTYNQLFEENPINASGVDAKAILSARLSKSRRLENLIAQLPGEKKNGLFGNLIALSLGLTPNFKSNFDLAEDAKLQLSKDTYDDDLDNLLAQIGDQYADLFLAAKNLSDAILLSDILRVNTEITKAPLSASMIKRYDEHHQDLTLLKALVRQQLPEKYKEIFFDQSKNGYAGYIDGGASQEEFYKFIKPILEKMDGTEELLVKLNREDLLRKQRTFDNGSIPHQIHLGELHAILRRQEDFYPFLKDNREKIEKILTFRIPYYVGPLARGNSRFAWMTRKSEETITPWNFEEVVDKGASAQSFIERMTNFDKNLPNEKVLPKHSLLYEYFTVYNELTKVKYVTEGMRKPAFLSGEQKKAIVDLLFKTNRKVTVKQLKEDYFKKIECFDSVEISGVEDRFNASLGTYHDLLKIIKDKDFLDNEENEDILEDIVLTLTLFEDREMIEERLKTYAHLFDDKVMKQLKRRRYTGWGRLSRKLINGIRDKQSGKTILDFLKSDGFANRNFMQLIHDDSLTFKEDIQKAQVSGQGDSLHEHIANLAGSPAIKKGILQTVKVVDELVKVMGRHKPENIVIEMARENQTTQKGQKNSRERMKRIEEGIKELGSQILKEHPVENTQLQNEKLYLYYLQNGRDMYVDQELDINRLSDYDVDHIVPQSFLKDDSIDNKVLTRSDKARGKSDNVPSEEVVKKMKNYWRQLLNAKLITQRKFDNLTKAERGGLSELDKAGFIKRQLVETRQITKHVAQILDSRMNTKYDENDKLIREVKVITLKSKLVSDFRKDFQFYKVREINNYHHAHDAYLNAVVGTALIKKYPKLESEFVYGDYKVYDVRKMIAKSEQEIGKATAKYFFYSNIMNFFKTEITLANGEIRKRPLIETNGETGEIVWDKGRDFATVRKVLSMPQVNIVKKTEVQTGGFSKESILPKRNSDKLIARKKDWDPKKYGGFDSPTVAYSVLVVAKVEKGKSKKLKSVKELLGITIMERSSFEKNPIDFLEAKGYKEVKKDLIIKLPKYSLFELENGRKRMLASAGELQKGNELALPSKYVNFLYLASHYEKLKGSPEDNEQKQLFVEQHKHYLDEIIEQISEFSKRVILADANLDKVLSAYNKHRDKPIREQAENIIHLFTLTNLGAPAAFKYFDTTIDRKRYTSTKEVLDATLIHQSITGLYETRIDLSQLGGDGGGGSEAAAKGGGGGVLNLEEEYRLHEKPVPSSIDPSWLQLFPTVWAERAGMGLANQVPPVVVELRSGASPVAVRQYPMSKEAREGIRPHIQRFLDLGVLVPCQSPWNTPLLPVKKPGTNDYRPVQDLREINKRVQDIHPTVPNPYNLLSSLPPSHTWYSVLDLKDAFFCLKLHPNSQPLFAFEWRDPEKGNTGQLTWTRLPQGFKNSPTLFNEALHRDLAPFRALNPQVVLLQYVDDLLVAAPTYRDCKEGTQKLLQELSKLGYRVSAKKAQLCQKEVTYLGYLLKEGKRWLTPARKATVMKIPPPTTPRQVREFLGTAGFCRLWIPGFASLAAPLYPLTKPSIPFIWTEEHQKAFDRIKEALLSAPALALPDLTKPFTLYVDERAGVARGVLTQTLGPWRRPVAYLSKKLDPVASGWPTCLKAVAAVALLLKDADKLTLGQNVTVIASHSLESIVRQPPDRWMTNARMTHYQSLLLNERVSFAPPAVLNPATLLPVESEATPVHRCSEILAEETGTRRDLKDQPLPGVPAWYTDGSSFIAEGKRRAGAAIVDGKRTVWASSLPEGTSAQKAELVALTQALRLAEGKDINIYTDSRYAFATAHIHGAIYKQRGWLTSAGKDIKNKEEILALLEAIHLPKRVAIIHCPGHQKGNDPVATGNRRADEAAKQAALSTRVLAETTKPAGKRTADGSEFEKRTADGSEFESPKKKAKVE

SEQ ID NO: 855 - protein, 2089 aa, synthetic construct
MPAAKRVKLDGGDKKYSIGLDIGTNSVGWAVITDEYKVPSKKFKVLGNTDRHSIKKNLIGALLFDSGETAEATRLKRTARRRYTRRKNRICYLQEIFSNEMAKVDDSFFHRLEESFLVEEDKKHERHPIFGNIVDEVAYHEKYPTIYHLRKKLVDSTDKADLRLIYLALAHMIKFRGHFLIEGDLNPDNSDVDKLFIQLVQTYNQLFEENPINASGVDAKAILSARLSKSRRLENLIAQLPGEKKNGLFGNLIALSLGLTPNFKSNFDLAEDAKLQLSKDTYDDDLDNLLAQIGDQYADLFLAAKNLSDAILLSDILRVNTEITKAPLSASMIKRYDEHHQDLTLLKALVRQQLPEKYKEIFFDQSKNGYAGYIDGGASQEEFYKFIKPILEKMDGTEELLVKLNREDLLRKQRTFDNGSIPHQIHLGELHAILRRQEDFYPFLKDNREKIEKILTFRIPYYVGPLARGNSRFAWMTRKSEETITPWNFEEVVDKGASAQSFIERMTNFDKNLPNEKVLPKHSLLYEYFTVYNELTKVKYVTEGMRKPAFLSGEQKKAIVDLLFKTNRKVTVKQLKEDYFKKIECFDSVEISGVEDRFNASLGTYHDLLKIIKDKDFLDNEENEDILEDIVLTLTLFEDREMIEERLKTYAHLFDDKVMKQLKRRRYTGWGRLSRKLINGIRDKQSGKTILDFLKSDGFANRNFMQLIHDDSLTFKEDIQKAQVSGQGDSLHEHIANLAGSPAIKKGILQTVKVVDELVKVMGRHKPENIVIEMARENQTTQKGQKNSRERMKRIEEGIKELGSQILKEHPVENTQLQNEKLYLYYLQNGRDMYVDQELDINRLSDYDVDHIVPQSFLKDDSIDNKVLTRSDKARGKSDNVPSEEVVKKMKNYWRQLLNAKLITQRKFDNLTKAERGGLSELDKAGFIKRQLVETRQITKHVAQILDSRMNTKYDENDKLIREVKVITLKSKLVSDFRKDFQFYKVREINNYHHAHDAYLNAVVGTALIKKYPKLESEFVYGDYKVYDVRKMIAKSEQEIGKATAKYFFYSNIMNFFKTEITLANGEIRKRPLIETNGETGEIVWDKGRDFATVRKVLSMPQVNIVKKTEVQTGGFSKESILPKRNSDKLIARKKDWDPKKYGGFDSPTVAYSVLVVAKVEKGKSKKLKSVKELLGITIMERSSFEKNPIDFLEAKGYKEVKKDLIIKLPKYSLFELENGRKRMLASAGELQKGNELALPSKYVNFLYLASHYEKLKGSPEDNEQKQLFVEQHKHYLDEIIEQISEFSKRVILADANLDKVLSAYNKHRDKPIREQAENIIHLFTLTNLGAPAAFKYFDTTIDRKRYTSTKEVLDATLIHQSITGLYETRIDLSQLGGDGGGGSGGGGGVLNLEEEYRLHEKPVPSSIDPSWLQLFPTVWAERAGMGLANQVPPVVVELRSGASPVAVRQYPMSKEAREGIRPHIQRFLDLGVLVPCQSPWNTPLLPVKKPGTNDYRPVQDLREINKRVQDIHPTVPNPYNLLSSLPPSHTWYSVLDLKDAFFCLKLHPNSQPLFAFEWRDPEKGNTGQLTWTRLPQGFKNSPTLFNEALHRDLAPFRALNPQVVLLQYVDDLLVAAPTYRDCKEGTQKLLQELSKLGYRVSAKKAQLCQKEVTYLGYLLKEGKRWLTPARKATVMKIPPPTTPRQVREFLGTAGFCRLWIPGFASLAAPLYPLTKPSIPFIWTEEHQKAFDRIKEALLSAPALALPDLTKPFTLYVDERAGVARGVLTQTLGPWRRPVAYLSKKLDPVASGWPTCLKAVAAVALLLKDADKLTLGQNVTVIASHSLESIVRQPPDRWMTNARMTHYQSLLLNERVSFAPPAVLNPATLLPVESEATPVHRCSEILAEETGTRRDLKDQPLPGVPAWYTDGSSFIAEGKRRAGAAIVDGKRTVWASSLPEGTSAQKAELVALTQALRLAEGKDINIYTDSRYAFATAHIHGAIYKQRGWLTSAGKDIKNKEEILALLEAIHLPKRVAIIHCPGHQKGNDPVATGNRRADEAAKQAALSTRVLAETTKPAGKRTADGSEFEKRTADGSEFESPKKKAKVE

SEQ ID NO: 856 - protein, 2094 aa, synthetic construct
MPAAKRVKLDGGDKKYSIGLDIGTNSVGWAVITDEYKVPSKKFKVLGNTDRHSIKKNLIGALLFDSGETAEATRLKRTARRRYTRRKNRICYLQEIFSNEMAKVDDSFFHRLEESFLVEEDKKHERHPIFGNIVDEVAYHEKYPTIYHLRKKLVDSTDKADLRLIYLALAHMIKFRGHFLIEGDLNPDNSDVDKLFIQLVQTYNQLFEENPINASGVDAKAILSARLSKSRRLENLIAQLPGEKKNGLFGNLIALSLGLTPNFKSNFDLAEDAKLQLSKDTYDDDLDNLLAQIGDQYADLFLAAKNLSDAILLSDILRVNTEITKAPLSASMIKRYDEHHQDLTLLKALVRQQLPEKYKEIFFDQSKNGYAGYIDGGASQEEFYKFIKPILEKMDGTEELLVKLNREDLLRKQRTFDNGSIPHQIHLGELHAILRRQEDFYPFLKDNREKIEKILTFRIPYYVGPLARGNSRFAWMTRKSEETITPWNFEEVVDKGASAQSFIERMTNFDKNLPNEKVLPKHSLLYEYFTVYNELTKVKYVTEGMRKPAFLSGEQKKAIVDLLFKTNRKVTVKQLKEDYFKKIECFDSVEISGVEDRFNASLGTYHDLLKIIKDKDFLDNEENEDILEDIVLTLTLFEDREMIEERLKTYAHLFDDKVMKQLKRRRYTGWGRLSRKLINGIRDKQSGKTILDFLKSDGFANRNFMQLIHDDSLTFKEDIQKAQVSGQGDSLHEHIANLAGSPAIKKGILQTVKVVDELVKVMGRHKPENIVIEMARENQTTQKGQKNSRERMKRIEEGIKELGSQILKEHPVENTQLQNEKLYLYYLQNGRDMYVDQELDINRLSDYDVDHIVPQSFLKDDSIDNKVLTRSDKARGKSDNVPSEEVVKKMKNYWRQLLNAKLITQRKFDNLTKAERGGLSELDKAGFIKRQLVETRQITKHVAQILDSRMNTKYDENDKLIREVKVITLKSKLVSDFRKDFQFYKVREINNYHHAHDAYLNAVVGTALIKKYPKLESEFVYGDYKVYDVRKMIAKSEQEIGKATAKYFFYSNIMNFFKTEITLANGEIRKRPLIETNGETGEIVWDKGRDFATVRKVLSMPQVNIVKKTEVQTGGFSKESILPKRNSDKLIARKKDWDPKKYGGFDSPTVAYSVLVVAKVEKGKSKKLKSVKELLGITIMERSSFEKNPIDFLEAKGYKEVKKDLIIKLPKYSLFELENGRKRMLASAGELQKGNELALPSKYVNFLYLASHYEKLKGSPEDNEQKQLFVEQHKHYLDEIIEQISEFSKRVILADANLDKVLSAYNKHRDKPIREQAENIIHLFTLTNLGAPAAFKYFDTTIDRKRYTSTKEVLDATLIHQSITGLYETRIDLSQLGGDGGEAAAKPAPGGGGGVLNLEEEYRLHEKPVPSSIDPSWLQLFPTVWAERAGMGLANQVPPVVVELRSGASPVAVRQYPMSKEAREGIRPHIQRFLDLGVLVPCQSPWNTPLLPVKKPGTNDYRPVQDLREINKRVQDIHPTVPNPYNLLSSLPPSHTWYSVLDLKDAFFCLKLHPNSQPLFAFEWRDPEKGNTGQLTWTRLPQGFKNSPTLFNEALHRDLAPFRALNPQVVLLQYVDDLLVAAPTYRDCKEGTQKLLQELSKLGYRVSAKKAQLCQKEVTYLGYLLKEGKRWLTPARKATVMKIPPPTTPRQVREFLGTAGFCRLWIPGFASLAAPLYPLTKPSIPFIWTEEHQKAFDRIKEALLSAPALALPDLTKPFTLYVDERAGVARGVLTQTLGPWRRPVAYLSKKLDPVASGWPTCLKAVAAVALLLKDADKLTLGQNVTVIASHSLESIVRQPPDRWMTNARMTHYQSLLLNERVSFAPPAVLNPATLLPVESEATPVHRCSEILAEETGTRRDLKDQPLPGVPAWYTDGSSFIAEGKRRAGAAIVDGKRTVWASSLPEGTSAQKAELVALTQALRLAEGKDINIYTDSRYAFATAHIHGAIYKQRGWLTSAGKDIKNKEEILALLEAIHLPKRVAIIHCPGHQKGNDPVATGNRRADEAAKQAALSTRVLAETTKPAGKRTADGSEFEKRTADGSEFESPKKKAKVE

SEQ ID NO: 857 - protein, 2094 aa, synthetic construct
MPAAKRVKLDGGDKKYSIGLDIGTNSVGWAVITDEYKVPSKKFKVLGNTDRHSIKKNLIGALLFDSGETAEATRLKRTARRRYTRRKNRICYLQEIFSNEMAKVDDSFFHRLEESFLVEEDKKHERHPIFGNIVDEVAYHEKYPTIYHLRKKLVDSTDKADLRLIYLALAHMIKFRGHFLIEGDLNPDNSDVDKLFIQLVQTYNQLFEENPINASGVDAKAILSARLSKSRRLENLIAQLPGEKKNGLFGNLIALSLGLTPNFKSNFDLAEDAKLQLSKDTYDDDLDNLLAQIGDQYADLFLAAKNLSDAILLSDILRVNTEITKAPLSASMIKRYDEHHQDLTLLKALVRQQLPEKYKEIFFDQSKNGYAGYIDGGASQEEFYKFIKPILEKMDGTEELLVKLNREDLLRKQRTFDNGSIPHQIHLGELHAILRRQEDFYPFLKDNREKIEKILTFRIPYYVGPLARGNSRFAWMTRKSEETITPWNFEEVVDKGASAQSFIERMTNFDKNLPNEKVLPKHSLLYEYFTVYNELTKVKYVTEGMRKPAFLSGEQKKAIVDLLFKTNRKVTVKQLKEDYFKKIECFDSVEISGVEDRFNASLGTYHDLLKIIKDKDFLDNEENEDILEDIVLTLTLFEDREMIEERLKTYAHLFDDKVMKQLKRRRYTGWGRLSRKLINGIRDKQSGKTILDFLKSDGFANRNFMQLIHDDSLTFKEDIQKAQVSGQGDSLHEHIANLAGSPAIKKGILQTVKVVDELVKVMGRHKPENIVIEMARENQTTQKGQKNSRERMKRIEEGIKELGSQILKEHPVENTQLQNEKLYLYYLQNGRDMYVDQELDINRLSDYDVDHIVPQSFLKDDSIDNKVLTRSDKARGKSDNVPSEEVVKKMKNYWRQLLNAKLITQRKFDNLTKAERGGLSELDKAGFIKRQLVETRQITKHVAQILDSRMNTKYDENDKLIREVKVITLKSKLVSDFRKDFQFYKVREINNYHHAHDAYLNAVVGTALIKKYPKLESEFVYGDYKVYDVRKMIAKSEQEIGKATAKYFFYSNIMNFFKTEITLANGEIRKRPLIETNGETGEIVWDKGRDFATVRKVLSMPQVNIVKKTEVQTGGFSKESILPKRNSDKLIARKKDWDPKKYGGFDSPTVAYSVLVVAKVEKGKSKKLKSVKELLGITIMERSSFEKNPIDFLEAKGYKEVKKDLIIKLPKYSLFELENGRKRMLASAGELQKGNELALPSKYVNFLYLASHYEKLKGSPEDNEQKQLFVEQHKHYLDEIIEQISEFSKRVILADANLDKVLSAYNKHRDKPIREQAENIIHLFTLTNLGAPAAFKYFDTTIDRKRYTSTKEVLDATLIHQSITGLYETRIDLSQLGGDGGGSSEAAAKGGSGGVLNLEEEYRLHEKPVPSSIDPSWLQLFPTVWAERAGMGLANQVPPVVVELRSGASPVAVRQYPMSKEAREGIRPHIQRFLDLGVLVPCQSPWNTPLLPVKKPGTNDYRPVQDLREINKRVQDIHPTVPNPYNLLSSLPPSHTWYSVLDLKDAFFCLKLHPNSQPLFAFEWRDPEKGNTGQLTWTRLPQGFKNSPTLFNEALHRDLAPFRALNPQVVLLQYVDDLLVAAPTYRDCKEGTQKLLQELSKLGYRVSAKKAQLCQKEVTYLGYLLKEGKRWLTPARKATVMKIPPPTTPRQVREFLGTAGFCRLWIPGFASLAAPLYPLTKPSIPFIWTEEHQKAFDRIKEALLSAPALALPDLTKPFTLYVDERAGVARGVLTQTLGPWRRPVAYLSKKLDPVASGWPTCLKAVAAVALLLKDADKLTLGQNVTVIASHSLESIVRQPPDRWMTNARMTHYQSLLLNERVSFAPPAVLNPATLLPVESEATPVHRCSEILAEETGTRRDLKDQPLPGVPAWYTDGSSFIAEGKRRAGAAIVDGKRTVWASSLPEGTSAQKAELVALTQALRLAEGKDINIYTDSRYAFATAHIHGAIYKQRGWLTSAGKDIKNKEEILALLEAIHLPKRVAIIHCPGHQKGNDPVATGNRRADEAAKQAALSTRVLAETTKPAGKRTADGSEFEKRTADGSEFESPKKKAKVE

SEQ ID NO: 858 - protein, 2092 aa, synthetic construct
MPAAKRVKLDGGDKKYSIGLDIGTNSVGWAVITDEYKVPSKKFKVLGNTDRHSIKKNLIGALLFDSGETAEATRLKRTARRRYTRRKNRICYLQEIFSNEMAKVDDSFFHRLEESFLVEEDKKHERHPIFGNIVDEVAYHEKYPTIYHLRKKLVDSTDKADLRLIYLALAHMIKFRGHFLIEGDLNPDNSDVDKLFIQLVQTYNQLFEENPINASGVDAKAILSARLSKSRRLENLIAQLPGEKKNGLFGNLIALSLGLTPNFKSNFDLAEDAKLQLSKDTYDDDLDNLLAQIGDQYADLFLAAKNLSDAILLSDILRVNTEITKAPLSASMIKRYDEHHQDLTLLKALVRQQLPEKYKEIFFDQSKNGYAGYIDGGASQEEFYKFIKPILEKMDGTEELLVKLNREDLLRKQRTFDNGSIPHQIHLGELHAILRRQEDFYPFLKDNREKIEKILTFRIPYYVGPLARGNSRFAWMTRKSEETITPWNFEEVVDKGASAQSFIERMTNFDKNLPNEKVLPKHSLLYEYFTVYNELTKVKYVTEGMRKPAFLSGEQKKAIVDLLFKTNRKVTVKQLKEDYFKKIECFDSVEISGVEDRFNASLGTYHDLLKIIKDKDFLDNEENEDILEDIVLTLTLFEDREMIEERLKTYAHLFDDKVMKQLKRRRYTGWGRLSRKLINGIRDKQSGKTILDFLKSDGFANRNFMQLIHDDSLTFKEDIQKAQVSGQGDSLHEHIANLAGSPAIKKGILQTVKVVDELVKVMGRHKPENIVIEMARENQTTQKGQKNSRERMKRIEEGIKELGSQILKEHPVENTQLQNEKLYLYYLQNGRDMYVDQELDINRLSDYDVDHIVPQSFLKDDSIDNKVLTRSDKARGKSDNVPSEEVVKKMKNYWRQLLNAKLITQRKFDNLTKAERGGLSELDKAGFIKRQLVETRQITKHVAQILDSRMNTKYDENDKLIREVKVITLKSKLVSDFRKDFQFYKVREINNYHHAHDAYLNAVVGTALIKKYPKLESEFVYGDYKVYDVRKMIAKSEQEIGKATAKYFFYSNIMNFFKTEITLANGEIRKRPLIETNGETGEIVWDKGRDFATVRKVLSMPQVNIVKKTEVQTGGFSKESILPKRNSDKLIARKKDWDPKKYGGFDSPTVAYSVLVVAKVEKGKSKKLKSVKELLGITIMERSSFEKNPIDFLEAKGYKEVKKDLIIKLPKYSLFELENGRKRMLASAGELQKGNELALPSKYVNFLYLASHYEKLKGSPEDNEQKQLFVEQHKHYLDEIIEQISEFSKRVILADANLDKVLSAYNKHRDKPIREQAENIIHLFTLTNLGAPAAFKYFDTTIDRKRYTSTKEVLDATLIHQSITGLYETRIDLSQLGGDGGPAPGGSGGGGGVLNLEEEYRLHEKPVPSSIDPSWLQLFPTVWAERAGMGLANQVPPVVVELRSGASPVAVRQYPMSKEAREGIRPHIQRFLDLGVLVPCQSPWNTPLLPVKKPGTNDYRPVQDLREINKRVQDIHPTVPNPYNLLSSLPPSHTWYSVLDLKDAFFCLKLHPNSQPLFAFEWRDPEKGNTGQLTWTRLPQGFKNSPTLFNEALHRDLAPFRALNPQVVLLQYVDDLLVAAPTYRDCKEGTQKLLQELSKLGYRVSAKKAQLCQKEVTYLGYLLKEGKRWLTPARKATVMKIPPPTTPRQVREFLGTAGFCRLWIPGFASLAAPLYPLTKPSIPFIWTEEHQKAFDRIKEALLSAPALALPDLTKPFTLYVDERAGVARGVLTQTLGPWRRPVAYLSKKLDPVASGWPTCLKAVAAVALLLKDADKLTLGQNVTVIASHSLESIVRQPPDRWMTNARMTHYQSLLLNERVSFAPPAVLNPATLLPVESEATPVHRCSEILAEETGTRRDLKDQPLPGVPAWYTDGSSFIAEGKRRAGAAIVDGKRTVWASSLPEGTSAQKAELVALTQALRLAEGKDINIYTDSRYAFATAHIHGAIYKQRGWLTSAGKDIKNKEEILALLEAIHLPKRVAIIHCPGHQKGNDPVATGNRRADEAAKQAALSTRVLAETTKPAGKRTADGSEFEKRTADGSEFESPKKKAKVE

SEQ ID NO: 859 - protein, 2089 aa, synthetic construct
MPAAKRVKLDGGDKKYSIGLDIGTNSVGWAVITDEYKVPSKKFKVLGNTDRHSIKKNLIGALLFDSGETAEATRLKRTARRRYTRRKNRICYLQEIFSNEMAKVDDSFFHRLEESFLVEEDKKHERHPIFGNIVDEVAYHEKYPTIYHLRKKLVDSTDKADLRLIYLALAHMIKFRGHFLIEGDLNPDNSDVDKLFIQLVQTYNQLFEENPINASGVDAKAILSARLSKSRRLENLIAQLPGEKKNGLFGNLIALSLGLTPNFKSNFDLAEDAKLQLSKDTYDDDLDNLLAQIGDQYADLFLAAKNLSDAILLSDILRVNTEITKAPLSASMIKRYDEHHQDLTLLKALVRQQLPEKYKEIFFDQSKNGYAGYIDGGASQEEFYKFIKPILEKMDGTEELLVKLNREDLLRKQRTFDNGSIPHQIHLGELHAILRRQEDFYPFLKDNREKIEKILTFRIPYYVGPLARGNSRFAWMTRKSEETITPWNFEEVVDKGASAQSFIERMTNFDKNLPNEKVLPKHSLLYEYFTVYNELTKVKYVTEGMRKPAFLSGEQKKAIVDLLFKTNRKVTVKQLKEDYFKKIECFDSVEISGVEDRFNASLGTYHDLLKIIKDKDFLDNEENEDILEDIVLTLTLFEDREMIEERLKTYAHLFDDKVMKQLKRRRYTGWGRLSRKLINGIRDKQSGKTILDFLKSDGFANRNFMQLIHDDSLTFKEDIQKAQVSGQGDSLHEHIANLAGSPAIKKGILQTVKVVDELVKVMGRHKPENIVIEMARENQTTQKGQKNSRERMKRIEEGIKELGSQILKEHPVENTQLQNEKLYLYYLQNGRDMYVDQELDINRLSDYDVDHIVPQSFLKDDSIDNKVLTRSDKARGKSDNVPSEEVVKKMKNYWRQLLNAKLITQRKFDNLTKAERGGLSELDKAGFIKRQLVETRQITKHVAQILDSRMNTKYDENDKLIREVKVITLKSKLVSDFRKDFQFYKVREINNYHHAHDAYLNAVVGTALIKKYPKLESEFVYGDYKVYDVRKMIAKSEQEIGKATAKYFFYSNIMNFFKTEITLANGEIRKRPLIETNGETGEIVWDKGRDFATVRKVLSMPQVNIVKKTEVQTGGFSKESILPKRNSDKLIARKKDWDPKKYGGFDSPTVAYSVLVVAKVEKGKSKKLKSVKELLGITIMERSSFEKNPIDFLEAKGYKEVKKDLIIKLPKYSLFELENGRKRMLASAGELQKGNELALPSKYVNFLYLASHYEKLKGSPEDNEQKQLFVEQHKHYLDEIIEQISEFSKRVILADANLDKVLSAYNKHRDKPIREQAENIIHLFTLTNLGAPAAFKYFDTTIDRKRYTSTKEVLDATLIHQSITGLYETRIDLSQLGGDGGPAPGSSGGVLNLEEEYRLHEKPVPSSIDPSWLQLFPTVWAERAGMGLANQVPPVVVELRSGASPVAVRQYPMSKEAREGIRPHIQRFLDLGVLVPCQSPWNTPLLPVKKPGTNDYRPVQDLREINKRVQDIHPTVPNPYNLLSSLPPSHTWYSVLDLKDAFFCLKLHPNSQPLFAFEWRDPEKGNTGQLTWTRLPQGFKNSPTLFNEALHRDLAPFRALNPQVVLLQYVDDLLVAAPTYRDCKEGTQKLLQELSKLGYRVSAKKAQLCQKEVTYLGYLLKEGKRWLTPARKATVMKIPPPTTPRQVREFLGTAGFCRLWIPGFASLAAPLYPLTKPSIPFIWTEEHQKAFDRIKEALLSAPALALPDLTKPFTLYVDERAGVARGVLTQTLGPWRRPVAYLSKKLDPVASGWPTCLKAVAAVALLLKDADKLTLGQNVTVIASHSLESIVRQPPDRWMTNARMTHYQSLLLNERVSFAPPAVLNPATLLPVESEATPVHRCSEILAEETGTRRDLKDQPLPGVPAWYTDGSSFIAEGKRRAGAAIVDGKRTVWASSLPEGTSAQKAELVALTQALRLAEGKDINIYTDSRYAFATAHIHGAIYKQRGWLTSAGKDIKNKEEILALLEAIHLPKRVAIIHCPGHQKGNDPVATGNRRADEAAKQAALSTRVLAETTKPAGKRTADGSEFEKRTADGSEFESPKKKAKVE

SEQ ID NO: 860 - protein, 2090 aa, synthetic construct
MPAAKRVKLDGGDKKYSIGLDIGTNSVGWAVITDEYKVPSKKFKVLGNTDRHSIKKNLIGALLFDSGETAEATRLKRTARRRYTRRKNRICYLQEIFSNEMAKVDDSFFHRLEESFLVEEDKKHERHPIFGNIVDEVAYHEKYPTIYHLRKKLVDSTDKADLRLIYLALAHMIKFRGHFLIEGDLNPDNSDVDKLFIQLVQTYNQLFEENPINASGVDAKAILSARLSKSRRLENLIAQLPGEKKNGLFGNLIALSLGLTPNFKSNFDLAEDAKLQLSKDTYDDDLDNLLAQIGDQYADLFLAAKNLSDAILLSDILRVNTEITKAPLSASMIKRYDEHHQDLTLLKALVRQQLPEKYKEIFFDQSKNGYAGYIDGGASQEEFYKFIKPILEKMDGTEELLVKLNREDLLRKQRTFDNGSIPHQIHLGELHAILRRQEDFYPFLKDNREKIEKILTFRIPYYVGPLARGNSRFAWMTRKSEETITPWNFEEVVDKGASAQSFIERMTNFDKNLPNEKVLPKHSLLYEYFTVYNELTKVKYVTEGMRKPAFLSGEQKKAIVDLLFKTNRKVTVKQLKEDYFKKIECFDSVEISGVEDRFNASLGTYHDLLKIIKDKDFLDNEENEDILEDIVLTLTLFEDREMIEERLKTYAHLFDDKVMKQLKRRRYTGWGRLSRKLINGIRDKQSGKTILDFLKSDGFANRNFMQLIHDDSLTFKEDIQKAQVSGQGDSLHEHIANLAGSPAIKKGILQTVKVVDELVKVMGRHKPENIVIEMARENQTTQKGQKNSRERMKRIEEGIKELGSQILKEHPVENTQLQNEKLYLYYLQNGRDMYVDQELDINRLSDYDVDHIVPQSFLKDDSIDNKVLTRSDKARGKSDNVPSEEVVKKMKNYWRQLLNAKLITQRKFDNLTKAERGGLSELDKAGFIKRQLVETRQITKHVAQILDSRMNTKYDENDKLIREVKVITLKSKLVSDFRKDFQFYKVREINNYHHAHDAYLNAVVGTALIKKYPKLESEFVYGDYKVYDVRKMIAKSEQEIGKATAKYFFYSNIMNFFKTEITLANGEIRKRPLIETNGETGEIVWDKGRDFATVRKVLSMPQVNIVKKTEVQTGGFSKESILPKRNSDKLIARKKDWDPKKYGGFDSPTVAYSVLVVAKVEKGKSKKLKSVKELLGITIMERSSFEKNPIDFLEAKGYKEVKKDLIIKLPKYSLFELENGRKRMLASAGELQKGNELALPSKYVNFLYLASHYEKLKGSPEDNEQKQLFVEQHKHYLDEIIEQISEFSKRVILADANLDKVLSAYNKHRDKPIREQAENIIHLFTLTNLGAPAAFKYFDTTIDRKRYTSTKEVLDATLIHQSITGLYETRIDLSQLGGDGGPAPAPAPGGVLNLEEEYRLHEKPVPSSIDPSWLQLFPTVWAERAGMGLANQVPPVVVELRSGASPVAVRQYPMSKEAREGIRPHIQRFLDLGVLVPCQSPWNTPLLPVKKPGTNDYRPVQDLREINKRVQDIHPTVPNPYNLLSSLPPSHTWYSVLDLKDAFFCLKLHPNSQPLFAFEWRDPEKGNTGQLTWTRLPQGFKNSPTLFNEALHRDLAPFRALNPQVVLLQYVDDLLVAAPTYRDCKEGTQKLLQELSKLGYRVSAKKAQLCQKEVTYLGYLLKEGKRWLTPARKATVMKIPPPTTPRQVREFLGTAGFCRLWIPGFASLAAPLYPLTKPSIPFIWTEEHQKAFDRIKEALLSAPALALPDLTKPFTLYVDERAGVARGVLTQTLGPWRRPVAYLSKKLDPVASGWPTCLKAVAAVALLLKDADKLTLGQNVTVIASHSLESIVRQPPDRWMTNARMTHYQSLLLNERVSFAPPAVLNPATLLPVESEATPVHRCSEILAEETGTRRDLKDQPLPGVPAWYTDGSSFIAEGKRRAGAAIVDGKRTVWASSLPEGTSAQKAELVALTQALRLAEGKDINIYTDSRYAFATAHIHGAIYKQRGWLTSAGKDIKNKEEILALLEAIHLPKRVAIIHCPGHQKGNDPVATGNRRADEAAKQAALSTRVLAETTKPAGKRTADGSEFEKRTADGSEFESPKKKAKVE

SEQ ID NO: 861 - protein, 2094 aa, synthetic construct
MPAAKRVKLDGGDKKYSIGLDIGTNSVGWAVITDEYKVPSKKFKVLGNTDRHSIKKNLIGALLFDSGETAEATRLKRTARRRYTRRKNRICYLQEIFSNEMAKVDDSFFHRLEESFLVEEDKKHERHPIFGNIVDEVAYHEKYPTIYHLRKKLVDSTDKADLRLIYLALAHMIKFRGHFLIEGDLNPDNSDVDKLFIQLVQTYNQLFEENPINASGVDAKAILSARLSKSRRLENLIAQLPGEKKNGLFGNLIALSLGLTPNFKSNFDLAEDAKLQLSKDTYDDDLDNLLAQIGDQYADLFLAAKNLSDAILLSDILRVNTEITKAPLSASMIKRYDEHHQDLTLLKALVRQQLPEKYKEIFFDQSKNGYAGYIDGGASQEEFYKFIKPILEKMDGTEELLVKLNREDLLRKQRTFDNGSIPHQIHLGELHAILRRQEDFYPFLKDNREKIEKILTFRIPYYVGPLARGNSRFAWMTRKSEETITPWNFEEVVDKGASAQSFIERMTNFDKNLPNEKVLPKHSLLYEYFTVYNELTKVKYVTEGMRKPAFLSGEQKKAIVDLLFKTNRKVTVKQLKEDYFKKIECFDSVEISGVEDRFNASLGTYHDLLKIIKDKDFLDNEENEDILEDIVLTLTLFEDREMIEERLKTYAHLFDDKVMKQLKRRRYTGWGRLSRKLINGIRDKQSGKTILDFLKSDGFANRNFMQLIHDDSLTFKEDIQKAQVSGQGDSLHEHIANLAGSPAIKKGILQTVKVVDELVKVMGRHKPENIVIEMARENQTTQKGQKNSRERMKRIEEGIKELGSQILKEHPVENTQLQNEKLYLYYLQNGRDMYVDQELDINRLSDYDVDHIVPQSFLKDDSIDNKVLTRSDKARGKSDNVPSEEVVKKMKNYWRQLLNAKLITQRKFDNLTKAERGGLSELDKAGFIKRQLVETRQITKHVAQILDSRMNTKYDENDKLIREVKVITLKSKLVSDFRKDFQFYKVREINNYHHAHDAYLNAVVGTALIKKYPKLESEFVYGDYKVYDVRKMIAKSEQEIGKATAKYFFYSNIMNFFKTEITLANGEIRKRPLIETNGETGEIVWDKGRDFATVRKVLSMPQVNIVKKTEVQTGGFSKESILPKRNSDKLIARKKDWDPKKYGGFDSPTVAYSVLVVAKVEKGKSKKLKSVKELLGITIMERSSFEKNPIDFLEAKGYKEVKKDLIIKLPKYSLFELENGRKRMLASAGELQKGNELALPSKYVNFLYLASHYEKLKGSPEDNEQKQLFVEQHKHYLDEIIEQISEFSKRVILADANLDKVLSAYNKHRDKPIREQAENIIHLFTLTNLGAPAAFKYFDTTIDRKRYTSTKEVLDATLIHQSITGLYETRIDLSQLGGDGGGGSGGGEAAAKGGVLNLEEEYRLHEKPVPSSIDPSWLQLFPTVWAERAGMGLANQVPPVVVELRSGASPVAVRQYPMSKEAREGIRPHIQRFLDLGVLVPCQSPWNTPLLPVKKPGTNDYRPVQDLREINKRVQDIHPTVPNPYNLLSSLPPSHTWYSVLDLKDAFFCLKLHPNSQPLFAFEWRDPEKGNTGQLTWTRLPQGFKNSPTLFNEALHRDLAPFRALNPQVVLLQYVDDLLVAAPTYRDCKEGTQKLLQELSKLGYRVSAKKAQLCQKEVTYLGYLLKEGKRWLTPARKATVMKIPPPTTPRQVREFLGTAGFCRLWIPGFASLAAPLYPLTKPSIPFIWTEEHQKAFDRIKEALLSAPALALPDLTKPFTLYVDERAGVARGVLTQTLGPWRRPVAYLSKKLDPVASGWPTCLKAVAAVALLLKDADKLTLGQNVTVIASHSLESIVRQPPDRWMTNARMTHYQSLLLNERVSFAPPAVLNPATLLPVESEATPVHRCSEILAEETGTRRDLKDQPLPGVPAWYTDGSSFIAEGKRRAGAAIVDGKRTVWASSLPEGTSAQKAELVALTQALRLAEGKDINIYTDSRYAFATAHIHGAIYKQRGWLTSAGKDIKNKEEILALLEAIHLPKRVAIIHCPGHQKGNDPVATGNRRADEAAKQAALSTRVLAETTKPAGKRTADGSEFEKRTADGSEFESPKKKAKVE

SEQ ID NO: 862 - protein, 2095 aa, synthetic construct
MPAAKRVKLDGGDKKYSIGLDIGTNSVGWAVITDEYKVPSKKFKVLGNTDRHSIKKNLIGALLFDSGETAEATRLKRTARRRYTRRKNRICYLQEIFSNEMAKVDDSFFHRLEESFLVEEDKKHERHPIFGNIVDEVAYHEKYPTIYHLRKKLVDSTDKADLRLIYLALAHMIKFRGHFLIEGDLNPDNSDVDKLFIQLVQTYNQLFEENPINASGVDAKAILSARLSKSRRLENLIAQLPGEKKNGLFGNLIALSLGLTPNFKSNFDLAEDAKLQLSKDTYDDDLDNLLAQIGDQYADLFLAAKNLSDAILLSDILRVNTEITKAPLSASMIKRYDEHHQDLTLLKALVRQQLPEKYKEIFFDQSKNGYAGYIDGGASQEEFYKFIKPILEKMDGTEELLVKLNREDLLRKQRTFDNGSIPHQIHLGELHAILRRQEDFYPFLKDNREKIEKILTFRIPYYVGPLARGNSRFAWMTRKSEETITPWNFEEVVDKGASAQSFIERMTNFDKNLPNEKVLPKHSLLYEYFTVYNELTKVKYVTEGMRKPAFLSGEQKKAIVDLLFKTNRKVTVKQLKEDYFKKIECFDSVEISGVEDRFNASLGTYHDLLKIIKDKDFLDNEENEDILEDIVLTLTLFEDREMIEERLKTYAHLFDDKVMKQLKRRRYTGWGRLSRKLINGIRDKQSGKTILDFLKSDGFANRNFMQLIHDDSLTFKEDIQKAQVSGQGDSLHEHIANLAGSPAIKKGILQTVKVVDELVKVMGRHKPENIVIEMARENQTTQKGQKNSRERMKRIEEGIKELGSQILKEHPVENTQLQNEKLYLYYLQNGRDMYVDQELDINRLSDYDVDHIVPQSFLKDDSIDNKVLTRSDKARGKSDNVPSEEVVKKMKNYWRQLLNAKLITQRKFDNLTKAERGGLSELDKAGFIKRQLVETRQITKHVAQILDSRMNTKYDENDKLIREVKVITLKSKLVSDFRKDFQFYKVREINNYHHAHDAYLNAVVGTALIKKYPKLESEFVYGDYKVYDVRKMIAKSEQEIGKATAKYFFYSNIMNFFKTEITLANGEIRKRPLIETNGETGEIVWDKGRDFATVRKVLSMPQVNIVKKTEVQTGGFSKESILPKRNSDKLIARKKDWDPKKYGGFDSPTVAYSVLVVAKVEKGKSKKLKSVKELLGITIMERSSFEKNPIDFLEAKGYKEVKKDLIIKLPKYSLFELENGRKRMLASAGELQKGNELALPSKYVNFLYLASHYEKLKGSPEDNEQKQLFVEQHKHYLDEIIEQISEFSKRVILADANLDKVLSAYNKHRDKPIREQAENIIHLFTLTNLGAPAAFKYFDTTIDRKRYTSTKEVLDATLIHQSITGLYETRIDLSQLGGDGGGSAGSAAGSGEFGGVLNLEEEYRLHEKPVPSSIDPSWLQLFPTVWAERAGMGLANQVPPVVVELRSGASPVAVRQYPMSKEAREGIRPHIQRFLDLGVLVPCQSPWNTPLLPVKKPGTNDYRPVQDLREINKRVQDIHPTVPNPYNLLSSLPPSHTWYSVLDLKDAFFCLKLHPNSQPLFAFEWRDPEKGNTGQLTWTRLPQGFKNSPTLFNEALHRDLAPFRALNPQVVLLQYVDDLLVAAPTYRDCKEGTQKLLQELSKLGYRVSAKKAQLCQKEVTYLGYLLKEGKRWLTPARKATVMKIPPPTTPRQVREFLGTAGFCRLWIPGFASLAAPLYPLTKPSIPFIWTEEHQKAFDRIKEALLSAPALALPDLTKPFTLYVDERAGVARGVLTQTLGPWRRPVAYLSKKLDPVASGWPTCLKAVAAVALLLKDADKLTLGQNVTVIASHSLESIVRQPPDRWMTNARMTHYQSLLLNERVSFAPPAVLNPATLLPVESEATPVHRCSEILAEETGTRRDLKDQPLPGVPAWYTDGSSFIAEGKRRAGAAIVDGKRTVWASSLPEGTSAQKAELVALTQALRLAEGKDINIYTDSRYAFATAHIHGAIYKQRGWLTSAGKDIKNKEEILALLEAIHLPKRVAIIHCPGHQKGNDPVATGNRRADEAAKQAALSTRVLAETTKPAGKRTADGSEFEKRTADGSEFESPKKKAKVE

SEQ ID NO: 863 - protein, 2094 aa, synthetic construct
MPAAKRVKLDGGDKKYSIGLDIGTNSVGWAVITDEYKVPSKKFKVLGNTDRHSIKKNLIGALLFDSGETAEATRLKRTARRRYTRRKNRICYLQEIFSNEMAKVDDSFFHRLEESFLVEEDKKHERHPIFGNIVDEVAYHEKYPTIYHLRKKLVDSTDKADLRLIYLALAHMIKFRGHFLIEGDLNPDNSDVDKLFIQLVQTYNQLFEENPINASGVDAKAILSARLSKSRRLENLIAQLPGEKKNGLFGNLIALSLGLTPNFKSNFDLAEDAKLQLSKDTYDDDLDNLLAQIGDQYADLFLAAKNLSDAILLSDILRVNTEITKAPLSASMIKRYDEHHQDLTLLKALVRQQLPEKYKEIFFDQSKNGYAGYIDGGASQEEFYKFIKPILEKMDGTEELLVKLNREDLLRKQRTFDNGSIPHQIHLGELHAILRRQEDFYPFLKDNREKIEKILTFRIPYYVGPLARGNSRFAWMTRKSEETITPWNFEEVVDKGASAQSFIERMTNFDKNLPNEKVLPKHSLLYEYFTVYNELTKVKYVTEGMRKPAFLSGEQKKAIVDLLFKTNRKVTVKQLKEDYFKKIECFDSVEISGVEDRFNASLGTYHDLLKIIKDKDFLDNEENEDILEDIVLTLTLFEDREMIEERLKTYAHLFDDKVMKQLKRRRYTGWGRLSRKLINGIRDKQSGKTILDFLKSDGFANRNFMQLIHDDSLTFKEDIQKAQVSGQGDSLHEHIANLAGSPAIKKGILQTVKVVDELVKVMGRHKPENIVIEMARENQTTQKGQKNSRERMKRIEEGIKELGSQILKEHPVENTQLQNEKLYLYYLQNGRDMYVDQELDINRLSDYDVDHIVPQSFLKDDSIDNKVLTRSDKARGKSDNVPSEEVVKKMKNYWRQLLNAKLITQRKFDNLTKAERGGLSELDKAGFIKRQLVETRQITKHVAQILDSRMNTKYDENDKLIREVKVITLKSKLVSDFRKDFQFYKVREINNYHHAHDAYLNAVVGTALIKKYPKLESEFVYGDYKVYDVRKMIAKSEQEIGKATAKYFFYSNIMNFFKTEITLANGEIRKRPLIETNGETGEIVWDKGRDFATVRKVLSMPQVNIVKKTEVQTGGFSKESILPKRNSDKLIARKKDWDPKKYGGFDSPTVAYSVLVVAKVEKGKSKKLKSVKELLGITIMERSSFEKNPIDFLEAKGYKEVKKDLIIKLPKYSLFELENGRKRMLASAGELQKGNELALPSKYVNFLYLASHYEKLKGSPEDNEQKQLFVEQHKHYLDEIIEQISEFSKRVILADANLDKVLSAYNKHRDKPIREQAENIIHLFTLTNLGAPAAFKYFDTTIDRKRYTSTKEVLDATLIHQSITGLYETRIDLSQLGGDGGPAPEAAAKGGSGGVLNLEEEYRLHEKPVPSSIDPSWLQLFPTVWAERAGMGLANQVPPVVVELRSGASPVAVRQYPMSKEAREGIRPHIQRFLDLGVLVPCQSPWNTPLLPVKKPGTNDYRPVQDLREINKRVQDIHPTVPNPYNLLSSLPPSHTWYSVLDLKDAFFCLKLHPNSQPLFAFEWRDPEKGNTGQLTWTRLPQGFKNSPTLFNEALHRDLAPFRALNPQVVLLQYVDDLLVAAPTYRDCKEGTQKLLQELSKLGYRVSAKKAQLCQKEVTYLGYLLKEGKRWLTPARKATVMKIPPPTTPRQVREFLGTAGFCRLWIPGFASLAAPLYPLTKPSIPFIWTEEHQKAFDRIKEALLSAPALALPDLTKPFTLYVDERAGVARGVLTQTLGPWRRPVAYLSKKLDPVASGWPTCLKAVAAVALLLKDADKLTLGQNVTVIASHSLESIVRQPPDRWMTNARMTHYQSLLLNERVSFAPPAVLNPATLLPVESEATPVHRCSEILAEETGTRRDLKDQPLPGVPAWYTDGSSFIAEGKRRAGAAIVDGKRTVWASSLPEGTSAQKAELVALTQALRLAEGKDINIYTDSRYAFATAHIHGAIYKQRGWLTSAGKDIKNKEEILALLEAIHLPKRVAIIHCPGHQKGNDPVATGNRRADEAAKQAALSTRVLAETTKPAGKRTADGSEFEKRTADGSEFESPKKKAKVE

SEQ ID NO: 864 - protein, 2092 aa, synthetic construct
MPAAKRVKLDGGDKKYSIGLDIGTNSVGWAVITDEYKVPSKKFKVLGNTDRHSIKKNLIGALLFDSGETAEATRLKRTARRRYTRRKNRICYLQEIFSNEMAKVDDSFFHRLEESFLVEEDKKHERHPIFGNIVDEVAYHEKYPTIYHLRKKLVDSTDKADLRLIYLALAHMIKFRGHFLIEGDLNPDNSDVDKLFIQLVQTYNQLFEENPINASGVDAKAILSARLSKSRRLENLIAQLPGEKKNGLFGNLIALSLGLTPNFKSNFDLAEDAKLQLSKDTYDDDLDNLLAQIGDQYADLFLAAKNLSDAILLSDILRVNTEITKAPLSASMIKRYDEHHQDLTLLKALVRQQLPEKYKEIFFDQSKNGYAGYIDGGASQEEFYKFIKPILEKMDGTEELLVKLNREDLLRKQRTFDNGSIPHQIHLGELHAILRRQEDFYPFLKDNREKIEKILTFRIPYYVGPLARGNSRFAWMTRKSEETITPWNFEEVVDKGASAQSFIERMTNFDKNLPNEKVLPKHSLLYEYFTVYNELTKVKYVTEGMRKPAFLSGEQKKAIVDLLFKTNRKVTVKQLKEDYFKKIECFDSVEISGVEDRFNASLGTYHDLLKIIKDKDFLDNEENEDILEDIVLTLTLFEDREMIEERLKTYAHLFDDKVMKQLKRRRYTGWGRLSRKLINGIRDKQSGKTILDFLKSDGFANRNFMQLIHDDSLTFKEDIQKAQVSGQGDSLHEHIANLAGSPAIKKGILQTVKVVDELVKVMGRHKPENIVIEMARENQTTQKGQKNSRERMKRIEEGIKELGSQILKEHPVENTQLQNEKLYLYYLQNGRDMYVDQELDINRLSDYDVDHIVPQSFLKDDSIDNKVLTRSDKARGKSDNVPSEEVVKKMKNYWRQLLNAKLITQRKFDNLTKAERGGLSELDKAGFIKRQLVETRQITKHVAQILDSRMNTKYDENDKLIREVKVITLKSKLVSDFRKDFQFYKVREINNYHHAHDAYLNAVVGTALIKKYPKLESEFVYGDYKVYDVRKMIAKSEQEIGKATAKYFFYSNIMNFFKTEITLANGEIRKRPLIETNGETGEIVWDKGRDFATVRKVLSMPQVNIVKKTEVQTGGFSKESILPKRNSDKLIARKKDWDPKKYGGFDSPTVAYSVLVVAKVEKGKSKKLKSVKELLGITIMERSSFEKNPIDFLEAKGYKEVKKDLIIKLPKYSLFELENGRKRMLASAGELQKGNELALPSKYVNFLYLASHYEKLKGSPEDNEQKQLFVEQHKHYLDEIIEQISEFSKRVILADANLDKVLSAYNKHRDKPIREQAENIIHLFTLTNLGAPAAFKYFDTTIDRKRYTSTKEVLDATLIHQSITGLYETRIDLSQLGGDGGPAPGSSGGGGGVLNLEEEYRLHEKPVPSSIDPSWLQLFPTVWAERAGMGLANQVPPVVVELRSGASPVAVRQYPMSKEAREGIRPHIQRFLDLGVLVPCQSPWNTPLLPVKKPGTNDYRPVQDLREINKRVQDIHPTVPNPYNLLSSLPPSHTWYSVLDLKDAFFCLKLHPNSQPLFAFEWRDPEKGNTGQLTWTRLPQGFKNSPTLFNEALHRDLAPFRALNPQVVLLQYVDDLLVAAPTYRDCKEGTQKLLQELSKLGYRVSAKKAQLCQKEVTYLGYLLKEGKRWLTPARKATVMKIPPPTTPRQVREFLGTAGFCRLWIPGFASLAAPLYPLTKPSIPFIWTEEHQKAFDRIKEALLSAPALALPDLTKPFTLYVDERAGVARGVLTQTLGPWRRPVAYLSKKLDPVASGWPTCLKAVAAVALLLKDADKLTLGQNVTVIASHSLESIVRQPPDRWMTNARMTHYQSLLLNERVSFAPPAVLNPATLLPVESEATPVHRCSEILAEETGTRRDLKDQPLPGVPAWYTDGSSFIAEGKRRAGAAIVDGKRTVWASSLPEGTSAQKAELVALTQALRLAEGKDINIYTDSRYAFATAHIHGAIYKQRGWLTSAGKDIKNKEEILALLEAIHLPKRVAIIHCPGHQKGNDPVATGNRRADEAAKQAALSTRVLAETTKPAGKRTADGSEFEKRTADGSEFESPKKKAKVE

SEQ ID NO: 865 - protein, 2092 aa, synthetic construct
MPAAKRVKLDGGDKKYSIGLDIGTNSVGWAVITDEYKVPSKKFKVLGNTDRHSIKKNLIGALLFDSGETAEATRLKRTARRRYTRRKNRICYLQEIFSNEMAKVDDSFFHRLEESFLVEEDKKHERHPIFGNIVDEVAYHEKYPTIYHLRKKLVDSTDKADLRLIYLALAHMIKFRGHFLIEGDLNPDNSDVDKLFIQLVQTYNQLFEENPINASGVDAKAILSARLSKSRRLENLIAQLPGEKKNGLFGNLIALSLGLTPNFKSNFDLAEDAKLQLSKDTYDDDLDNLLAQIGDQYADLFLAAKNLSDAILLSDILRVNTEITKAPLSASMIKRYDEHHQDLTLLKALVRQQLPEKYKEIFFDQSKNGYAGYIDGGASQEEFYKFIKPILEKMDGTEELLVKLNREDLLRKQRTFDNGSIPHQIHLGELHAILRRQEDFYPFLKDNREKIEKILTFRIPYYVGPLARGNSRFAWMTRKSEETITPWNFEEVVDKGASAQSFIERMTNFDKNLPNEKVLPKHSLLYEYFTVYNELTKVKYVTEGMRKPAFLSGEQKKAIVDLLFKTNRKVTVKQLKEDYFKKIECFDSVEISGVEDRFNASLGTYHDLLKIIKDKDFLDNEENEDILEDIVLTLTLFEDREMIEERLKTYAHLFDDKVMKQLKRRRYTGWGRLSRKLINGIRDKQSGKTILDFLKSDGFANRNFMQLIHDDSLTFKEDIQKAQVSGQGDSLHEHIANLAGSPAIKKGILQTVKVVDELVKVMGRHKPENIVIEMARENQTTQKGQKNSRERMKRIEEGIKELGSQILKEHPVENTQLQNEKLYLYYLQNGRDMYVDQELDINRLSDYDVDHIVPQSFLKDDSIDNKVLTRSDKARGKSDNVPSEEVVKKMKNYWRQLLNAKLITQRKFDNLTKAERGGLSELDKAGFIKRQLVETRQITKHVAQILDSRMNTKYDENDKLIREVKVITLKSKLVSDFRKDFQFYKVREINNYHHAHDAYLNAVVGTALIKKYPKLESEFVYGDYKVYDVRKMIAKSEQEIGKATAKYFFYSNIMNFFKTEITLANGEIRKRPLIETNGETGEIVWDKGRDFATVRKVLSMPQVNIVKKTEVQTGGFSKESILPKRNSDKLIARKKDWDPKKYGGFDSPTVAYSVLVVAKVEKGKSKKLKSVKELLGITIMERSSFEKNPIDFLEAKGYKEVKKDLIIKLPKYSLFELENGRKRMLASAGELQKGNELALPSKYVNFLYLASHYEKLKGSPEDNEQKQLFVEQHKHYLDEIIEQISEFSKRVILADANLDKVLSAYNKHRDKPIREQAENIIHLFTLTNLGAPAAFKYFDTTIDRKRYTSTKEVLDATLIHQSITGLYETRIDLSQLGGDGGGGSGSSGGGGGVLNLEEEYRLHEKPVPSSIDPSWLQLFPTVWAERAGMGLANQVPPVVVELRSGASPVAVRQYPMSKEAREGIRPHIQRFLDLGVLVPCQSPWNTPLLPVKKPGTNDYRPVQDLREINKRVQDIHPTVPNPYNLLSSLPPSHTWYSVLDLKDAFFCLKLHPNSQPLFAFEWRDPEKGNTGQLTWTRLPQGFKNSPTLFNEALHRDLAPFRALNPQVVLLQYVDDLLVAAPTYRDCKEGTQKLLQELSKLGYRVSAKKAQLCQKEVTYLGYLLKEGKRWLTPARKATVMKIPPPTTPRQVREFLGTAGFCRLWIPGFASLAAPLYPLTKPSIPFIWTEEHQKAFDRIKEALLSAPALALPDLTKPFTLYVDERAGVARGVLTQTLGPWRRPVAYLSKKLDPVASGWPTCLKAVAAVALLLKDADKLTLGQNVTVIASHSLESIVRQPPDRWMTNARMTHYQSLLLNERVSFAPPAVLNPATLLPVESEATPVHRCSEILAEETGTRRDLKDQPLPGVPAWYTDGSSFIAEGKRRAGAAIVDGKRTVWASSLPEGTSAQKAELVALTQALRLAEGKDINIYTDSRYAFATAHIHGAIYKQRGWLTSAGKDIKNKEEILALLEAIHLPKRVAIIHCPGHQKGNDPVATGNRRADEAAKQAALSTRVLAETTKPAGKRTADGSEFEKRTADGSEFESPKKKAKVE

SEQ ID NO: 866 - protein, 2094 aa, synthetic construct
MPAAKRVKLDGGDKKYSIGLDIGTNSVGWAVITDEYKVPSKKFKVLGNTDRHSIKKNLIGALLFDSGETAEATRLKRTARRRYTRRKNRICYLQEIFSNEMAKVDDSFFHRLEESFLVEEDKKHERHPIFGNIVDEVAYHEKYPTIYHLRKKLVDSTDKADLRLIYLALAHMIKFRGHFLIEGDLNPDNSDVDKLFIQLVQTYNQLFEENPINASGVDAKAILSARLSKSRRLENLIAQLPGEKKNGLFGNLIALSLGLTPNFKSNFDLAEDAKLQLSKDTYDDDLDNLLAQIGDQYADLFLAAKNLSDAILLSDILRVNTEITKAPLSASMIKRYDEHHQDLTLLKALVRQQLPEKYKEIFFDQSKNGYAGYIDGGASQEEFYKFIKPILEKMDGTEELLVKLNREDLLRKQRTFDNGSIPHQIHLGELHAILRRQEDFYPFLKDNREKIEKILTFRIPYYVGPLARGNSRFAWMTRKSEETITPWNFEEVVDKGASAQSFIERMTNFDKNLPNEKVLPKHSLLYEYFTVYNELTKVKYVTEGMRKPAFLSGEQKKAIVDLLFKTNRKVTVKQLKEDYFKKIECFDSVEISGVEDRFNASLGTYHDLLKIIKDKDFLDNEENEDILEDIVLTLTLFEDREMIEERLKTYAHLFDDKVMKQLKRRRYTGWGRLSRKLINGIRDKQSGKTILDFLKSDGFANRNFMQLIHDDSLTFKEDIQKAQVSGQGDSLHEHIANLAGSPAIKKGILQTVKVVDELVKVMGRHKPENIVIEMARENQTTQKGQKNSRERMKRIEEGIKELGSQILKEHPVENTQLQNEKLYLYYLQNGRDMYVDQELDINRLSDYDVDHIVPQSFLKDDSIDNKVLTRSDKARGKSDNVPSEEVVKKMKNYWRQLLNAKLITQRKFDNLTKAERGGLSELDKAGFIKRQLVETRQITKHVAQILDSRMNTKYDENDKLIREVKVITLKSKLVSDFRKDFQFYKVREINNYHHAHDAYLNAVVGTALIKKYPKLESEFVYGDYKVYDVRKMIAKSEQEIGKATAKYFFYSNIMNFFKTEITLANGEIRKRPLIETNGETGEIVWDKGRDFATVRKVLSMPQVNIVKKTEVQTGGFSKESILPKRNSDKLIARKKDWDPKKYGGFDSPTVAYSVLVVAKVEKGKSKKLKSVKELLGITIMERSSFEKNPIDFLEAKGYKEVKKDLIIKLPKYSLFELENGRKRMLASAGELQKGNELALPSKYVNFLYLASHYEKLKGSPEDNEQKQLFVEQHKHYLDEIIEQISEFSKRVILADANLDKVLSAYNKHRDKPIREQAENIIHLFTLTNLGAPAAFKYFDTTIDRKRYTSTKEVLDATLIHQSITGLYETRIDLSQLGGDGGPAPEAAAKGGGGGVLNLEEEYRLHEKPVPSSIDPSWLQLFPTVWAERAGMGLANQVPPVVVELRSGASPVAVRQYPMSKEAREGIRPHIQRFLDLGVLVPCQSPWNTPLLPVKKPGTNDYRPVQDLREINKRVQDIHPTVPNPYNLLSSLPPSHTWYSVLDLKDAFFCLKLHPNSQPLFAFEWRDPEKGNTGQLTWTRLPQGFKNSPTLFNEALHRDLAPFRALNPQVVLLQYVDDLLVAAPTYRDCKEGTQKLLQELSKLGYRVSAKKAQLCQKEVTYLGYLLKEGKRWLTPARKATVMKIPPPTTPRQVREFLGTAGFCRLWIPGFASLAAPLYPLTKPSIPFIWTEEHQKAFDRIKEALLSAPALALPDLTKPFTLYVDERAGVARGVLTQTLGPWRRPVAYLSKKLDPVASGWPTCLKAVAAVALLLKDADKLTLGQNVTVIASHSLESIVRQPPDRWMTNARMTHYQSLLLNERVSFAPPAVLNPATLLPVESEATPVHRCSEILAEETGTRRDLKDQPLPGVPAWYTDGSSFIAEGKRRAGAAIVDGKRTVWASSLPEGTSAQKAELVALTQALRLAEGKDINIYTDSRYAFATAHIHGAIYKQRGWLTSAGKDIKNKEEILALLEAIHLPKRVAIIHCPGHQKGNDPVATGNRRADEAAKQAALSTRVLAETTKPAGKRTADGSEFEKRTADGSEFESPKKKAKVE

SEQ ID NO: 867 - protein, 2089 aa, synthetic construct
MPAAKRVKLDGGDKKYSIGLDIGTNSVGWAVITDEYKVPSKKFKVLGNTDRHSIKKNLIGALLFDSGETAEATRLKRTARRRYTRRKNRICYLQEIFSNEMAKVDDSFFHRLEESFLVEEDKKHERHPIFGNIVDEVAYHEKYPTIYHLRKKLVDSTDKADLRLIYLALAHMIKFRGHFLIEGDLNPDNSDVDKLFIQLVQTYNQLFEENPINASGVDAKAILSARLSKSRRLENLIAQLPGEKKNGLFGNLIALSLGLTPNFKSNFDLAEDAKLQLSKDTYDDDLDNLLAQIGDQYADLFLAAKNLSDAILLSDILRVNTEITKAPLSASMIKRYDEHHQDLTLLKALVRQQLPEKYKEIFFDQSKNGYAGYIDGGASQEEFYKFIKPILEKMDGTEELLVKLNREDLLRKQRTFDNGSIPHQIHLGELHAILRRQEDFYPFLKDNREKIEKILTFRIPYYVGPLARGNSRFAWMTRKSEETITPWNFEEVVDKGASAQSFIERMTNFDKNLPNEKVLPKHSLLYEYFTVYNELTKVKYVTEGMRKPAFLSGEQKKAIVDLLFKTNRKVTVKQLKEDYFKKIECFDSVEISGVEDRFNASLGTYHDLLKIIKDKDFLDNEENEDILEDIVLTLTLFEDREMIEERLKTYAHLFDDKVMKQLKRRRYTGWGRLSRKLINGIRDKQSGKTILDFLKSDGFANRNFMQLIHDDSLTFKEDIQKAQVSGQGDSLHEHIANLAGSPAIKKGILQTVKVVDELVKVMGRHKPENIVIEMARENQTTQKGQKNSRERMKRIEEGIKELGSQILKEHPVENTQLQNEKLYLYYLQNGRDMYVDQELDINRLSDYDVDHIVPQSFLKDDSIDNKVLTRSDKARGKSDNVPSEEVVKKMKNYWRQLLNAKLITQRKFDNLTKAERGGLSELDKAGFIKRQLVETRQITKHVAQILDSRMNTKYDENDKLIREVKVITLKSKLVSDFRKDFQFYKVREINNYHHAHDAYLNAVVGTALIKKYPKLESEFVYGDYKVYDVRKMIAKSEQEIGKATAKYFFYSNIMNFFKTEITLANGEIRKRPLIETNGETGEIVWDKGRDFATVRKVLSMPQVNIVKKTEVQTGGFSKESILPKRNSDKLIARKKDWDPKKYGGFDSPTVAYSVLVVAKVEKGKSKKLKSVKELLGITIMERSSFEKNPIDFLEAKGYKEVKKDLIIKLPKYSLFELENGRKRMLASAGELQKGNELALPSKYVNFLYLASHYEKLKGSPEDNEQKQLFVEQHKHYLDEIIEQISEFSKRVILADANLDKVLSAYNKHRDKPIREQAENIIHLFTLTNLGAPAAFKYFDTTIDRKRYTSTKEVLDATLIHQSITGLYETRIDLSQLGGDGGGSSPAPGGVLNLEEEYRLHEKPVPSSIDPSWLQLFPTVWAERAGMGLANQVPPVVVELRSGASPVAVRQYPMSKEAREGIRPHIQRFLDLGVLVPCQSPWNTPLLPVKKPGTNDYRPVQDLREINKRVQDIHPTVPNPYNLLSSLPPSHTWYSVLDLKDAFFCLKLHPNSQPLFAFEWRDPEKGNTGQLTWTRLPQGFKNSPTLFNEALHRDLAPFRALNPQVVLLQYVDDLLVAAPTYRDCKEGTQKLLQELSKLGYRVSAKKAQLCQKEVTYLGYLLKEGKRWLTPARKATVMKIPPPTTPRQVREFLGTAGFCRLWIPGFASLAAPLYPLTKPSIPFIWTEEHQKAFDRIKEALLSAPALALPDLTKPFTLYVDERAGVARGVLTQTLGPWRRPVAYLSKKLDPVASGWPTCLKAVAAVALLLKDADKLTLGQNVTVIASHSLESIVRQPPDRWMTNARMTHYQSLLLNERVSFAPPAVLNPATLLPVESEATPVHRCSEILAEETGTRRDLKDQPLPGVPAWYTDGSSFIAEGKRRAGAAIVDGKRTVWASSLPEGTSAQKAELVALTQALRLAEGKDINIYTDSRYAFATAHIHGAIYKQRGWLTSAGKDIKNKEEILALLEAIHLPKRVAIIHCPGHQKGNDPVATGNRRADEAAKQAALSTRVLAETTKPAGKRTADGSEFEKRTADGSEFESPKKKAKVE

SEQ ID NO: 868 - protein, 2092 aa, synthetic construct
MPAAKRVKLDGGDKKYSIGLDIGTNSVGWAVITDEYKVPSKKFKVLGNTDRHSIKKNLIGALLFDSGETAEATRLKRTARRRYTRRKNRICYLQEIFSNEMAKVDDSFFHRLEESFLVEEDKKHERHPIFGNIVDEVAYHEKYPTIYHLRKKLVDSTDKADLRLIYLALAHMIKFRGHFLIEGDLNPDNSDVDKLFIQLVQTYNQLFEENPINASGVDAKAILSARLSKSRRLENLIAQLPGEKKNGLFGNLIALSLGLTPNFKSNFDLAEDAKLQLSKDTYDDDLDNLLAQIGDQYADLFLAAKNLSDAILLSDILRVNTEITKAPLSASMIKRYDEHHQDLTLLKALVRQQLPEKYKEIFFDQSKNGYAGYIDGGASQEEFYKFIKPILEKMDGTEELLVKLNREDLLRKQRTFDNGSIPHQIHLGELHAILRRQEDFYPFLKDNREKIEKILTFRIPYYVGPLARGNSRFAWMTRKSEETITPWNFEEVVDKGASAQSFIERMTNFDKNLPNEKVLPKHSLLYEYFTVYNELTKVKYVTEGMRKPAFLSGEQKKAIVDLLFKTNRKVTVKQLKEDYFKKIECFDSVEISGVEDRFNASLGTYHDLLKIIKDKDFLDNEENEDILEDIVLTLTLFEDREMIEERLKTYAHLFDDKVMKQLKRRRYTGWGRLSRKLINGIRDKQSGKTILDFLKSDGFANRNFMQLIHDDSLTFKEDIQKAQVSGQGDSLHEHIANLAGSPAIKKGILQTVKVVDELVKVMGRHKPENIVIEMARENQTTQKGQKNSRERMKRIEEGIKELGSQILKEHPVENTQLQNEKLYLYYLQNGRDMYVDQELDINRLSDYDVDHIVPQSFLKDDSIDNKVLTRSDKARGKSDNVPSEEVVKKMKNYWRQLLNAKLITQRKFDNLTKAERGGLSELDKAGFIKRQLVETRQITKHVAQILDSRMNTKYDENDKLIREVKVITLKSKLVSDFRKDFQFYKVREINNYHHAHDAYLNAVVGTALIKKYPKLESEFVYGDYKVYDVRKMIAKSEQEIGKATAKYFFYSNIMNFFKTEITLANGEIRKRPLIETNGETGEIVWDKGRDFATVRKVLSMPQVNIVKKTEVQTGGFSKESILPKRNSDKLIARKKDWDPKKYGGFDSPTVAYSVLVVAKVEKGKSKKLKSVKELLGITIMERSSFEKNPIDFLEAKGYKEVKKDLIIKLPKYSLFELENGRKRMLASAGELQKGNELALPSKYVNFLYLASHYEKLKGSPEDNEQKQLFVEQHKHYLDEIIEQISEFSKRVILADANLDKVLSAYNKHRDKPIREQAENIIHLFTLTNLGAPAAFKYFDTTIDRKRYTSTKEVLDATLIHQSITGLYETRIDLSQLGGDGGGSSGGGPAPGGVLNLEEEYRLHEKPVPSSIDPSWLQLFPTVWAERAGMGLANQVPPVVVELRSGASPVAVRQYPMSKEAREGIRPHIQRFLDLGVLVPCQSPWNTPLLPVKKPGTNDYRPVQDLREINKRVQDIHPTVPNPYNLLSSLPPSHTWYSVLDLKDAFFCLKLHPNSQPLFAFEWRDPEKGNTGQLTWTRLPQGFKNSPTLFNEALHRDLAPFRALNPQVVLLQYVDDLLVAAPTYRDCKEGTQKLLQELSKLGYRVSAKKAQLCQKEVTYLGYLLKEGKRWLTPARKATVMKIPPPTTPRQVREFLGTAGFCRLWIPGFASLAAPLYPLTKPSIPFIWTEEHQKAFDRIKEALLSAPALALPDLTKPFTLYVDERAGVARGVLTQTLGPWRRPVAYLSKKLDPVASGWPTCLKAVAAVALLLKDADKLTLGQNVTVIASHSLESIVRQPPDRWMTNARMTHYQSLLLNERVSFAPPAVLNPATLLPVESEATPVHRCSEILAEETGTRRDLKDQPLPGVPAWYTDGSSFIAEGKRRAGAAIVDGKRTVWASSLPEGTSAQKAELVALTQALRLAEGKDINIYTDSRYAFATAHIHGAIYKQRGWLTSAGKDIKNKEEILALLEAIHLPKRVAIIHCPGHQKGNDPVATGNRRADEAAKQAALSTRVLAETTKPAGKRTADGSEFEKRTADGSEFESPKKKAKVE

SEQ ID NO: 869 - protein, 2089 aa, synthetic construct
MPAAKRVKLDGGDKKYSIGLDIGTNSVGWAVITDEYKVPSKKFKVLGNTDRHSIKKNLIGALLFDSGETAEATRLKRTARRRYTRRKNRICYLQEIFSNEMAKVDDSFFHRLEESFLVEEDKKHERHPIFGNIVDEVAYHEKYPTIYHLRKKLVDSTDKADLRLIYLALAHMIKFRGHFLIEGDLNPDNSDVDKLFIQLVQTYNQLFEENPINASGVDAKAILSARLSKSRRLENLIAQLPGEKKNGLFGNLIALSLGLTPNFKSNFDLAEDAKLQLSKDTYDDDLDNLLAQIGDQYADLFLAAKNLSDAILLSDILRVNTEITKAPLSASMIKRYDEHHQDLTLLKALVRQQLPEKYKEIFFDQSKNGYAGYIDGGASQEEFYKFIKPILEKMDGTEELLVKLNREDLLRKQRTFDNGSIPHQIHLGELHAILRRQEDFYPFLKDNREKIEKILTFRIPYYVGPLARGNSRFAWMTRKSEETITPWNFEEVVDKGASAQSFIERMTNFDKNLPNEKVLPKHSLLYEYFTVYNELTKVKYVTEGMRKPAFLSGEQKKAIVDLLFKTNRKVTVKQLKEDYFKKIECFDSVEISGVEDRFNASLGTYHDLLKIIKDKDFLDNEENEDILEDIVLTLTLFEDREMIEERLKTYAHLFDDKVMKQLKRRRYTGWGRLSRKLINGIRDKQSGKTILDFLKSDGFANRNFMQLIHDDSLTFKEDIQKAQVSGQGDSLHEHIANLAGSPAIKKGILQTVKVVDELVKVMGRHKPENIVIEMARENQTTQKGQKNSRERMKRIEEGIKELGSQILKEHPVENTQLQNEKLYLYYLQNGRDMYVDQELDINRLSDYDVDHIVPQSFLKDDSIDNKVLTRSDKARGKSDNVPSEEVVKKMKNYWRQLLNAKLITQRKFDNLTKAERGGLSELDKAGFIKRQLVETRQITKHVAQILDSRMNTKYDENDKLIREVKVITLKSKLVSDFRKDFQFYKVREINNYHHAHDAYLNAVVGTALIKKYPKLESEFVYGDYKVYDVRKMIAKSEQEIGKATAKYFFYSNIMNFFKTEITLANGEIRKRPLIETNGETGEIVWDKGRDFATVRKVLSMPQVNIVKKTEVQTGGFSKESILPKRNSDKLIARKKDWDPKKYGGFDSPTVAYSVLVVAKVEKGKSKKLKSVKELLGITIMERSSFEKNPIDFLEAKGYKEVKKDLIIKLPKYSLFELENGRKRMLASAGELQKGNELALPSKYVNFLYLASHYEKLKGSPEDNEQKQLFVEQHKHYLDEIIEQISEFSKRVILADANLDKVLSAYNKHRDKPIREQAENIIHLFTLTNLGAPAAFKYFDTTIDRKRYTSTKEVLDATLIHQSITGLYETRIDLSQLGGDGGGGSGGSGGVLNLEEEYRLHEKPVPSSIDPSWLQLFPTVWAERAGMGLANQVPPVVVELRSGASPVAVRQYPMSKEAREGIRPHIQRFLDLGVLVPCQSPWNTPLLPVKKPGTNDYRPVQDLREINKRVQDIHPTVPNPYNLLSSLPPSHTWYSVLDLKDAFFCLKLHPNSQPLFAFEWRDPEKGNTGQLTWTRLPQGFKNSPTLFNEALHRDLAPFRALNPQVVLLQYVDDLLVAAPTYRDCKEGTQKLLQELSKLGYRVSAKKAQLCQKEVTYLGYLLKEGKRWLTPARKATVMKIPPPTTPRQVREFLGTAGFCRLWIPGFASLAAPLYPLTKPSIPFIWTEEHQKAFDRIKEALLSAPALALPDLTKPFTLYVDERAGVARGVLTQTLGPWRRPVAYLSKKLDPVASGWPTCLKAVAAVALLLKDADKLTLGQNVTVIASHSLESIVRQPPDRWMTNARMTHYQSLLLNERVSFAPPAVLNPATLLPVESEATPVHRCSEILAEETGTRRDLKDQPLPGVPAWYTDGSSFIAEGKRRAGAAIVDGKRTVWASSLPEGTSAQKAELVALTQALRLAEGKDINIYTDSRYAFATAHIHGAIYKQRGWLTSAGKDIKNKEEILALLEAIHLPKRVAIIHCPGHQKGNDPVATGNRRADEAAKQAALSTRVLAETTKPAGKRTADGSEFEKRTADGSEFESPKKKAKVE

SEQ ID NO: 870 - protein, 2094 aa, synthetic construct
MPAAKRVKLDGGDKKYSIGLDIGTNSVGWAVITDEYKVPSKKFKVLGNTDRHSIKKNLIGALLFDSGETAEATRLKRTARRRYTRRKNRICYLQEIFSNEMAKVDDSFFHRLEESFLVEEDKKHERHPIFGNIVDEVAYHEKYPTIYHLRKKLVDSTDKADLRLIYLALAHMIKFRGHFLIEGDLNPDNSDVDKLFIQLVQTYNQLFEENPINASGVDAKAILSARLSKSRRLENLIAQLPGEKKNGLFGNLIALSLGLTPNFKSNFDLAEDAKLQLSKDTYDDDLDNLLAQIGDQYADLFLAAKNLSDAILLSDILRVNTEITKAPLSASMIKRYDEHHQDLTLLKALVRQQLPEKYKEIFFDQSKNGYAGYIDGGASQEEFYKFIKPILEKMDGTEELLVKLNREDLLRKQRTFDNGSIPHQIHLGELHAILRRQEDFYPFLKDNREKIEKILTFRIPYYVGPLARGNSRFAWMTRKSEETITPWNFEEVVDKGASAQSFIERMTNFDKNLPNEKVLPKHSLLYEYFTVYNELTKVKYVTEGMRKPAFLSGEQKKAIVDLLFKTNRKVTVKQLKEDYFKKIECFDSVEISGVEDRFNASLGTYHDLLKIIKDKDFLDNEENEDILEDIVLTLTLFEDREMIEERLKTYAHLFDDKVMKQLKRRRYTGWGRLSRKLINGIRDKQSGKTILDFLKSDGFANRNFMQLIHDDSLTFKEDIQKAQVSGQGDSLHEHIANLAGSPAIKKGILQTVKVVDELVKVMGRHKPENIVIEMARENQTTQKGQKNSRERMKRIEEGIKELGSQILKEHPVENTQLQNEKLYLYYLQNGRDMYVDQELDINRLSDYDVDHIVPQSFLKDDSIDNKVLTRSDKARGKSDNVPSEEVVKKMKNYWRQLLNAKLITQRKFDNLTKAERGGLSELDKAGFIKRQLVETRQITKHVAQILDSRMNTKYDENDKLIREVKVITLKSKLVSDFRKDFQFYKVREINNYHHAHDAYLNAVVGTALIKKYPKLESEFVYGDYKVYDVRKMIAKSEQEIGKATAKYFFYSNIMNFFKTEITLANGEIRKRPLIETNGETGEIVWDKGRDFATVRKVLSMPQVNIVKKTEVQTGGFSKESILPKRNSDKLIARKKDWDPKKYGGFDSPTVAYSVLVVAKVEKGKSKKLKSVKELLGITIMERSSFEKNPIDFLEAKGYKEVKKDLIIKLPKYSLFELENGRKRMLASAGELQKGNELALPSKYVNFLYLASHYEKLKGSPEDNEQKQLFVEQHKHYLDEIIEQISEFSKRVILADANLDKVLSAYNKHRDKPIREQAENIIHLFTLTNLGAPAAFKYFDTTIDRKRYTSTKEVLDATLIHQSITGLYETRIDLSQLGGDGGGGGPAPEAAAKGGVLNLEEEYRLHEKPVPSSIDPSWLQLFPTVWAERAGMGLANQVPPVVVELRSGASPVAVRQYPMSKEAREGIRPHIQRFLDLGVLVPCQSPWNTPLLPVKKPGTNDYRPVQDLREINKRVQDIHPTVPNPYNLLSSLPPSHTWYSVLDLKDAFFCLKLHPNSQPLFAFEWRDPEKGNTGQLTWTRLPQGFKNSPTLFNEALHRDLAPFRALNPQVVLLQYVDDLLVAAPTYRDCKEGTQKLLQELSKLGYRVSAKKAQLCQKEVTYLGYLLKEGKRWLTPARKATVMKIPPPTTPRQVREFLGTAGFCRLWIPGFASLAAPLYPLTKPSIPFIWTEEHQKAFDRIKEALLSAPALALPDLTKPFTLYVDERAGVARGVLTQTLGPWRRPVAYLSKKLDPVASGWPTCLKAVAAVALLLKDADKLTLGQNVTVIASHSLESIVRQPPDRWMTNARMTHYQSLLLNERVSFAPPAVLNPATLLPVESEATPVHRCSEILAEETGTRRDLKDQPLPGVPAWYTDGSSFIAEGKRRAGAAIVDGKRTVWASSLPEGTSAQKAELVALTQALRLAEGKDINIYTDSRYAFATAHIHGAIYKQRGWLTSAGKDIKNKEEILALLEAIHLPKRVAIIHCPGHQKGNDPVATGNRRADEAAKQAALSTRVLAETTKPAGKRTADGSEFEKRTADGSEFESPKKKAKVE

SEQ ID NO: 871 - protein, 2129 aa, synthetic construct
MPAAKRVKLDGGDKKYSIGLDIGTNSVGWAVITDEYKVPSKKFKVLGNTDRHSIKKNLIGALLFDSGETAEATRLKRTARRRYTRRKNRICYLQEIFSNEMAKVDDSFFHRLEESFLVEEDKKHERHPIFGNIVDEVAYHEKYPTIYHLRKKLVDSTDKADLRLIYLALAHMIKFRGHFLIEGDLNPDNSDVDKLFIQLVQTYNQLFEENPINASGVDAKAILSARLSKSRRLENLIAQLPGEKKNGLFGNLIALSLGLTPNFKSNFDLAEDAKLQLSKDTYDDDLDNLLAQIGDQYADLFLAAKNLSDAILLSDILRVNTEITKAPLSASMIKRYDEHHQDLTLLKALVRQQLPEKYKEIFFDQSKNGYAGYIDGGASQEEFYKFIKPILEKMDGTEELLVKLNREDLLRKQRTFDNGSIPHQIHLGELHAILRRQEDFYPFLKDNREKIEKILTFRIPYYVGPLARGNSRFAWMTRKSEETITPWNFEEVVDKGASAQSFIERMTNFDKNLPNEKVLPKHSLLYEYFTVYNELTKVKYVTEGMRKPAFLSGEQKKAIVDLLFKTNRKVTVKQLKEDYFKKIECFDSVEISGVEDRFNASLGTYHDLLKIIKDKDFLDNEENEDILEDIVLTLTLFEDREMIEERLKTYAHLFDDKVMKQLKRRRYTGWGRLSRKLINGIRDKQSGKTILDFLKSDGFANRNFMQLIHDDSLTFKEDIQKAQVSGQGDSLHEHIANLAGSPAIKKGILQTVKVVDELVKVMGRHKPENIVIEMARENQTTQKGQKNSRERMKRIEEGIKELGSQILKEHPVENTQLQNEKLYLYYLQNGRDMYVDQELDINRLSDYDVDHIVPQSFLKDDSIDNKVLTRSDKARGKSDNVPSEEVVKKMKNYWRQLLNAKLITQRKFDNLTKAERGGLSELDKAGFIKRQLVETRQITKHVAQILDSRMNTKYDENDKLIREVKVITLKSKLVSDFRKDFQFYKVREINNYHHAHDAYLNAVVGTALIKKYPKLESEFVYGDYKVYDVRKMIAKSEQEIGKATAKYFFYSNIMNFFKTEITLANGEIRKRPLIETNGETGEIVWDKGRDFATVRKVLSMPQVNIVKKTEVQTGGFSKESILPKRNSDKLIARKKDWDPKKYGGFDSPTVAYSVLVVAKVEKGKSKKLKSVKELLGITIMERSSFEKNPIDFLEAKGYKEVKKDLIIKLPKYSLFELENGRKRMLASAGELQKGNELALPSKYVNFLYLASHYEKLKGSPEDNEQKQLFVEQHKHYLDEIIEQISEFSKRVILADANLDKVLSAYNKHRDKPIREQAENIIHLFTLTNLGAPAAFKYFDTTIDRKRYTSTKEVLDATLIHQSITGLYETRIDLSQLGGDGGAEAAAKEAAAKEAAAKEAAAKALEAEAAAKEAAAKEAAAKEAAAKAGGVLNLEEEYRLHEKPVPSSIDPSWLQLFPTVWAERAGMGLANQVPPVVVELRSGASPVAVRQYPMSKEAREGIRPHIQRFLDLGVLVPCQSPWNTPLLPVKKPGTNDYRPVQDLREINKRVQDIHPTVPNPYNLLSSLPPSHTWYSVLDLKDAFFCLKLHPNSQPLFAFEWRDPEKGNTGQLTWTRLPQGFKNSPTLFNEALHRDLAPFRALNPQVVLLQYVDDLLVAAPTYRDCKEGTQKLLQELSKLGYRVSAKKAQLCQKEVTYLGYLLKEGKRWLTPARKATVMKIPPPTTPRQVREFLGKAGFCRLFIPGFASLAAPLYPLTKPSIPFIWTEEHQKAFDRIKEALLSAPALALPDLTKPFTLYVDERAGVARGVLTQTLGPWRRPVAYLSKKLDPVASGWPTCLKAVAAVALLLKDADKLTLGQNVTVIASHSLESIVRQPPDRWMTNARMTHYQSLLLNERVSFAPPAVLNPATLLPVESEATPVHRCSEILAEETGTRRDLKDQPLPGVPAWYTDGSSFIAEGKRRAGAAIVDGKRTVWASSLPEGTSAQKAELVALTQALRLAEGKDINIYTDSRYAFATAHIHGAIYKQRGWLTSAGKDIKNKEEILALLEAIHLPKRVAIIHCPGHQKGNDPVATGNRRADEAAKQAALSTRVLAETTKPAGKRTADGSEFEKRTADGSEFESPKKKAKVE

SEQ ID NO: 872 - protein, 2092 aa, synthetic construct
MPAAKRVKLDGGDKKYSIGLDIGTNSVGWAVITDEYKVPSKKFKVLGNTDRHSIKKNLIGALLFDSGETAEATRLKRTARRRYTRRKNRICYLQEIFSNEMAKVDDSFFHRLEESFLVEEDKKHERHPIFGNIVDEVAYHEKYPTIYHLRKKLVDSTDKADLRLIYLALAHMIKFRGHFLIEGDLNPDNSDVDKLFIQLVQTYNQLFEENPINASGVDAKAILSARLSKSRRLENLIAQLPGEKKNGLFGNLIALSLGLTPNFKSNFDLAEDAKLQLSKDTYDDDLDNLLAQIGDQYADLFLAAKNLSDAILLSDILRVNTEITKAPLSASMIKRYDEHHQDLTLLKALVRQQLPEKYKEIFFDQSKNGYAGYIDGGASQEEFYKFIKPILEKMDGTEELLVKLNREDLLRKQRTFDNGSIPHQIHLGELHAILRRQEDFYPFLKDNREKIEKILTFRIPYYVGPLARGNSRFAWMTRKSEETITPWNFEEVVDKGASAQSFIERMTNFDKNLPNEKVLPKHSLLYEYFTVYNELTKVKYVTEGMRKPAFLSGEQKKAIVDLLFKTNRKVTVKQLKEDYFKKIECFDSVEISGVEDRFNASLGTYHDLLKIIKDKDFLDNEENEDILEDIVLTLTLFEDREMIEERLKTYAHLFDDKVMKQLKRRRYTGWGRLSRKLINGIRDKQSGKTILDFLKSDGFANRNFMQLIHDDSLTFKEDIQKAQVSGQGDSLHEHIANLAGSPAIKKGILQTVKVVDELVKVMGRHKPENIVIEMARENQTTQKGQKNSRERMKRIEEGIKELGSQILKEHPVENTQLQNEKLYLYYLQNGRDMYVDQELDINRLSDYDVDHIVPQSFLKDDSIDNKVLTRSDKARGKSDNVPSEEVVKKMKNYWRQLLNAKLITQRKFDNLTKAERGGLSELDKAGFIKRQLVETRQITKHVAQILDSRMNTKYDENDKLIREVKVITLKSKLVSDFRKDFQFYKVREINNYHHAHDAYLNAVVGTALIKKYPKLESEFVYGDYKVYDVRKMIAKSEQEIGKATAKYFFYSNIMNFFKTEITLANGEIRKRPLIETNGETGEIVWDKGRDFATVRKVLSMPQVNIVKKTEVQTGGFSKESILPKRNSDKLIARKKDWDPKKYGGFDSPTVAYSVLVVAKVEKGKSKKLKSVKELLGITIMERSSFEKNPIDFLEAKGYKEVKKDLIIKLPKYSLFELENGRKRMLASAGELQKGNELALPSKYVNFLYLASHYEKLKGSPEDNEQKQLFVEQHKHYLDEIIEQISEFSKRVILADANLDKVLSAYNKHRDKPIREQAENIIHLFTLTNLGAPAAFKYFDTTIDRKRYTSTKEVLDATLIHQSITGLYETRIDLSQLGGDGGPAPGGGGSSGGVLNLEEEYRLHEKPVPSSIDPSWLQLFPTVWAERAGMGLANQVPPVVVELRSGASPVAVRQYPMSKEAREGIRPHIQRFLDLGVLVPCQSPWNTPLLPVKKPGTNDYRPVQDLREINKRVQDIHPTVPNPYNLLSSLPPSHTWYSVLDLKDAFFCLKLHPNSQPLFAFEWRDPEKGNTGQLTWTRLPQGFKNSPTLFNEALHRDLAPFRALNPQVVLLQYVDDLLVAAPTYRDCKEGTQKLLQELSKLGYRVSAKKAQLCQKEVTYLGYLLKEGKRWLTPARKATVMKIPPPTTPRQVREFLGKAGFCRLFIPGFASLAAPLYPLTKPSIPFIWTEEHQKAFDRIKEALLSAPALALPDLTKPFTLYVDERAGVARGVLTQTLGPWRRPVAYLSKKLDPVASGWPTCLKAVAAVALLLKDADKLTLGQNVTVIASHSLESIVRQPPDRWMTNARMTHYQSLLLNERVSFAPPAVLNPATLLPVESEATPVHRCSEILAEETGTRRDLKDQPLPGVPAWYTDGSSFIAEGKRRAGAAIVDGKRTVWASSLPEGTSAQKAELVALTQALRLAEGKDINIYTDSRYAFATAHIHGAIYKQRGWLTSAGKDIKNKEEILALLEAIHLPKRVAIIHCPGHQKGNDPVATGNRRADEAAKQAALSTRVLAETTKPAGKRTADGSEFEKRTADGSEFESPKKKAKVE

SEQ ID NO: 873 - protein, 2108 aa, synthetic construct
MPAAKRVKLDGGDKKYSIGLDIGTNSVGWAVITDEYKVPSKKFKVLGNTDRHSIKKNLIGALLFDSGETAEATRLKRTARRRYTRRKNRICYLQEIFSNEMAKVDDSFFHRLEESFLVEEDKKHERHPIFGNIVDEVAYHEKYPTIYHLRKKLVDSTDKADLRLIYLALAHMIKFRGHFLIEGDLNPDNSDVDKLFIQLVQTYNQLFEENPINASGVDAKAILSARLSKSRRLENLIAQLPGEKKNGLFGNLIALSLGLTPNFKSNFDLAEDAKLQLSKDTYDDDLDNLLAQIGDQYADLFLAAKNLSDAILLSDILRVNTEITKAPLSASMIKRYDEHHQDLTLLKALVRQQLPEKYKEIFFDQSKNGYAGYIDGGASQEEFYKFIKPILEKMDGTEELLVKLNREDLLRKQRTFDNGSIPHQIHLGELHAILRRQEDFYPFLKDNREKIEKILTFRIPYYVGPLARGNSRFAWMTRKSEETITPWNFEEVVDKGASAQSFIERMTNFDKNLPNEKVLPKHSLLYEYFTVYNELTKVKYVTEGMRKPAFLSGEQKKAIVDLLFKTNRKVTVKQLKEDYFKKIECFDSVEISGVEDRFNASLGTYHDLLKIIKDKDFLDNEENEDILEDIVLTLTLFEDREMIEERLKTYAHLFDDKVMKQLKRRRYTGWGRLSRKLINGIRDKQSGKTILDFLKSDGFANRNFMQLIHDDSLTFKEDIQKAQVSGQGDSLHEHIANLAGSPAIKKGILQTVKVVDELVKVMGRHKPENIVIEMARENQTTQKGQKNSRERMKRIEEGIKELGSQILKEHPVENTQLQNEKLYLYYLQNGRDMYVDQELDINRLSDYDVDHIVPQSFLKDDSIDNKVLTRSDKARGKSDNVPSEEVVKKMKNYWRQLLNAKLITQRKFDNLTKAERGGLSELDKAGFIKRQLVETRQITKHVAQILDSRMNTKYDENDKLIREVKVITLKSKLVSDFRKDFQFYKVREINNYHHAHDAYLNAVVGTALIKKYPKLESEFVYGDYKVYDVRKMIAKSEQEIGKATAKYFFYSNIMNFFKTEITLANGEIRKRPLIETNGETGEIVWDKGRDFATVRKVLSMPQVNIVKKTEVQTGGFSKESILPKRNSDKLIARKKDWDPKKYGGFDSPTVAYSVLVVAKVEKGKSKKLKSVKELLGITIMERSSFEKNPIDFLEAKGYKEVKKDLIIKLPKYSLFELENGRKRMLASAGELQKGNELALPSKYVNFLYLASHYEKLKGSPEDNEQKQLFVEQHKHYLDEIIEQISEFSKRVILADANLDKVLSAYNKHRDKPIREQAENIIHLFTLTNLGAPAAFKYFDTTIDRKRYTSTKEVLDATLIHQSITGLYETRIDLSQLGGDGGGGGGSGGGGSGGGGSGGGGSGGGGSGGVLNLEEEYRLHEKPVPSSIDPSWLQLFPTVWAERAGMGLANQVPPVVVELRSGASPVAVRQYPMSKEAREGIRPHIQRFLDLGVLVPCQSPWNTPLLPVKKPGTNDYRPVQDLREINKRVQDIHPTVPNPYNLLSSLPPSHTWYSVLDLKDAFFCLKLHPNSQPLFAFEWRDPEKGNTGQLTWTRLPQGFKNSPTLFNEALHRDLAPFRALNPQVVLLQYVDDLLVAAPTYRDCKEGTQKLLQELSKLGYRVSAKKAQLCQKEVTYLGYLLKEGKRWLTPARKATVMKIPPPTTPRQVREFLGKAGFCRLFIPGFASLAAPLYPLTKPSIPFIWTEEHQKAFDRIKEALLSAPALALPDLTKPFTLYVDERAGVARGVLTQTLGPWRRPVAYLSKKLDPVASGWPTCLKAVAAVALLLKDADKLTLGQNVTVIASHSLESIVRQPPDRWMTNARMTHYQSLLLNERVSFAPPAVLNPATLLPVESEATPVHRCSEILAEETGTRRDLKDQPLPGVPAWYTDGSSFIAEGKRRAGAAIVDGKRTVWASSLPEGTSAQKAELVALTQALRLAEGKDINIYTDSRYAFATAHIHGAIYKQRGWLTSAGKDIKNKEEILALLEAIHLPKRVAIIHCPGHQKGNDPVATGNRRADEAAKQAALSTRVLAETTKPAGKRTADGSEFEKRTADGSEFESPKKKAKVE

SEQ ID NO: 874 - protein, 2094 aa, synthetic construct
MPAAKRVKLDGGDKKYSIGLDIGTNSVGWAVITDEYKVPSKKFKVLGNTDRHSIKKNLIGALLFDSGETAEATRLKRTARRRYTRRKNRICYLQEIFSNEMAKVDDSFFHRLEESFLVEEDKKHERHPIFGNIVDEVAYHEKYPTIYHLRKKLVDSTDKADLRLIYLALAHMIKFRGHFLIEGDLNPDNSDVDKLFIQLVQTYNQLFEENPINASGVDAKAILSARLSKSRRLENLIAQLPGEKKNGLFGNLIALSLGLTPNFKSNFDLAEDAKLQLSKDTYDDDLDNLLAQIGDQYADLFLAAKNLSDAILLSDILRVNTEITKAPLSASMIKRYDEHHQDLTLLKALVRQQLPEKYKEIFFDQSKNGYAGYIDGGASQEEFYKFIKPILEKMDGTEELLVKLNREDLLRKQRTFDNGSIPHQIHLGELHAILRRQEDFYPFLKDNREKIEKILTFRIPYYVGPLARGNSRFAWMTRKSEETITPWNFEEVVDKGASAQSFIERMTNFDKNLPNEKVLPKHSLLYEYFTVYNELTKVKYVTEGMRKPAFLSGEQKKAIVDLLFKTNRKVTVKQLKEDYFKKIECFDSVEISGVEDRFNASLGTYHDLLKIIKDKDFLDNEENEDILEDIVLTLTLFEDREMIEERLKTYAHLFDDKVMKQLKRRRYTGWGRLSRKLINGIRDKQSGKTILDFLKSDGFANRNFMQLIHDDSLTFKEDIQKAQVSGQGDSLHEHIANLAGSPAIKKGILQTVKVVDELVKVMGRHKPENIVIEMARENQTTQKGQKNSRERMKRIEEGIKELGSQILKEHPVENTQLQNEKLYLYYLQNGRDMYVDQELDINRLSDYDVDHIVPQSFLKDDSIDNKVLTRSDKARGKSDNVPSEEVVKKMKNYWRQLLNAKLITQRKFDNLTKAERGGLSELDKAGFIKRQLVETRQITKHVAQILDSRMNTKYDENDKLIREVKVITLKSKLVSDFRKDFQFYKVREINNYHHAHDAYLNAVVGTALIKKYPKLESEFVYGDYKVYDVRKMIAKSEQEIGKATAKYFFYSNIMNFFKTEITLANGEIRKRPLIETNGETGEIVWDKGRDFATVRKVLSMPQVNIVKKTEVQTGGFSKESILPKRNSDKLIARKKDWDPKKYGGFDSPTVAYSVLVVAKVEKGKSKKLKSVKELLGITIMERSSFEKNPIDFLEAKGYKEVKKDLIIKLPKYSLFELENGRKRMLASAGELQKGNELALPSKYVNFLYLASHYEKLKGSPEDNEQKQLFVEQHKHYLDEIIEQISEFSKRVILADANLDKVLSAYNKHRDKPIREQAENIIHLFTLTNLGAPAAFKYFDTTIDRKRYTSTKEVLDATLIHQSITGLYETRIDLSQLGGDGGEAAAKPAPGSSGGVLNLEEEYRLHEKPVPSSIDPSWLQLFPTVWAERAGMGLANQVPPVVVELRSGASPVAVRQYPMSKEAREGIRPHIQRFLDLGVLVPCQSPWNTPLLPVKKPGTNDYRPVQDLREINKRVQDIHPTVPNPYNLLSSLPPSHTWYSVLDLKDAFFCLKLHPNSQPLFAFEWRDPEKGNTGQLTWTRLPQGFKNSPTLFNEALHRDLAPFRALNPQVVLLQYVDDLLVAAPTYRDCKEGTQKLLQELSKLGYRVSAKKAQLCQKEVTYLGYLLKEGKRWLTPARKATVMKIPPPTTPRQVREFLGKAGFCRLFIPGFASLAAPLYPLTKPSIPFIWTEEHQKAFDRIKEALLSAPALALPDLTKPFTLYVDERAGVARGVLTQTLGPWRRPVAYLSKKLDPVASGWPTCLKAVAAVALLLKDADKLTLGQNVTVIASHSLESIVRQPPDRWMTNARMTHYQSLLLNERVSFAPPAVLNPATLLPVESEATPVHRCSEILAEETGTRRDLKDQPLPGVPAWYTDGSSFIAEGKRRAGAAIVDGKRTVWASSLPEGTSAQKAELVALTQALRLAEGKDINIYTDSRYAFATAHIHGAIYKQRGWLTSAGKDIKNKEEILALLEAIHLPKRVAIIHCPGHQKGNDPVATGNRRADEAAKQAALSTRVLAETTKPAGKRTADGSEFEKRTADGSEFESPKKKAKVE

SEQ ID NO: 875 - protein, 2092 aa, synthetic construct
MPAAKRVKLDGGDKKYSIGLDIGTNSVGWAVITDEYKVPSKKFKVLGNTDRHSIKKNLIGALLFDSGETAEATRLKRTARRRYTRRKNRICYLQEIFSNEMAKVDDSFFHRLEESFLVEEDKKHERHPIFGNIVDEVAYHEKYPTIYHLRKKLVDSTDKADLRLIYLALAHMIKFRGHFLIEGDLNPDNSDVDKLFIQLVQTYNQLFEENPINASGVDAKAILSARLSKSRRLENLIAQLPGEKKNGLFGNLIALSLGLTPNFKSNFDLAEDAKLQLSKDTYDDDLDNLLAQIGDQYADLFLAAKNLSDAILLSDILRVNTEITKAPLSASMIKRYDEHHQDLTLLKALVRQQLPEKYKEIFFDQSKNGYAGYIDGGASQEEFYKFIKPILEKMDGTEELLVKLNREDLLRKQRTFDNGSIPHQIHLGELHAILRRQEDFYPFLKDNREKIEKILTFRIPYYVGPLARGNSRFAWMTRKSEETITPWNFEEVVDKGASAQSFIERMTNFDKNLPNEKVLPKHSLLYEYFTVYNELTKVKYVTEGMRKPAFLSGEQKKAIVDLLFKTNRKVTVKQLKEDYFKKIECFDSVEISGVEDRFNASLGTYHDLLKIIKDKDFLDNEENEDILEDIVLTLTLFEDREMIEERLKTYAHLFDDKVMKQLKRRRYTGWGRLSRKLINGIRDKQSGKTILDFLKSDGFANRNFMQLIHDDSLTFKEDIQKAQVSGQGDSLHEHIANLAGSPAIKKGILQTVKVVDELVKVMGRHKPENIVIEMARENQTTQKGQKNSRERMKRIEEGIKELGSQILKEHPVENTQLQNEKLYLYYLQNGRDMYVDQELDINRLSDYDVDHIVPQSFLKDDSIDNKVLTRSDKARGKSDNVPSEEVVKKMKNYWRQLLNAKLITQRKFDNLTKAERGGLSELDKAGFIKRQLVETRQITKHVAQILDSRMNTKYDENDKLIREVKVITLKSKLVSDFRKDFQFYKVREINNYHHAHDAYLNAVVGTALIKKYPKLESEFVYGDYKVYDVRKMIAKSEQEIGKATAKYFFYSNIMNFFKTEITLANGEIRKRPLIETNGETGEIVWDKGRDFATVRKVLSMPQVNIVKKTEVQTGGFSKESILPKRNSDKLIARKKDWDPKKYGGFDSPTVAYSVLVVAKVEKGKSKKLKSVKELLGITIMERSSFEKNPIDFLEAKGYKEVKKDLIIKLPKYSLFELENGRKRMLASAGELQKGNELALPSKYVNFLYLASHYEKLKGSPEDNEQKQLFVEQHKHYLDEIIEQISEFSKRVILADANLDKVLSAYNKHRDKPIREQAENIIHLFTLTNLGAPAAFKYFDTTIDRKRYTSTKEVLDATLIHQSITGLYETRIDLSQLGGDGGGGSPAPGSSGGVLNLEEEYRLHEKPVPSSIDPSWLQLFPTVWAERAGMGLANQVPPVVVELRSGASPVAVRQYPMSKEAREGIRPHIQRFLDLGVLVPCQSPWNTPLLPVKKPGTNDYRPVQDLREINKRVQDIHPTVPNPYNLLSSLPPSHTWYSVLDLKDAFFCLKLHPNSQPLFAFEWRDPEKGNTGQLTWTRLPQGFKNSPTLFNEALHRDLAPFRALNPQVVLLQYVDDLLVAAPTYRDCKEGTQKLLQELSKLGYRVSAKKAQLCQKEVTYLGYLLKEGKRWLTPARKATVMKIPPPTTPRQVREFLGKAGFCRLFIPGFASLAAPLYPLTKPSIPFIWTEEHQKAFDRIKEALLSAPALALPDLTKPFTLYVDERAGVARGVLTQTLGPWRRPVAYLSKKLDPVASGWPTCLKAVAAVALLLKDADKLTLGQNVTVIASHSLESIVRQPPDRWMTNARMTHYQSLLLNERVSFAPPAVLNPATLLPVESEATPVHRCSEILAEETGTRRDLKDQPLPGVPAWYTDGSSFIAEGKRRAGAAIVDGKRTVWASSLPEGTSAQKAELVALTQALRLAEGKDINIYTDSRYAFATAHIHGAIYKQRGWLTSAGKDIKNKEEILALLEAIHLPKRVAIIHCPGHQKGNDPVATGNRRADEAAKQAALSTRVLAETTKPAGKRTADGSEFEKRTADGSEFESPKKKAKVE

SEQ ID NO: 876 - protein, 2086 aa, synthetic construct
MPAAKRVKLDGGDKKYSIGLDIGTNSVGWAVITDEYKVPSKKFKVLGNTDRHSIKKNLIGALLFDSGETAEATRLKRTARRRYTRRKNRICYLQEIFSNEMAKVDDSFFHRLEESFLVEEDKKHERHPIFGNIVDEVAYHEKYPTIYHLRKKLVDSTDKADLRLIYLALAHMIKFRGHFLIEGDLNPDNSDVDKLFIQLVQTYNQLFEENPINASGVDAKAILSARLSKSRRLENLIAQLPGEKKNGLFGNLIALSLGLTPNFKSNFDLAEDAKLQLSKDTYDDDLDNLLAQIGDQYADLFLAAKNLSDAILLSDILRVNTEITKAPLSASMIKRYDEHHQDLTLLKALVRQQLPEKYKEIFFDQSKNGYAGYIDGGASQEEFYKFIKPILEKMDGTEELLVKLNREDLLRKQRTFDNGSIPHQIHLGELHAILRRQEDFYPFLKDNREKIEKILTFRIPYYVGPLARGNSRFAWMTRKSEETITPWNFEEVVDKGASAQSFIERMTNFDKNLPNEKVLPKHSLLYEYFTVYNELTKVKYVTEGMRKPAFLSGEQKKAIVDLLFKTNRKVTVKQLKEDYFKKIECFDSVEISGVEDRFNASLGTYHDLLKIIKDKDFLDNEENEDILEDIVLTLTLFEDREMIEERLKTYAHLFDDKVMKQLKRRRYTGWGRLSRKLINGIRDKQSGKTILDFLKSDGFANRNFMQLIHDDSLTFKEDIQKAQVSGQGDSLHEHIANLAGSPAIKKGILQTVKVVDELVKVMGRHKPENIVIEMARENQTTQKGQKNSRERMKRIEEGIKELGSQILKEHPVENTQLQNEKLYLYYLQNGRDMYVDQELDINRLSDYDVDHIVPQSFLKDDSIDNKVLTRSDKARGKSDNVPSEEVVKKMKNYWRQLLNAKLITQRKFDNLTKAERGGLSELDKAGFIKRQLVETRQITKHVAQILDSRMNTKYDENDKLIREVKVITLKSKLVSDFRKDFQFYKVREINNYHHAHDAYLNAVVGTALIKKYPKLESEFVYGDYKVYDVRKMIAKSEQEIGKATAKYFFYSNIMNFFKTEITLANGEIRKRPLIETNGETGEIVWDKGRDFATVRKVLSMPQVNIVKKTEVQTGGFSKESILPKRNSDKLIARKKDWDPKKYGGFDSPTVAYSVLVVAKVEKGKSKKLKSVKELLGITIMERSSFEKNPIDFLEAKGYKEVKKDLIIKLPKYSLFELENGRKRMLASAGELQKGNELALPSKYVNFLYLASHYEKLKGSPEDNEQKQLFVEQHKHYLDEIIEQISEFSKRVILADANLDKVLSAYNKHRDKPIREQAENIIHLFTLTNLGAPAAFKYFDTTIDRKRYTSTKEVLDATLIHQSITGLYETRIDLSQLGGDGGGSSGGVLNLEEEYRLHEKPVPSSIDPSWLQLFPTVWAERAGMGLANQVPPVVVELRSGASPVAVRQYPMSKEAREGIRPHIQRFLDLGVLVPCQSPWNTPLLPVKKPGTNDYRPVQDLREINKRVQDIHPTVPNPYNLLSSLPPSHTWYSVLDLKDAFFCLKLHPNSQPLFAFEWRDPEKGNTGQLTWTRLPQGFKNSPTLFNEALHRDLAPFRALNPQVVLLQYVDDLLVAAPTYRDCKEGTQKLLQELSKLGYRVSAKKAQLCQKEVTYLGYLLKEGKRWLTPARKATVMKIPPPTTPRQVREFLGKAGFCRLFIPGFASLAAPLYPLTKPSIPFIWTEEHQKAFDRIKEALLSAPALALPDLTKPFTLYVDERAGVARGVLTQTLGPWRRPVAYLSKKLDPVASGWPTCLKAVAAVALLLKDADKLTLGQNVTVIASHSLESIVRQPPDRWMTNARMTHYQSLLLNERVSFAPPAVLNPATLLPVESEATPVHRCSEILAEETGTRRDLKDQPLPGVPAWYTDGSSFIAEGKRRAGAAIVDGKRTVWASSLPEGTSAQKAELVALTQALRLAEGKDINIYTDSRYAFATAHIHGAIYKQRGWLTSAGKDIKNKEEILALLEAIHLPKRVAIIHCPGHQKGNDPVATGNRRADEAAKQAALSTRVLAETTKPAGKRTADGSEFEKRTADGSEFESPKKKAKVE

SEQ ID NO: 877 - protein, 2099 aa, synthetic construct
MPAAKRVKLDGGDKKYSIGLDIGTNSVGWAVITDEYKVPSKKFKVLGNTDRHSIKKNLIGALLFDSGETAEATRLKRTARRRYTRRKNRICYLQEIFSNEMAKVDDSFFHRLEESFLVEEDKKHERHPIFGNIVDEVAYHEKYPTIYHLRKKLVDSTDKADLRLIYLALAHMIKFRGHFLIEGDLNPDNSDVDKLFIQLVQTYNQLFEENPINASGVDAKAILSARLSKSRRLENLIAQLPGEKKNGLFGNLIALSLGLTPNFKSNFDLAEDAKLQLSKDTYDDDLDNLLAQIGDQYADLFLAAKNLSDAILLSDILRVNTEITKAPLSASMIKRYDEHHQDLTLLKALVRQQLPEKYKEIFFDQSKNGYAGYIDGGASQEEFYKFIKPILEKMDGTEELLVKLNREDLLRKQRTFDNGSIPHQIHLGELHAILRRQEDFYPFLKDNREKIEKILTFRIPYYVGPLARGNSRFAWMTRKSEETITPWNFEEVVDKGASAQSFIERMTNFDKNLPNEKVLPKHSLLYEYFTVYNELTKVKYVTEGMRKPAFLSGEQKKAIVDLLFKTNRKVTVKQLKEDYFKKIECFDSVEISGVEDRFNASLGTYHDLLKIIKDKDFLDNEENEDILEDIVLTLTLFEDREMIEERLKTYAHLFDDKVMKQLKRRRYTGWGRLSRKLINGIRDKQSGKTILDFLKSDGFANRNFMQLIHDDSLTFKEDIQKAQVSGQGDSLHEHIANLAGSPAIKKGILQTVKVVDELVKVMGRHKPENIVIEMARENQTTQKGQKNSRERMKRIEEGIKELGSQILKEHPVENTQLQNEKLYLYYLQNGRDMYVDQELDINRLSDYDVDHIVPQSFLKDDSIDNKVLTRSDKARGKSDNVPSEEVVKKMKNYWRQLLNAKLITQRKFDNLTKAERGGLSELDKAGFIKRQLVETRQITKHVAQILDSRMNTKYDENDKLIREVKVITLKSKLVSDFRKDFQFYKVREINNYHHAHDAYLNAVVGTALIKKYPKLESEFVYGDYKVYDVRKMIAKSEQEIGKATAKYFFYSNIMNFFKTEITLANGEIRKRPLIETNGETGEIVWDKGRDFATVRKVLSMPQVNIVKKTEVQTGGFSKESILPKRNSDKLIARKKDWDPKKYGGFDSPTVAYSVLVVAKVEKGKSKKLKSVKELLGITIMERSSFEKNPIDFLEAKGYKEVKKDLIIKLPKYSLFELENGRKRMLASAGELQKGNELALPSKYVNFLYLASHYEKLKGSPEDNEQKQLFVEQHKHYLDEIIEQISEFSKRVILADANLDKVLSAYNKHRDKPIREQAENIIHLFTLTNLGAPAAFKYFDTTIDRKRYTSTKEVLDATLIHQSITGLYETRIDLSQLGGDGGSGSETPGTSESATPESGGVLNLEEEYRLHEKPVPSSIDPSWLQLFPTVWAERAGMGLANQVPPVVVELRSGASPVAVRQYPMSKEAREGIRPHIQRFLDLGVLVPCQSPWNTPLLPVKKPGTNDYRPVQDLREINKRVQDIHPTVPNPYNLLSSLPPSHTWYSVLDLKDAFFCLKLHPNSQPLFAFEWRDPEKGNTGQLTWTRLPQGFKNSPTLFNEALHRDLAPFRALNPQVVLLQYVDDLLVAAPTYRDCKEGTQKLLQELSKLGYRVSAKKAQLCQKEVTYLGYLLKEGKRWLTPARKATVMKIPPPTTPRQVREFLGKAGFCRLFIPGFASLAAPLYPLTKPSIPFIWTEEHQKAFDRIKEALLSAPALALPDLTKPFTLYVDERAGVARGVLTQTLGPWRRPVAYLSKKLDPVASGWPTCLKAVAAVALLLKDADKLTLGQNVTVIASHSLESIVRQPPDRWMTNARMTHYQSLLLNERVSFAPPAVLNPATLLPVESEATPVHRCSEILAEETGTRRDLKDQPLPGVPAWYTDGSSFIAEGKRRAGAAIVDGKRTVWASSLPEGTSAQKAELVALTQALRLAEGKDINIYTDSRYAFATAHIHGAIYKQRGWLTSAGKDIKNKEEILALLEAIHLPKRVAIIHCPGHQKGNDPVATGNRRADEAAKQAALSTRVLAETTKPAGKRTADGSEFEKRTADGSEFESPKKKAKVE

SEQ ID NO: 878 - protein, 2092 aa, synthetic construct
MPAAKRVKLDGGDKKYSIGLDIGTNSVGWAVITDEYKVPSKKFKVLGNTDRHSIKKNLIGALLFDSGETAEATRLKRTARRRYTRRKNRICYLQEIFSNEMAKVDDSFFHRLEESFLVEEDKKHERHPIFGNIVDEVAYHEKYPTIYHLRKKLVDSTDKADLRLIYLALAHMIKFRGHFLIEGDLNPDNSDVDKLFIQLVQTYNQLFEENPINASGVDAKAILSARLSKSRRLENLIAQLPGEKKNGLFGNLIALSLGLTPNFKSNFDLAEDAKLQLSKDTYDDDLDNLLAQIGDQYADLFLAAKNLSDAILLSDILRVNTEITKAPLSASMIKRYDEHHQDLTLLKALVRQQLPEKYKEIFFDQSKNGYAGYIDGGASQEEFYKFIKPILEKMDGTEELLVKLNREDLLRKQRTFDNGSIPHQIHLGELHAILRRQEDFYPFLKDNREKIEKILTFRIPYYVGPLARGNSRFAWMTRKSEETITPWNFEEVVDKGASAQSFIERMTNFDKNLPNEKVLPKHSLLYEYFTVYNELTKVKYVTEGMRKPAFLSGEQKKAIVDLLFKTNRKVTVKQLKEDYFKKIECFDSVEISGVEDRFNASLGTYHDLLKIIKDKDFLDNEENEDILEDIVLTLTLFEDREMIEERLKTYAHLFDDKVMKQLKRRRYTGWGRLSRKLINGIRDKQSGKTILDFLKSDGFANRNFMQLIHDDSLTFKEDIQKAQVSGQGDSLHEHIANLAGSPAIKKGILQTVKVVDELVKVMGRHKPENIVIEMARENQTTQKGQKNSRERMKRIEEGIKELGSQILKEHPVENTQLQNEKLYLYYLQNGRDMYVDQELDINRLSDYDVDHIVPQSFLKDDSIDNKVLTRSDKARGKSDNVPSEEVVKKMKNYWRQLLNAKLITQRKFDNLTKAERGGLSELDKAGFIKRQLVETRQITKHVAQILDSRMNTKYDENDKLIREVKVITLKSKLVSDFRKDFQFYKVREINNYHHAHDAYLNAVVGTALIKKYPKLESEFVYGDYKVYDVRKMIAKSEQEIGKATAKYFFYSNIMNFFKTEITLANGEIRKRPLIETNGETGEIVWDKGRDFATVRKVLSMPQVNIVKKTEVQTGGFSKESILPKRNSDKLIARKKDWDPKKYGGFDSPTVAYSVLVVAKVEKGKSKKLKSVKELLGITIMERSSFEKNPIDFLEAKGYKEVKKDLIIKLPKYSLFELENGRKRMLASAGELQKGNELALPSKYVNFLYLASHYEKLKGSPEDNEQKQLFVEQHKHYLDEIIEQISEFSKRVILADANLDKVLSAYNKHRDKPIREQAENIIHLFTLTNLGAPAAFKYFDTTIDRKRYTSTKEVLDATLIHQSITGLYETRIDLSQLGGDGGGGGPAPGGSGGVLNLEEEYRLHEKPVPSSIDPSWLQLFPTVWAERAGMGLANQVPPVVVELRSGASPVAVRQYPMSKEAREGIRPHIQRFLDLGVLVPCQSPWNTPLLPVKKPGTNDYRPVQDLREINKRVQDIHPTVPNPYNLLSSLPPSHTWYSVLDLKDAFFCLKLHPNSQPLFAFEWRDPEKGNTGQLTWTRLPQGFKNSPTLFNEALHRDLAPFRALNPQVVLLQYVDDLLVAAPTYRDCKEGTQKLLQELSKLGYRVSAKKAQLCQKEVTYLGYLLKEGKRWLTPARKATVMKIPPPTTPRQVREFLGKAGFCRLFIPGFASLAAPLYPLTKPSIPFIWTEEHQKAFDRIKEALLSAPALALPDLTKPFTLYVDERAGVARGVLTQTLGPWRRPVAYLSKKLDPVASGWPTCLKAVAAVALLLKDADKLTLGQNVTVIASHSLESIVRQPPDRWMTNARMTHYQSLLLNERVSFAPPAVLNPATLLPVESEATPVHRCSEILAEETGTRRDLKDQPLPGVPAWYTDGSSFIAEGKRRAGAAIVDGKRTVWASSLPEGTSAQKAELVALTQALRLAEGKDINIYTDSRYAFATAHIHGAIYKQRGWLTSAGKDIKNKEEILALLEAIHLPKRVAIIHCPGHQKGNDPVATGNRRADEAAKQAALSTRVLAETTKPAGKRTADGSEFEKRTADGSEFESPKKKAKVE

SEQ ID NO: 879 - protein, 2108 aa, synthetic construct
MPAAKRVKLDGGDKKYSIGLDIGTNSVGWAVITDEYKVPSKKFKVLGNTDRHSIKKNLIGALLFDSGETAEATRLKRTARRRYTRRKNRICYLQEIFSNEMAKVDDSFFHRLEESFLVEEDKKHERHPIFGNIVDEVAYHEKYPTIYHLRKKLVDSTDKADLRLIYLALAHMIKFRGHFLIEGDLNPDNSDVDKLFIQLVQTYNQLFEENPINASGVDAKAILSARLSKSRRLENLIAQLPGEKKNGLFGNLIALSLGLTPNFKSNFDLAEDAKLQLSKDTYDDDLDNLLAQIGDQYADLFLAAKNLSDAILLSDILRVNTEITKAPLSASMIKRYDEHHQDLTLLKALVRQQLPEKYKEIFFDQSKNGYAGYIDGGASQEEFYKFIKPILEKMDGTEELLVKLNREDLLRKQRTFDNGSIPHQIHLGELHAILRRQEDFYPFLKDNREKIEKILTFRIPYYVGPLARGNSRFAWMTRKSEETITPWNFEEVVDKGASAQSFIERMTNFDKNLPNEKVLPKHSLLYEYFTVYNELTKVKYVTEGMRKPAFLSGEQKKAIVDLLFKTNRKVTVKQLKEDYFKKIECFDSVEISGVEDRFNASLGTYHDLLKIIKDKDFLDNEENEDILEDIVLTLTLFEDREMIEERLKTYAHLFDDKVMKQLKRRRYTGWGRLSRKLINGIRDKQSGKTILDFLKSDGFANRNFMQLIHDDSLTFKEDIQKAQVSGQGDSLHEHIANLAGSPAIKKGILQTVKVVDELVKVMGRHKPENIVIEMARENQTTQKGQKNSRERMKRIEEGIKELGSQILKEHPVENTQLQNEKLYLYYLQNGRDMYVDQELDINRLSDYDVDHIVPQSFLKDDSIDNKVLTRSDKARGKSDNVPSEEVVKKMKNYWRQLLNAKLITQRKFDNLTKAERGGLSELDKAGFIKRQLVETRQITKHVAQILDSRMNTKYDENDKLIREVKVITLKSKLVSDFRKDFQFYKVREINNYHHAHDAYLNAVVGTALIKKYPKLESEFVYGDYKVYDVRKMIAKSEQEIGKATAKYFFYSNIMNFFKTEITLANGEIRKRPLIETNGETGEIVWDKGRDFATVRKVLSMPQVNIVKKTEVQTGGFSKESILPKRNSDKLIARKKDWDPKKYGGFDSPTVAYSVLVVAKVEKGKSKKLKSVKELLGITIMERSSFEKNPIDFLEAKGYKEVKKDLIIKLPKYSLFELENGRKRMLASAGELQKGNELALPSKYVNFLYLASHYEKLKGSPEDNEQKQLFVEQHKHYLDEIIEQISEFSKRVILADANLDKVLSAYNKHRDKPIREQAENIIHLFTLTNLGAPAAFKYFDTTIDRKRYTSTKEVLDATLIHQSITGLYETRIDLSQLGGDGGEAAAKEAAAKEAAAKEAAAKEAAAKGGVLNLEEEYRLHEKPVPSSIDPSWLQLFPTVWAERAGMGLANQVPPVVVELRSGASPVAVRQYPMSKEAREGIRPHIQRFLDLGVLVPCQSPWNTPLLPVKKPGTNDYRPVQDLREINKRVQDIHPTVPNPYNLLSSLPPSHTWYSVLDLKDAFFCLKLHPNSQPLFAFEWRDPEKGNTGQLTWTRLPQGFKNSPTLFNEALHRDLAPFRALNPQVVLLQYVDDLLVAAPTYRDCKEGTQKLLQELSKLGYRVSAKKAQLCQKEVTYLGYLLKEGKRWLTPARKATVMKIPPPTTPRQVREFLGKAGFCRLFIPGFASLAAPLYPLTKPSIPFIWTEEHQKAFDRIKEALLSAPALALPDLTKPFTLYVDERAGVARGVLTQTLGPWRRPVAYLSKKLDPVASGWPTCLKAVAAVALLLKDADKLTLGQNVTVIASHSLESIVRQPPDRWMTNARMTHYQSLLLNERVSFAPPAVLNPATLLPVESEATPVHRCSEILAEETGTRRDLKDQPLPGVPAWYTDGSSFIAEGKRRAGAAIVDGKRTVWASSLPEGTSAQKAELVALTQALRLAEGKDINIYTDSRYAFATAHIHGAIYKQRGWLTSAGKDIKNKEEILALLEAIHLPKRVAIIHCPGHQKGNDPVATGNRRADEAAKQAALSTRVLAETTKPAGKRTADGSEFEKRTADGSEFESPKKKAKVE

SEQ ID NO: 880 - protein, 2092 aa, synthetic construct
MPAAKRVKLDGGDKKYSIGLDIGTNSVGWAVITDEYKVPSKKFKVLGNTDRHSIKKNLIGALLFDSGETAEATRLKRTARRRYTRRKNRICYLQEIFSNEMAKVDDSFFHRLEESFLVEEDKKHERHPIFGNIVDEVAYHEKYPTIYHLRKKLVDSTDKADLRLIYLALAHMIKFRGHFLIEGDLNPDNSDVDKLFIQLVQTYNQLFEENPINASGVDAKAILSARLSKSRRLENLIAQLPGEKKNGLFGNLIALSLGLTPNFKSNFDLAEDAKLQLSKDTYDDDLDNLLAQIGDQYADLFLAAKNLSDAILLSDILRVNTEITKAPLSASMIKRYDEHHQDLTLLKALVRQQLPEKYKEIFFDQSKNGYAGYIDGGASQEEFYKFIKPILEKMDGTEELLVKLNREDLLRKQRTFDNGSIPHQIHLGELHAILRRQEDFYPFLKDNREKIEKILTFRIPYYVGPLARGNSRFAWMTRKSEETITPWNFEEVVDKGASAQSFIERMTNFDKNLPNEKVLPKHSLLYEYFTVYNELTKVKYVTEGMRKPAFLSGEQKKAIVDLLFKTNRKVTVKQLKEDYFKKIECFDSVEISGVEDRFNASLGTYHDLLKIIKDKDFLDNEENEDILEDIVLTLTLFEDREMIEERLKTYAHLFDDKVMKQLKRRRYTGWGRLSRKLINGIRDKQSGKTILDFLKSDGFANRNFMQLIHDDSLTFKEDIQKAQVSGQGDSLHEHIANLAGSPAIKKGILQTVKVVDELVKVMGRHKPENIVIEMARENQTTQKGQKNSRERMKRIEEGIKELGSQILKEHPVENTQLQNEKLYLYYLQNGRDMYVDQELDINRLSDYDVDHIVPQSFLKDDSIDNKVLTRSDKARGKSDNVPSEEVVKKMKNYWRQLLNAKLITQRKFDNLTKAERGGLSELDKAGFIKRQLVETRQITKHVAQILDSRMNTKYDENDKLIREVKVITLKSKLVSDFRKDFQFYKVREINNYHHAHDAYLNAVVGTALIKKYPKLESEFVYGDYKVYDVRKMIAKSEQEIGKATAKYFFYSNIMNFFKTEITLANGEIRKRPLIETNGETGEIVWDKGRDFATVRKVLSMPQVNIVKKTEVQTGGFSKESILPKRNSDKLIARKKDWDPKKYGGFDSPTVAYSVLVVAKVEKGKSKKLKSVKELLGITIMERSSFEKNPIDFLEAKGYKEVKKDLIIKLPKYSLFELENGRKRMLASAGELQKGNELALPSKYVNFLYLASHYEKLKGSPEDNEQKQLFVEQHKHYLDEIIEQISEFSKRVILADANLDKVLSAYNKHRDKPIREQAENIIHLFTLTNLGAPAAFKYFDTTIDRKRYTSTKEVLDATLIHQSITGLYETRIDLSQLGGDGGPAPGGSGSSGGVLNLEEEYRLHEKPVPSSIDPSWLQLFPTVWAERAGMGLANQVPPVVVELRSGASPVAVRQYPMSKEAREGIRPHIQRFLDLGVLVPCQSPWNTPLLPVKKPGTNDYRPVQDLREINKRVQDIHPTVPNPYNLLSSLPPSHTWYSVLDLKDAFFCLKLHPNSQPLFAFEWRDPEKGNTGQLTWTRLPQGFKNSPTLFNEALHRDLAPFRALNPQVVLLQYVDDLLVAAPTYRDCKEGTQKLLQELSKLGYRVSAKKAQLCQKEVTYLGYLLKEGKRWLTPARKATVMKIPPPTTPRQVREFLGKAGFCRLFIPGFASLAAPLYPLTKPSIPFIWTEEHQKAFDRIKEALLSAPALALPDLTKPFTLYVDERAGVARGVLTQTLGPWRRPVAYLSKKLDPVASGWPTCLKAVAAVALLLKDADKLTLGQNVTVIASHSLESIVRQPPDRWMTNARMTHYQSLLLNERVSFAPPAVLNPATLLPVESEATPVHRCSEILAEETGTRRDLKDQPLPGVPAWYTDGSSFIAEGKRRAGAAIVDGKRTVWASSLPEGTSAQKAELVALTQALRLAEGKDINIYTDSRYAFATAHIHGAIYKQRGWLTSAGKDIKNKEEILALLEAIHLPKRVAIIHCPGHQKGNDPVATGNRRADEAAKQAALSTRVLAETTKPAGKRTADGSEFEKRTADGSEFESPKKKAKVE

SEQ ID NO: 881 - protein, 2089 aa, synthetic construct
MPAAKRVKLDGGDKKYSIGLDIGTNSVGWAVITDEYKVPSKKFKVLGNTDRHSIKKNLIGALLFDSGETAEATRLKRTARRRYTRRKNRICYLQEIFSNEMAKVDDSFFHRLEESFLVEEDKKHERHPIFGNIVDEVAYHEKYPTIYHLRKKLVDSTDKADLRLIYLALAHMIKFRGHFLIEGDLNPDNSDVDKLFIQLVQTYNQLFEENPINASGVDAKAILSARLSKSRRLENLIAQLPGEKKNGLFGNLIALSLGLTPNFKSNFDLAEDAKLQLSKDTYDDDLDNLLAQIGDQYADLFLAAKNLSDAILLSDILRVNTEITKAPLSASMIKRYDEHHQDLTLLKALVRQQLPEKYKEIFFDQSKNGYAGYIDGGASQEEFYKFIKPILEKMDGTEELLVKLNREDLLRKQRTFDNGSIPHQIHLGELHAILRRQEDFYPFLKDNREKIEKILTFRIPYYVGPLARGNSRFAWMTRKSEETITPWNFEEVVDKGASAQSFIERMTNFDKNLPNEKVLPKHSLLYEYFTVYNELTKVKYVTEGMRKPAFLSGEQKKAIVDLLFKTNRKVTVKQLKEDYFKKIECFDSVEISGVEDRFNASLGTYHDLLKIIKDKDFLDNEENEDILEDIVLTLTLFEDREMIEERLKTYAHLFDDKVMKQLKRRRYTGWGRLSRKLINGIRDKQSGKTILDFLKSDGFANRNFMQLIHDDSLTFKEDIQKAQVSGQGDSLHEHIANLAGSPAIKKGILQTVKVVDELVKVMGRHKPENIVIEMARENQTTQKGQKNSRERMKRIEEGIKELGSQILKEHPVENTQLQNEKLYLYYLQNGRDMYVDQELDINRLSDYDVDHIVPQSFLKDDSIDNKVLTRSDKARGKSDNVPSEEVVKKMKNYWRQLLNAKLITQRKFDNLTKAERGGLSELDKAGFIKRQLVETRQITKHVAQILDSRMNTKYDENDKLIREVKVITLKSKLVSDFRKDFQFYKVREINNYHHAHDAYLNAVVGTALIKKYPKLESEFVYGDYKVYDVRKMIAKSEQEIGKATAKYFFYSNIMNFFKTEITLANGEIRKRPLIETNGETGEIVWDKGRDFATVRKVLSMPQVNIVKKTEVQTGGFSKESILPKRNSDKLIARKKDWDPKKYGGFDSPTVAYSVLVVAKVEKGKSKKLKSVKELLGITIMERSSFEKNPIDFLEAKGYKEVKKDLIIKLPKYSLFELENGRKRMLASAGELQKGNELALPSKYVNFLYLASHYEKLKGSPEDNEQKQLFVEQHKHYLDEIIEQISEFSKRVILADANLDKVLSAYNKHRDKPIREQAENIIHLFTLTNLGAPAAFKYFDTTIDRKRYTSTKEVLDATLIHQSITGLYETRIDLSQLGGDGGGGSGSSGGVLNLEEEYRLHEKPVPSSIDPSWLQLFPTVWAERAGMGLANQVPPVVVELRSGASPVAVRQYPMSKEAREGIRPHIQRFLDLGVLVPCQSPWNTPLLPVKKPGTNDYRPVQDLREINKRVQDIHPTVPNPYNLLSSLPPSHTWYSVLDLKDAFFCLKLHPNSQPLFAFEWRDPEKGNTGQLTWTRLPQGFKNSPTLFNEALHRDLAPFRALNPQVVLLQYVDDLLVAAPTYRDCKEGTQKLLQELSKLGYRVSAKKAQLCQKEVTYLGYLLKEGKRWLTPARKATVMKIPPPTTPRQVREFLGKAGFCRLFIPGFASLAAPLYPLTKPSIPFIWTEEHQKAFDRIKEALLSAPALALPDLTKPFTLYVDERAGVARGVLTQTLGPWRRPVAYLSKKLDPVASGWPTCLKAVAAVALLLKDADKLTLGQNVTVIASHSLESIVRQPPDRWMTNARMTHYQSLLLNERVSFAPPAVLNPATLLPVESEATPVHRCSEILAEETGTRRDLKDQPLPGVPAWYTDGSSFIAEGKRRAGAAIVDGKRTVWASSLPEGTSAQKAELVALTQALRLAEGKDINIYTDSRYAFATAHIHGAIYKQRGWLTSAGKDIKNKEEILALLEAIHLPKRVAIIHCPGHQKGNDPVATGNRRADEAAKQAALSTRVLAETTKPAGKRTADGSEFEKRTADGSEFESPKKKAKVE

SEQ ID NO: 882 - protein, 2089 aa, synthetic construct
MPAAKRVKLDGGDKKYSIGLDIGTNSVGWAVITDEYKVPSKKFKVLGNTDRHSIKKNLIGALLFDSGETAEATRLKRTARRRYTRRKNRICYLQEIFSNEMAKVDDSFFHRLEESFLVEEDKKHERHPIFGNIVDEVAYHEKYPTIYHLRKKLVDSTDKADLRLIYLALAHMIKFRGHFLIEGDLNPDNSDVDKLFIQLVQTYNQLFEENPINASGVDAKAILSARLSKSRRLENLIAQLPGEKKNGLFGNLIALSLGLTPNFKSNFDLAEDAKLQLSKDTYDDDLDNLLAQIGDQYADLFLAAKNLSDAILLSDILRVNTEITKAPLSASMIKRYDEHHQDLTLLKALVRQQLPEKYKEIFFDQSKNGYAGYIDGGASQEEFYKFIKPILEKMDGTEELLVKLNREDLLRKQRTFDNGSIPHQIHLGELHAILRRQEDFYPFLKDNREKIEKILTFRIPYYVGPLARGNSRFAWMTRKSEETITPWNFEEVVDKGASAQSFIERMTNFDKNLPNEKVLPKHSLLYEYFTVYNELTKVKYVTEGMRKPAFLSGEQKKAIVDLLFKTNRKVTVKQLKEDYFKKIECFDSVEISGVEDRFNASLGTYHDLLKIIKDKDFLDNEENEDILEDIVLTLTLFEDREMIEERLKTYAHLFDDKVMKQLKRRRYTGWGRLSRKLINGIRDKQSGKTILDFLKSDGFANRNFMQLIHDDSLTFKEDIQKAQVSGQGDSLHEHIANLAGSPAIKKGILQTVKVVDELVKVMGRHKPENIVIEMARENQTTQKGQKNSRERMKRIEEGIKELGSQILKEHPVENTQLQNEKLYLYYLQNGRDMYVDQELDINRLSDYDVDHIVPQSFLKDDSIDNKVLTRSDKARGKSDNVPSEEVVKKMKNYWRQLLNAKLITQRKFDNLTKAERGGLSELDKAGFIKRQLVETRQITKHVAQILDSRMNTKYDENDKLIREVKVITLKSKLVSDFRKDFQFYKVREINNYHHAHDAYLNAVVGTALIKKYPKLESEFVYGDYKVYDVRKMIAKSEQEIGKATAKYFFYSNIMNFFKTEITLANGEIRKRPLIETNGETGEIVWDKGRDFATVRKVLSMPQVNIVKKTEVQTGGFSKESILPKRNSDKLIARKKDWDPKKYGGFDSPTVAYSVLVVAKVEKGKSKKLKSVKELLGITIMERSSFEKNPIDFLEAKGYKEVKKDLIIKLPKYSLFELENGRKRMLASAGELQKGNELALPSKYVNFLYLASHYEKLKGSPEDNEQKQLFVEQHKHYLDEIIEQISEFSKRVILADANLDKVLSAYNKHRDKPIREQAENIIHLFTLTNLGAPAAFKYFDTTIDRKRYTSTKEVLDATLIHQSITGLYETRIDLSQLGGDGGGGGGGGGGVLNLEEEYRLHEKPVPSSIDPSWLQLFPTVWAERAGMGLANQVPPVVVELRSGASPVAVRQYPMSKEAREGIRPHIQRFLDLGVLVPCQSPWNTPLLPVKKPGTNDYRPVQDLREINKRVQDIHPTVPNPYNLLSSLPPSHTWYSVLDLKDAFFCLKLHPNSQPLFAFEWRDPEKGNTGQLTWTRLPQGFKNSPTLFNEALHRDLAPFRALNPQVVLLQYVDDLLVAAPTYRDCKEGTQKLLQELSKLGYRVSAKKAQLCQKEVTYLGYLLKEGKRWLTPARKATVMKIPPPTTPRQVREFLGKAGFCRLFIPGFASLAAPLYPLTKPSIPFIWTEEHQKAFDRIKEALLSAPALALPDLTKPFTLYVDERAGVARGVLTQTLGPWRRPVAYLSKKLDPVASGWPTCLKAVAAVALLLKDADKLTLGQNVTVIASHSLESIVRQPPDRWMTNARMTHYQSLLLNERVSFAPPAVLNPATLLPVESEATPVHRCSEILAEETGTRRDLKDQPLPGVPAWYTDGSSFIAEGKRRAGAAIVDGKRTVWASSLPEGTSAQKAELVALTQALRLAEGKDINIYTDSRYAFATAHIHGAIYKQRGWLTSAGKDIKNKEEILALLEAIHLPKRVAIIHCPGHQKGNDPVATGNRRADEAAKQAALSTRVLAETTKPAGKRTADGSEFEKRTADGSEFESPKKKAKVE

SEQ ID NO: 883 - protein, 2091 aa, synthetic construct
MPAAKRVKLDGGDKKYSIGLDIGTNSVGWAVITDEYKVPSKKFKVLGNTDRHSIKKNLIGALLFDSGETAEATRLKRTARRRYTRRKNRICYLQEIFSNEMAKVDDSFFHRLEESFLVEEDKKHERHPIFGNIVDEVAYHEKYPTIYHLRKKLVDSTDKADLRLIYLALAHMIKFRGHFLIEGDLNPDNSDVDKLFIQLVQTYNQLFEENPINASGVDAKAILSARLSKSRRLENLIAQLPGEKKNGLFGNLIALSLGLTPNFKSNFDLAEDAKLQLSKDTYDDDLDNLLAQIGDQYADLFLAAKNLSDAILLSDILRVNTEITKAPLSASMIKRYDEHHQDLTLLKALVRQQLPEKYKEIFFDQSKNGYAGYIDGGASQEEFYKFIKPILEKMDGTEELLVKLNREDLLRKQRTFDNGSIPHQIHLGELHAILRRQEDFYPFLKDNREKIEKILTFRIPYYVGPLARGNSRFAWMTRKSEETITPWNFEEVVDKGASAQSFIERMTNFDKNLPNEKVLPKHSLLYEYFTVYNELTKVKYVTEGMRKPAFLSGEQKKAIVDLLFKTNRKVTVKQLKEDYFKKIECFDSVEISGVEDRFNASLGTYHDLLKIIKDKDFLDNEENEDILEDIVLTLTLFEDREMIEERLKTYAHLFDDKVMKQLKRRRYTGWGRLSRKLINGIRDKQSGKTILDFLKSDGFANRNFMQLIHDDSLTFKEDIQKAQVSGQGDSLHEHIANLAGSPAIKKGILQTVKVVDELVKVMGRHKPENIVIEMARENQTTQKGQKNSRERMKRIEEGIKELGSQILKEHPVENTQLQNEKLYLYYLQNGRDMYVDQELDINRLSDYDVDHIVPQSFLKDDSIDNKVLTRSDKARGKSDNVPSEEVVKKMKNYWRQLLNAKLITQRKFDNLTKAERGGLSELDKAGFIKRQLVETRQITKHVAQILDSRMNTKYDENDKLIREVKVITLKSKLVSDFRKDFQFYKVREINNYHHAHDAYLNAVVGTALIKKYPKLESEFVYGDYKVYDVRKMIAKSEQEIGKATAKYFFYSNIMNFFKTEITLANGEIRKRPLIETNGETGEIVWDKGRDFATVRKVLSMPQVNIVKKTEVQTGGFSKESILPKRNSDKLIARKKDWDPKKYGGFDSPTVAYSVLVVAKVEKGKSKKLKSVKELLGITIMERSSFEKNPIDFLEAKGYKEVKKDLIIKLPKYSLFELENGRKRMLASAGELQKGNELALPSKYVNFLYLASHYEKLKGSPEDNEQKQLFVEQHKHYLDEIIEQISEFSKRVILADANLDKVLSAYNKHRDKPIREQAENIIHLFTLTNLGAPAAFKYFDTTIDRKRYTSTKEVLDATLIHQSITGLYETRIDLSQLGGDGGGSSEAAAKGGVLNLEEEYRLHEKPVPSSIDPSWLQLFPTVWAERAGMGLANQVPPVVVELRSGASPVAVRQYPMSKEAREGIRPHIQRFLDLGVLVPCQSPWNTPLLPVKKPGTNDYRPVQDLREINKRVQDIHPTVPNPYNLLSSLPPSHTWYSVLDLKDAFFCLKLHPNSQPLFAFEWRDPEKGNTGQLTWTRLPQGFKNSPTLFNEALHRDLAPFRALNPQVVLLQYVDDLLVAAPTYRDCKEGTQKLLQELSKLGYRVSAKKAQLCQKEVTYLGYLLKEGKRWLTPARKATVMKIPPPTTPRQVREFLGKAGFCRLFIPGFASLAAPLYPLTKPSIPFIWTEEHQKAFDRIKEALLSAPALALPDLTKPFTLYVDERAGVARGVLTQTLGPWRRPVAYLSKKLDPVASGWPTCLKAVAAVALLLKDADKLTLGQNVTVIASHSLESIVRQPPDRWMTNARMTHYQSLLLNERVSFAPPAVLNPATLLPVESEATPVHRCSEILAEETGTRRDLKDQPLPGVPAWYTDGSSFIAEGKRRAGAAIVDGKRTVWASSLPEGTSAQKAELVALTQALRLAEGKDINIYTDSRYAFATAHIHGAIYKQRGWLTSAGKDIKNKEEILALLEAIHLPKRVAIIHCPGHQKGNDPVATGNRRADEAAKQAALSTRVLAETTKPAGKRTADGSEFEKRTADGSEFESPKKKAKVE

SEQ ID NO: 884 - protein, 2089 aa, synthetic construct
MPAAKRVKLDGGDKKYSIGLDIGTNSVGWAVITDEYKVPSKKFKVLGNTDRHSIKKNLIGALLFDSGETAEATRLKRTARRRYTRRKNRICYLQEIFSNEMAKVDDSFFHRLEESFLVEEDKKHERHPIFGNIVDEVAYHEKYPTIYHLRKKLVDSTDKADLRLIYLALAHMIKFRGHFLIEGDLNPDNSDVDKLFIQLVQTYNQLFEENPINASGVDAKAILSARLSKSRRLENLIAQLPGEKKNGLFGNLIALSLGLTPNFKSNFDLAEDAKLQLSKDTYDDDLDNLLAQIGDQYADLFLAAKNLSDAILLSDILRVNTEITKAPLSASMIKRYDEHHQDLTLLKALVRQQLPEKYKEIFFDQSKNGYAGYIDGGASQEEFYKFIKPILEKMDGTEELLVKLNREDLLRKQRTFDNGSIPHQIHLGELHAILRRQEDFYPFLKDNREKIEKILTFRIPYYVGPLARGNSRFAWMTRKSEETITPWNFEEVVDKGASAQSFIERMTNFDKNLPNEKVLPKHSLLYEYFTVYNELTKVKYVTEGMRKPAFLSGEQKKAIVDLLFKTNRKVTVKQLKEDYFKKIECFDSVEISGVEDRFNASLGTYHDLLKIIKDKDFLDNEENEDILEDIVLTLTLFEDREMIEERLKTYAHLFDDKVMKQLKRRRYTGWGRLSRKLINGIRDKQSGKTILDFLKSDGFANRNFMQLIHDDSLTFKEDIQKAQVSGQGDSLHEHIANLAGSPAIKKGILQTVKVVDELVKVMGRHKPENIVIEMARENQTTQKGQKNSRERMKRIEEGIKELGSQILKEHPVENTQLQNEKLYLYYLQNGRDMYVDQELDINRLSDYDVDHIVPQSFLKDDSIDNKVLTRSDKARGKSDNVPSEEVVKKMKNYWRQLLNAKLITQRKFDNLTKAERGGLSELDKAGFIKRQLVETRQITKHVAQILDSRMNTKYDENDKLIREVKVITLKSKLVSDFRKDFQFYKVREINNYHHAHDAYLNAVVGTALIKKYPKLESEFVYGDYKVYDVRKMIAKSEQEIGKATAKYFFYSNIMNFFKTEITLANGEIRKRPLIETNGETGEIVWDKGRDFATVRKVLSMPQVNIVKKTEVQTGGFSKESILPKRNSDKLIARKKDWDPKKYGGFDSPTVAYSVLVVAKVEKGKSKKLKSVKELLGITIMERSSFEKNPIDFLEAKGYKEVKKDLIIKLPKYSLFELENGRKRMLASAGELQKGNELALPSKYVNFLYLASHYEKLKGSPEDNEQKQLFVEQHKHYLDEIIEQISEFSKRVILADANLDKVLSAYNKHRDKPIREQAENIIHLFTLTNLGAPAAFKYFDTTIDRKRYTSTKEVLDATLIHQSITGLYETRIDLSQLGGDGGGSSPAPGGVLNLEEEYRLHEKPVPSSIDPSWLQLFPTVWAERAGMGLANQVPPVVVELRSGASPVAVRQYPMSKEAREGIRPHIQRFLDLGVLVPCQSPWNTPLLPVKKPGTNDYRPVQDLREINKRVQDIHPTVPNPYNLLSSLPPSHTWYSVLDLKDAFFCLKLHPNSQPLFAFEWRDPEKGNTGQLTWTRLPQGFKNSPTLFNEALHRDLAPFRALNPQVVLLQYVDDLLVAAPTYRDCKEGTQKLLQELSKLGYRVSAKKAQLCQKEVTYLGYLLKEGKRWLTPARKATVMKIPPPTTPRQVREFLGKAGFCRLFIPGFASLAAPLYPLTKPSIPFIWTEEHQKAFDRIKEALLSAPALALPDLTKPFTLYVDERAGVARGVLTQTLGPWRRPVAYLSKKLDPVASGWPTCLKAVAAVALLLKDADKLTLGQNVTVIASHSLESIVRQPPDRWMTNARMTHYQSLLLNERVSFAPPAVLNPATLLPVESEATPVHRCSEILAEETGTRRDLKDQPLPGVPAWYTDGSSFIAEGKRRAGAAIVDGKRTVWASSLPEGTSAQKAELVALTQALRLAEGKDINIYTDSRYAFATAHIHGAIYKQRGWLTSAGKDIKNKEEILALLEAIHLPKRVAIIHCPGHQKGNDPVATGNRRADEAAKQAALSTRVLAETTKPAGKRTADGSEFEKRTADGSEFESPKKKAKVE

SEQ ID NO: 885 - protein, 2092 aa, synthetic construct
MPAAKRVKLDGGDKKYSIGLDIGTNSVGWAVITDEYKVPSKKFKVLGNTDRHSIKKNLIGALLFDSGETAEATRLKRTARRRYTRRKNRICYLQEIFSNEMAKVDDSFFHRLEESFLVEEDKKHERHPIFGNIVDEVAYHEKYPTIYHLRKKLVDSTDKADLRLIYLALAHMIKFRGHFLIEGDLNPDNSDVDKLFIQLVQTYNQLFEENPINASGVDAKAILSARLSKSRRLENLIAQLPGEKKNGLFGNLIALSLGLTPNFKSNFDLAEDAKLQLSKDTYDDDLDNLLAQIGDQYADLFLAAKNLSDAILLSDILRVNTEITKAPLSASMIKRYDEHHQDLTLLKALVRQQLPEKYKEIFFDQSKNGYAGYIDGGASQEEFYKFIKPILEKMDGTEELLVKLNREDLLRKQRTFDNGSIPHQIHLGELHAILRRQEDFYPFLKDNREKIEKILTFRIPYYVGPLARGNSRFAWMTRKSEETITPWNFEEVVDKGASAQSFIERMTNFDKNLPNEKVLPKHSLLYEYFTVYNELTKVKYVTEGMRKPAFLSGEQKKAIVDLLFKTNRKVTVKQLKEDYFKKIECFDSVEISGVEDRFNASLGTYHDLLKIIKDKDFLDNEENEDILEDIVLTLTLFEDREMIEERLKTYAHLFDDKVMKQLKRRRYTGWGRLSRKLINGIRDKQSGKTILDFLKSDGFANRNFMQLIHDDSLTFKEDIQKAQVSGQGDSLHEHIANLAGSPAIKKGILQTVKVVDELVKVMGRHKPENIVIEMARENQTTQKGQKNSRERMKRIEEGIKELGSQILKEHPVENTQLQNEKLYLYYLQNGRDMYVDQELDINRLSDYDVDHIVPQSFLKDDSIDNKVLTRSDKARGKSDNVPSEEVVKKMKNYWRQLLNAKLITQRKFDNLTKAERGGLSELDKAGFIKRQLVETRQITKHVAQILDSRMNTKYDENDKLIREVKVITLKSKLVSDFRKDFQFYKVREINNYHHAHDAYLNAVVGTALIKKYPKLESEFVYGDYKVYDVRKMIAKSEQEIGKATAKYFFYSNIMNFFKTEITLANGEIRKRPLIETNGETGEIVWDKGRDFATVRKVLSMPQVNIVKKTEVQTGGFSKESILPKRNSDKLIARKKDWDPKKYGGFDSPTVAYSVLVVAKVEKGKSKKLKSVKELLGITIMERSSFEKNPIDFLEAKGYKEVKKDLIIKLPKYSLFELENGRKRMLASAGELQKGNELALPSKYVNFLYLASHYEKLKGSPEDNEQKQLFVEQHKHYLDEIIEQISEFSKRVILADANLDKVLSAYNKHRDKPIREQAENIIHLFTLTNLGAPAAFKYFDTTIDRKRYTSTKEVLDATLIHQSITGLYETRIDLSQLGGDGGGGSGGSGGSGGVLNLEEEYRLHEKPVPSSIDPSWLQLFPTVWAERAGMGLANQVPPVVVELRSGASPVAVRQYPMSKEAREGIRPHIQRFLDLGVLVPCQSPWNTPLLPVKKPGTNDYRPVQDLREINKRVQDIHPTVPNPYNLLSSLPPSHTWYSVLDLKDAFFCLKLHPNSQPLFAFEWRDPEKGNTGQLTWTRLPQGFKNSPTLFNEALHRDLAPFRALNPQVVLLQYVDDLLVAAPTYRDCKEGTQKLLQELSKLGYRVSAKKAQLCQKEVTYLGYLLKEGKRWLTPARKATVMKIPPPTTPRQVREFLGKAGFCRLFIPGFASLAAPLYPLTKPSIPFIWTEEHQKAFDRIKEALLSAPALALPDLTKPFTLYVDERAGVARGVLTQTLGPWRRPVAYLSKKLDPVASGWPTCLKAVAAVALLLKDADKLTLGQNVTVIASHSLESIVRQPPDRWMTNARMTHYQSLLLNERVSFAPPAVLNPATLLPVESEATPVHRCSEILAEETGTRRDLKDQPLPGVPAWYTDGSSFIAEGKRRAGAAIVDGKRTVWASSLPEGTSAQKAELVALTQALRLAEGKDINIYTDSRYAFATAHIHGAIYKQRGWLTSAGKDIKNKEEILALLEAIHLPKRVAIIHCPGHQKGNDPVATGNRRADEAAKQAALSTRVLAETTKPAGKRTADGSEFEKRTADGSEFESPKKKAKVE

SEQ ID NO: 886 - protein, 2095 aa, synthetic construct
MPAAKRVKLDGGDKKYSIGLDIGTNSVGWAVITDEYKVPSKKFKVLGNTDRHSIKKNLIGALLFDSGETAEATRLKRTARRRYTRRKNRICYLQEIFSNEMAKVDDSFFHRLEESFLVEEDKKHERHPIFGNIVDEVAYHEKYPTIYHLRKKLVDSTDKADLRLIYLALAHMIKFRGHFLIEGDLNPDNSDVDKLFIQLVQTYNQLFEENPINASGVDAKAILSARLSKSRRLENLIAQLPGEKKNGLFGNLIALSLGLTPNFKSNFDLAEDAKLQLSKDTYDDDLDNLLAQIGDQYADLFLAAKNLSDAILLSDILRVNTEITKAPLSASMIKRYDEHHQDLTLLKALVRQQLPEKYKEIFFDQSKNGYAGYIDGGASQEEFYKFIKPILEKMDGTEELLVKLNREDLLRKQRTFDNGSIPHQIHLGELHAILRRQEDFYPFLKDNREKIEKILTFRIPYYVGPLARGNSRFAWMTRKSEETITPWNFEEVVDKGASAQSFIERMTNFDKNLPNEKVLPKHSLLYEYFTVYNELTKVKYVTEGMRKPAFLSGEQKKAIVDLLFKTNRKVTVKQLKEDYFKKIECFDSVEISGVEDRFNASLGTYHDLLKIIKDKDFLDNEENEDILEDIVLTLTLFEDREMIEERLKTYAHLFDDKVMKQLKRRRYTGWGRLSRKLINGIRDKQSGKTILDFLKSDGFANRNFMQLIHDDSLTFKEDIQKAQVSGQGDSLHEHIANLAGSPAIKKGILQTVKVVDELVKVMGRHKPENIVIEMARENQTTQKGQKNSRERMKRIEEGIKELGSQILKEHPVENTQLQNEKLYLYYLQNGRDMYVDQELDINRLSDYDVDHIVPQSFLKDDSIDNKVLTRSDKARGKSDNVPSEEVVKKMKNYWRQLLNAKLITQRKFDNLTKAERGGLSELDKAGFIKRQLVETRQITKHVAQILDSRMNTKYDENDKLIREVKVITLKSKLVSDFRKDFQFYKVREINNYHHAHDAYLNAVVGTALIKKYPKLESEFVYGDYKVYDVRKMIAKSEQEIGKATAKYFFYSNIMNFFKTEITLANGEIRKRPLIETNGETGEIVWDKGRDFATVRKVLSMPQVNIVKKTEVQTGGFSKESILPKRNSDKLIARKKDWDPKKYGGFDSPTVAYSVLVVAKVEKGKSKKLKSVKELLGITIMERSSFEKNPIDFLEAKGYKEVKKDLIIKLPKYSLFELENGRKRMLASAGELQKGNELALPSKYVNFLYLASHYEKLKGSPEDNEQKQLFVEQHKHYLDEIIEQISEFSKRVILADANLDKVLSAYNKHRDKPIREQAENIIHLFTLTNLGAPAAFKYFDTTIDRKRYTSTKEVLDATLIHQSITGLYETRIDLSQLGGDGGGGSGGSGGSGGSGGVLNLEEEYRLHEKPVPSSIDPSWLQLFPTVWAERAGMGLANQVPPVVVELRSGASPVAVRQYPMSKEAREGIRPHIQRFLDLGVLVPCQSPWNTPLLPVKKPGTNDYRPVQDLREINKRVQDIHPTVPNPYNLLSSLPPSHTWYSVLDLKDAFFCLKLHPNSQPLFAFEWRDPEKGNTGQLTWTRLPQGFKNSPTLFNEALHRDLAPFRALNPQVVLLQYVDDLLVAAPTYRDCKEGTQKLLQELSKLGYRVSAKKAQLCQKEVTYLGYLLKEGKRWLTPARKATVMKIPPPTTPRQVREFLGKAGFCRLFIPGFASLAAPLYPLTKPSIPFIWTEEHQKAFDRIKEALLSAPALALPDLTKPFTLYVDERAGVARGVLTQTLGPWRRPVAYLSKKLDPVASGWPTCLKAVAAVALLLKDADKLTLGQNVTVIASHSLESIVRQPPDRWMTNARMTHYQSLLLNERVSFAPPAVLNPATLLPVESEATPVHRCSEILAEETGTRRDLKDQPLPGVPAWYTDGSSFIAEGKRRAGAAIVDGKRTVWASSLPEGTSAQKAELVALTQALRLAEGKDINIYTDSRYAFATAHIHGAIYKQRGWLTSAGKDIKNKEEILALLEAIHLPKRVAIIHCPGHQKGNDPVATGNRRADEAAKQAALSTRVLAETTKPAGKRTADGSEFEKRTADGSEFESPKKKAKVE

SEQ ID NO: 887 - protein, 2095 aa, synthetic construct
MPAAKRVKLDGGDKKYSIGLDIGTNSVGWAVITDEYKVPSKKFKVLGNTDRHSIKKNLIGALLFDSGETAEATRLKRTARRRYTRRKNRICYLQEIFSNEMAKVDDSFFHRLEESFLVEEDKKHERHPIFGNIVDEVAYHEKYPTIYHLRKKLVDSTDKADLRLIYLALAHMIKFRGHFLIEGDLNPDNSDVDKLFIQLVQTYNQLFEENPINASGVDAKAILSARLSKSRRLENLIAQLPGEKKNGLFGNLIALSLGLTPNFKSNFDLAEDAKLQLSKDTYDDDLDNLLAQIGDQYADLFLAAKNLSDAILLSDILRVNTEITKAPLSASMIKRYDEHHQDLTLLKALVRQQLPEKYKEIFFDQSKNGYAGYIDGGASQEEFYKFIKPILEKMDGTEELLVKLNREDLLRKQRTFDNGSIPHQIHLGELHAILRRQEDFYPFLKDNREKIEKILTFRIPYYVGPLARGNSRFAWMTRKSEETITPWNFEEVVDKGASAQSFIERMTNFDKNLPNEKVLPKHSLLYEYFTVYNELTKVKYVTEGMRKPAFLSGEQKKAIVDLLFKTNRKVTVKQLKEDYFKKIECFDSVEISGVEDRFNASLGTYHDLLKIIKDKDFLDNEENEDILEDIVLTLTLFEDREMIEERLKTYAHLFDDKVMKQLKRRRYTGWGRLSRKLINGIRDKQSGKTILDFLKSDGFANRNFMQLIHDDSLTFKEDIQKAQVSGQGDSLHEHIANLAGSPAIKKGILQTVKVVDELVKVMGRHKPENIVIEMARENQTTQKGQKNSRERMKRIEEGIKELGSQILKEHPVENTQLQNEKLYLYYLQNGRDMYVDQELDINRLSDYDVDHIVPQSFLKDDSIDNKVLTRSDKARGKSDNVPSEEVVKKMKNYWRQLLNAKLITQRKFDNLTKAERGGLSELDKAGFIKRQLVETRQITKHVAQILDSRMNTKYDENDKLIREVKVITLKSKLVSDFRKDFQFYKVREINNYHHAHDAYLNAVVGTALIKKYPKLESEFVYGDYKVYDVRKMIAKSEQEIGKATAKYFFYSNIMNFFKTEITLANGEIRKRPLIETNGETGEIVWDKGRDFATVRKVLSMPQVNIVKKTEVQTGGFSKESILPKRNSDKLIARKKDWDPKKYGGFDSPTVAYSVLVVAKVEKGKSKKLKSVKELLGITIMERSSFEKNPIDFLEAKGYKEVKKDLIIKLPKYSLFELENGRKRMLASAGELQKGNELALPSKYVNFLYLASHYEKLKGSPEDNEQKQLFVEQHKHYLDEIIEQISEFSKRVILADANLDKVLSAYNKHRDKPIREQAENIIHLFTLTNLGAPAAFKYFDTTIDRKRYTSTKEVLDATLIHQSITGLYETRIDLSQLGGDGGGSSGSSGSSGSSGGVLNLEEEYRLHEKPVPSSIDPSWLQLFPTVWAERAGMGLANQVPPVVVELRSGASPVAVRQYPMSKEAREGIRPHIQRFLDLGVLVPCQSPWNTPLLPVKKPGTNDYRPVQDLREINKRVQDIHPTVPNPYNLLSSLPPSHTWYSVLDLKDAFFCLKLHPNSQPLFAFEWRDPEKGNTGQLTWTRLPQGFKNSPTLFNEALHRDLAPFRALNPQVVLLQYVDDLLVAAPTYRDCKEGTQKLLQELSKLGYRVSAKKAQLCQKEVTYLGYLLKEGKRWLTPARKATVMKIPPPTTPRQVREFLGKAGFCRLFIPGFASLAAPLYPLTKPSIPFIWTEEHQKAFDRIKEALLSAPALALPDLTKPFTLYVDERAGVARGVLTQTLGPWRRPVAYLSKKLDPVASGWPTCLKAVAAVALLLKDADKLTLGQNVTVIASHSLESIVRQPPDRWMTNARMTHYQSLLLNERVSFAPPAVLNPATLLPVESEATPVHRCSEILAEETGTRRDLKDQPLPGVPAWYTDGSSFIAEGKRRAGAAIVDGKRTVWASSLPEGTSAQKAELVALTQALRLAEGKDINIYTDSRYAFATAHIHGAIYKQRGWLTSAGKDIKNKEEILALLEAIHLPKRVAIIHCPGHQKGNDPVATGNRRADEAAKQAALSTRVLAETTKPAGKRTADGSEFEKRTADGSEFESPKKKAKVE

SEQ ID NO: 888 - protein, 2092 aa, synthetic construct
MPAAKRVKLDGGDKKYSIGLDIGTNSVGWAVITDEYKVPSKKFKVLGNTDRHSIKKNLIGALLFDSGETAEATRLKRTARRRYTRRKNRICYLQEIFSNEMAKVDDSFFHRLEESFLVEEDKKHERHPIFGNIVDEVAYHEKYPTIYHLRKKLVDSTDKADLRLIYLALAHMIKFRGHFLIEGDLNPDNSDVDKLFIQLVQTYNQLFEENPINASGVDAKAILSARLSKSRRLENLIAQLPGEKKNGLFGNLIALSLGLTPNFKSNFDLAEDAKLQLSKDTYDDDLDNLLAQIGDQYADLFLAAKNLSDAILLSDILRVNTEITKAPLSASMIKRYDEHHQDLTLLKALVRQQLPEKYKEIFFDQSKNGYAGYIDGGASQEEFYKFIKPILEKMDGTEELLVKLNREDLLRKQRTFDNGSIPHQIHLGELHAILRRQEDFYPFLKDNREKIEKILTFRIPYYVGPLARGNSRFAWMTRKSEETITPWNFEEVVDKGASAQSFIERMTNFDKNLPNEKVLPKHSLLYEYFTVYNELTKVKYVTEGMRKPAFLSGEQKKAIVDLLFKTNRKVTVKQLKEDYFKKIECFDSVEISGVEDRFNASLGTYHDLLKIIKDKDFLDNEENEDILEDIVLTLTLFEDREMIEERLKTYAHLFDDKVMKQLKRRRYTGWGRLSRKLINGIRDKQSGKTILDFLKSDGFANRNFMQLIHDDSLTFKEDIQKAQVSGQGDSLHEHIANLAGSPAIKKGILQTVKVVDELVKVMGRHKPENIVIEMARENQTTQKGQKNSRERMKRIEEGIKELGSQILKEHPVENTQLQNEKLYLYYLQNGRDMYVDQELDINRLSDYDVDHIVPQSFLKDDSIDNKVLTRSDKARGKSDNVPSEEVVKKMKNYWRQLLNAKLITQRKFDNLTKAERGGLSELDKAGFIKRQLVETRQITKHVAQILDSRMNTKYDENDKLIREVKVITLKSKLVSDFRKDFQFYKVREINNYHHAHDAYLNAVVGTALIKKYPKLESEFVYGDYKVYDVRKMIAKSEQEIGKATAKYFFYSNIMNFFKTEITLANGEIRKRPLIETNGETGEIVWDKGRDFATVRKVLSMPQVNIVKKTEVQTGGFSKESILPKRNSDKLIARKKDWDPKKYGGFDSPTVAYSVLVVAKVEKGKSKKLKSVKELLGITIMERSSFEKNPIDFLEAKGYKEVKKDLIIKLPKYSLFELENGRKRMLASAGELQKGNELALPSKYVNFLYLASHYEKLKGSPEDNEQKQLFVEQHKHYLDEIIEQISEFSKRVILADANLDKVLSAYNKHRDKPIREQAENIIHLFTLTNLGAPAAFKYFDTTIDRKRYTSTKEVLDATLIHQSITGLYETRIDLSQLGGDGGGGGGSSPAPGGVLNLEEEYRLHEKPVPSSIDPSWLQLFPTVWAERAGMGLANQVPPVVVELRSGASPVAVRQYPMSKEAREGIRPHIQRFLDLGVLVPCQSPWNTPLLPVKKPGTNDYRPVQDLREINKRVQDIHPTVPNPYNLLSSLPPSHTWYSVLDLKDAFFCLKLHPNSQPLFAFEWRDPEKGNTGQLTWTRLPQGFKNSPTLFNEALHRDLAPFRALNPQVVLLQYVDDLLVAAPTYRDCKEGTQKLLQELSKLGYRVSAKKAQLCQKEVTYLGYLLKEGKRWLTPARKATVMKIPPPTTPRQVREFLGKAGFCRLFIPGFASLAAPLYPLTKPSIPFIWTEEHQKAFDRIKEALLSAPALALPDLTKPFTLYVDERAGVARGVLTQTLGPWRRPVAYLSKKLDPVASGWPTCLKAVAAVALLLKDADKLTLGQNVTVIASHSLESIVRQPPDRWMTNARMTHYQSLLLNERVSFAPPAVLNPATLLPVESEATPVHRCSEILAEETGTRRDLKDQPLPGVPAWYTDGSSFIAEGKRRAGAAIVDGKRTVWASSLPEGTSAQKAELVALTQALRLAEGKDINIYTDSRYAFATAHIHGAIYKQRGWLTSAGKDIKNKEEILALLEAIHLPKRVAIIHCPGHQKGNDPVATGNRRADEAAKQAALSTRVLAETTKPAGKRTADGSEFEKRTADGSEFESPKKKAKVE

SEQ ID NO: 889 - protein, 2092 aa, synthetic construct
MPAAKRVKLDGGDKKYSIGLDIGTNSVGWAVITDEYKVPSKKFKVLGNTDRHSIKKNLIGALLFDSGETAEATRLKRTARRRYTRRKNRICYLQEIFSNEMAKVDDSFFHRLEESFLVEEDKKHERHPIFGNIVDEVAYHEKYPTIYHLRKKLVDSTDKADLRLIYLALAHMIKFRGHFLIEGDLNPDNSDVDKLFIQLVQTYNQLFEENPINASGVDAKAILSARLSKSRRLENLIAQLPGEKKNGLFGNLIALSLGLTPNFKSNFDLAEDAKLQLSKDTYDDDLDNLLAQIGDQYADLFLAAKNLSDAILLSDILRVNTEITKAPLSASMIKRYDEHHQDLTLLKALVRQQLPEKYKEIFFDQSKNGYAGYIDGGASQEEFYKFIKPILEKMDGTEELLVKLNREDLLRKQRTFDNGSIPHQIHLGELHAILRRQEDFYPFLKDNREKIEKILTFRIPYYVGPLARGNSRFAWMTRKSEETITPWNFEEVVDKGASAQSFIERMTNFDKNLPNEKVLPKHSLLYEYFTVYNELTKVKYVTEGMRKPAFLSGEQKKAIVDLLFKTNRKVTVKQLKEDYFKKIECFDSVEISGVEDRFNASLGTYHDLLKIIKDKDFLDNEENEDILEDIVLTLTLFEDREMIEERLKTYAHLFDDKVMKQLKRRRYTGWGRLSRKLINGIRDKQSGKTILDFLKSDGFANRNFMQLIHDDSLTFKEDIQKAQVSGQGDSLHEHIANLAGSPAIKKGILQTVKVVDELVKVMGRHKPENIVIEMARENQTTQKGQKNSRERMKRIEEGIKELGSQILKEHPVENTQLQNEKLYLYYLQNGRDMYVDQELDINRLSDYDVDHIVPQSFLKDDSIDNKVLTRSDKARGKSDNVPSEEVVKKMKNYWRQLLNAKLITQRKFDNLTKAERGGLSELDKAGFIKRQLVETRQITKHVAQILDSRMNTKYDENDKLIREVKVITLKSKLVSDFRKDFQFYKVREINNYHHAHDAYLNAVVGTALIKKYPKLESEFVYGDYKVYDVRKMIAKSEQEIGKATAKYFFYSNIMNFFKTEITLANGEIRKRPLIETNGETGEIVWDKGRDFATVRKVLSMPQVNIVKKTEVQTGGFSKESILPKRNSDKLIARKKDWDPKKYGGFDSPTVAYSVLVVAKVEKGKSKKLKSVKELLGITIMERSSFEKNPIDFLEAKGYKEVKKDLIIKLPKYSLFELENGRKRMLASAGELQKGNELALPSKYVNFLYLASHYEKLKGSPEDNEQKQLFVEQHKHYLDEIIEQISEFSKRVILADANLDKVLSAYNKHRDKPIREQAENIIHLFTLTNLGAPAAFKYFDTTIDRKRYTSTKEVLDATLIHQSITGLYETRIDLSQLGGDGGPAPGGSGGGGGVLNLEEEYRLHEKPVPSSIDPSWLQLFPTVWAERAGMGLANQVPPVVVELRSGASPVAVRQYPMSKEAREGIRPHIQRFLDLGVLVPCQSPWNTPLLPVKKPGTNDYRPVQDLREINKRVQDIHPTVPNPYNLLSSLPPSHTWYSVLDLKDAFFCLKLHPNSQPLFAFEWRDPEKGNTGQLTWTRLPQGFKNSPTLFNEALHRDLAPFRALNPQVVLLQYVDDLLVAAPTYRDCKEGTQKLLQELSKLGYRVSAKKAQLCQKEVTYLGYLLKEGKRWLTPARKATVMKIPPPTTPRQVREFLGKAGFCRLFIPGFASLAAPLYPLTKPSIPFIWTEEHQKAFDRIKEALLSAPALALPDLTKPFTLYVDERAGVARGVLTQTLGPWRRPVAYLSKKLDPVASGWPTCLKAVAAVALLLKDADKLTLGQNVTVIASHSLESIVRQPPDRWMTNARMTHYQSLLLNERVSFAPPAVLNPATLLPVESEATPVHRCSEILAEETGTRRDLKDQPLPGVPAWYTDGSSFIAEGKRRAGAAIVDGKRTVWASSLPEGTSAQKAELVALTQALRLAEGKDINIYTDSRYAFATAHIHGAIYKQRGWLTSAGKDIKNKEEILALLEAIHLPKRVAIIHCPGHQKGNDPVATGNRRADEAAKQAALSTRVLAETTKPAGKRTADGSEFEKRTADGSEFESPKKKAKVE

SEQ ID NO: 890 - protein, 2096 aa, synthetic construct
MPAAKRVKLDGGDKKYSIGLDIGTNSVGWAVITDEYKVPSKKFKVLGNTDRHSIKKNLIGALLFDSGETAEATRLKRTARRRYTRRKNRICYLQEIFSNEMAKVDDSFFHRLEESFLVEEDKKHERHPIFGNIVDEVAYHEKYPTIYHLRKKLVDSTDKADLRLIYLALAHMIKFRGHFLIEGDLNPDNSDVDKLFIQLVQTYNQLFEENPINASGVDAKAILSARLSKSRRLENLIAQLPGEKKNGLFGNLIALSLGLTPNFKSNFDLAEDAKLQLSKDTYDDDLDNLLAQIGDQYADLFLAAKNLSDAILLSDILRVNTEITKAPLSASMIKRYDEHHQDLTLLKALVRQQLPEKYKEIFFDQSKNGYAGYIDGGASQEEFYKFIKPILEKMDGTEELLVKLNREDLLRKQRTFDNGSIPHQIHLGELHAILRRQEDFYPFLKDNREKIEKILTFRIPYYVGPLARGNSRFAWMTRKSEETITPWNFEEVVDKGASAQSFIERMTNFDKNLPNEKVLPKHSLLYEYFTVYNELTKVKYVTEGMRKPAFLSGEQKKAIVDLLFKTNRKVTVKQLKEDYFKKIECFDSVEISGVEDRFNASLGTYHDLLKIIKDKDFLDNEENEDILEDIVLTLTLFEDREMIEERLKTYAHLFDDKVMKQLKRRRYTGWGRLSRKLINGIRDKQSGKTILDFLKSDGFANRNFMQLIHDDSLTFKEDIQKAQVSGQGDSLHEHIANLAGSPAIKKGILQTVKVVDELVKVMGRHKPENIVIEMARENQTTQKGQKNSRERMKRIEEGIKELGSQILKEHPVENTQLQNEKLYLYYLQNGRDMYVDQELDINRLSDYDVDHIVPQSFLKDDSIDNKVLTRSDKARGKSDNVPSEEVVKKMKNYWRQLLNAKLITQRKFDNLTKAERGGLSELDKAGFIKRQLVETRQITKHVAQILDSRMNTKYDENDKLIREVKVITLKSKLVSDFRKDFQFYKVREINNYHHAHDAYLNAVVGTALIKKYPKLESEFVYGDYKVYDVRKMIAKSEQEIGKATAKYFFYSNIMNFFKTEITLANGEIRKRPLIETNGETGEIVWDKGRDFATVRKVLSMPQVNIVKKTEVQTGGFSKESILPKRNSDKLIARKKDWDPKKYGGFDSPTVAYSVLVVAKVEKGKSKKLKSVKELLGITIMERSSFEKNPIDFLEAKGYKEVKKDLIIKLPKYSLFELENGRKRMLASAGELQKGNELALPSKYVNFLYLASHYEKLKGSPEDNEQKQLFVEQHKHYLDEIIEQISEFSKRVILADANLDKVLSAYNKHRDKPIREQAENIIHLFTLTNLGAPAAFKYFDTTIDRKRYTSTKEVLDATLIHQSITGLYETRIDLSQLGGDGGPAPAPAPAPAPAPGGVLNLEEEYRLHEKPVPSSIDPSWLQLFPTVWAERAGMGLANQVPPVVVELRSGASPVAVRQYPMSKEAREGIRPHIQRFLDLGVLVPCQSPWNTPLLPVKKPGTNDYRPVQDLREINKRVQDIHPTVPNPYNLLSSLPPSHTWYSVLDLKDAFFCLKLHPNSQPLFAFEWRDPEKGNTGQLTWTRLPQGFKNSPTLFNEALHRDLAPFRALNPQVVLLQYVDDLLVAAPTYRDCKEGTQKLLQELSKLGYRVSAKKAQLCQKEVTYLGYLLKEGKRWLTPARKATVMKIPPPTTPRQVREFLGKAGFCRLFIPGFASLAAPLYPLTKPSIPFIWTEEHQKAFDRIKEALLSAPALALPDLTKPFTLYVDERAGVARGVLTQTLGPWRRPVAYLSKKLDPVASGWPTCLKAVAAVALLLKDADKLTLGQNVTVIASHSLESIVRQPPDRWMTNARMTHYQSLLLNERVSFAPPAVLNPATLLPVESEATPVHRCSEILAEETGTRRDLKDQPLPGVPAWYTDGSSFIAEGKRRAGAAIVDGKRTVWASSLPEGTSAQKAELVALTQALRLAEGKDINIYTDSRYAFATAHIHGAIYKQRGWLTSAGKDIKNKEEILALLEAIHLPKRVAIIHCPGHQKGNDPVATGNRRADEAAKQAALSTRVLAETTKPAGKRTADGSEFEKRTADGSEFESPKKKAKVE

SEQ ID NO: 891 - protein, 2094 aa, synthetic construct
MPAAKRVKLDGGDKKYSIGLDIGTNSVGWAVITDEYKVPSKKFKVLGNTDRHSIKKNLIGALLFDSGETAEATRLKRTARRRYTRRKNRICYLQEIFSNEMAKVDDSFFHRLEESFLVEEDKKHERHPIFGNIVDEVAYHEKYPTIYHLRKKLVDSTDKADLRLIYLALAHMIKFRGHFLIEGDLNPDNSDVDKLFIQLVQTYNQLFEENPINASGVDAKAILSARLSKSRRLENLIAQLPGEKKNGLFGNLIALSLGLTPNFKSNFDLAEDAKLQLSKDTYDDDLDNLLAQIGDQYADLFLAAKNLSDAILLSDILRVNTEITKAPLSASMIKRYDEHHQDLTLLKALVRQQLPEKYKEIFFDQSKNGYAGYIDGGASQEEFYKFIKPILEKMDGTEELLVKLNREDLLRKQRTFDNGSIPHQIHLGELHAILRRQEDFYPFLKDNREKIEKILTFRIPYYVGPLARGNSRFAWMTRKSEETITPWNFEEVVDKGASAQSFIERMTNFDKNLPNEKVLPKHSLLYEYFTVYNELTKVKYVTEGMRKPAFLSGEQKKAIVDLLFKTNRKVTVKQLKEDYFKKIECFDSVEISGVEDRFNASLGTYHDLLKIIKDKDFLDNEENEDILEDIVLTLTLFEDREMIEERLKTYAHLFDDKVMKQLKRRRYTGWGRLSRKLINGIRDKQSGKTILDFLKSDGFANRNFMQLIHDDSLTFKEDIQKAQVSGQGDSLHEHIANLAGSPAIKKGILQTVKVVDELVKVMGRHKPENIVIEMARENQTTQKGQKNSRERMKRIEEGIKELGSQILKEHPVENTQLQNEKLYLYYLQNGRDMYVDQELDINRLSDYDVDHIVPQSFLKDDSIDNKVLTRSDKARGKSDNVPSEEVVKKMKNYWRQLLNAKLITQRKFDNLTKAERGGLSELDKAGFIKRQLVETRQITKHVAQILDSRMNTKYDENDKLIREVKVITLKSKLVSDFRKDFQFYKVREINNYHHAHDAYLNAVVGTALIKKYPKLESEFVYGDYKVYDVRKMIAKSEQEIGKATAKYFFYSNIMNFFKTEITLANGEIRKRPLIETNGETGEIVWDKGRDFATVRKVLSMPQVNIVKKTEVQTGGFSKESILPKRNSDKLIARKKDWDPKKYGGFDSPTVAYSVLVVAKVEKGKSKKLKSVKELLGITIMERSSFEKNPIDFLEAKGYKEVKKDLIIKLPKYSLFELENGRKRMLASAGELQKGNELALPSKYVNFLYLASHYEKLKGSPEDNEQKQLFVEQHKHYLDEIIEQISEFSKRVILADANLDKVLSAYNKHRDKPIREQAENIIHLFTLTNLGAPAAFKYFDTTIDRKRYTSTKEVLDATLIHQSITGLYETRIDLSQLGGDGGEAAAKGSSGGGGGVLNLEEEYRLHEKPVPSSIDPSWLQLFPTVWAERAGMGLANQVPPVVVELRSGASPVAVRQYPMSKEAREGIRPHIQRFLDLGVLVPCQSPWNTPLLPVKKPGTNDYRPVQDLREINKRVQDIHPTVPNPYNLLSSLPPSHTWYSVLDLKDAFFCLKLHPNSQPLFAFEWRDPEKGNTGQLTWTRLPQGFKNSPTLFNEALHRDLAPFRALNPQVVLLQYVDDLLVAAPTYRDCKEGTQKLLQELSKLGYRVSAKKAQLCQKEVTYLGYLLKEGKRWLTPARKATVMKIPPPTTPRQVREFLGKAGFCRLFIPGFASLAAPLYPLTKPSIPFIWTEEHQKAFDRIKEALLSAPALALPDLTKPFTLYVDERAGVARGVLTQTLGPWRRPVAYLSKKLDPVASGWPTCLKAVAAVALLLKDADKLTLGQNVTVIASHSLESIVRQPPDRWMTNARMTHYQSLLLNERVSFAPPAVLNPATLLPVESEATPVHRCSEILAEETGTRRDLKDQPLPGVPAWYTDGSSFIAEGKRRAGAAIVDGKRTVWASSLPEGTSAQKAELVALTQALRLAEGKDINIYTDSRYAFATAHIHGAIYKQRGWLTSAGKDIKNKEEILALLEAIHLPKRVAIIHCPGHQKGNDPVATGNRRADEAAKQAALSTRVLAETTKPAGKRTADGSEFEKRTADGSEFESPKKKAKVE

SEQ ID NO: 892 - protein, 2094 aa, synthetic construct
MPAAKRVKLDGGDKKYSIGLDIGTNSVGWAVITDEYKVPSKKFKVLGNTDRHSIKKNLIGALLFDSGETAEATRLKRTARRRYTRRKNRICYLQEIFSNEMAKVDDSFFHRLEESFLVEEDKKHERHPIFGNIVDEVAYHEKYPTIYHLRKKLVDSTDKADLRLIYLALAHMIKFRGHFLIEGDLNPDNSDVDKLFIQLVQTYNQLFEENPINASGVDAKAILSARLSKSRRLENLIAQLPGEKKNGLFGNLIALSLGLTPNFKSNFDLAEDAKLQLSKDTYDDDLDNLLAQIGDQYADLFLAAKNLSDAILLSDILRVNTEITKAPLSASMIKRYDEHHQDLTLLKALVRQQLPEKYKEIFFDQSKNGYAGYIDGGASQEEFYKFIKPILEKMDGTEELLVKLNREDLLRKQRTFDNGSIPHQIHLGELHAILRRQEDFYPFLKDNREKIEKILTFRIPYYVGPLARGNSRFAWMTRKSEETITPWNFEEVVDKGASAQSFIERMTNFDKNLPNEKVLPKHSLLYEYFTVYNELTKVKYVTEGMRKPAFLSGEQKKAIVDLLFKTNRKVTVKQLKEDYFKKIECFDSVEISGVEDRFNASLGTYHDLLKIIKDKDFLDNEENEDILEDIVLTLTLFEDREMIEERLKTYAHLFDDKVMKQLKRRRYTGWGRLSRKLINGIRDKQSGKTILDFLKSDGFANRNFMQLIHDDSLTFKEDIQKAQVSGQGDSLHEHIANLAGSPAIKKGILQTVKVVDELVKVMGRHKPENIVIEMARENQTTQKGQKNSRERMKRIEEGIKELGSQILKEHPVENTQLQNEKLYLYYLQNGRDMYVDQELDINRLSDYDVDHIVPQSFLKDDSIDNKVLTRSDKARGKSDNVPSEEVVKKMKNYWRQLLNAKLITQRKFDNLTKAERGGLSELDKAGFIKRQLVETRQITKHVAQILDSRMNTKYDENDKLIREVKVITLKSKLVSDFRKDFQFYKVREINNYHHAHDAYLNAVVGTALIKKYPKLESEFVYGDYKVYDVRKMIAKSEQEIGKATAKYFFYSNIMNFFKTEITLANGEIRKRPLIETNGETGEIVWDKGRDFATVRKVLSMPQVNIVKKTEVQTGGFSKESILPKRNSDKLIARKKDWDPKKYGGFDSPTVAYSVLVVAKVEKGKSKKLKSVKELLGITIMERSSFEKNPIDFLEAKGYKEVKKDLIIKLPKYSLFELENGRKRMLASAGELQKGNELALPSKYVNFLYLASHYEKLKGSPEDNEQKQLFVEQHKHYLDEIIEQISEFSKRVILADANLDKVLSAYNKHRDKPIREQAENIIHLFTLTNLGAPAAFKYFDTTIDRKRYTSTKEVLDATLIHQSITGLYETRIDLSQLGGDGGPAPEAAAKGSSGGVLNLEEEYRLHEKPVPSSIDPSWLQLFPTVWAERAGMGLANQVPPVVVELRSGASPVAVRQYPMSKEAREGIRPHIQRFLDLGVLVPCQSPWNTPLLPVKKPGTNDYRPVQDLREINKRVQDIHPTVPNPYNLLSSLPPSHTWYSVLDLKDAFFCLKLHPNSQPLFAFEWRDPEKGNTGQLTWTRLPQGFKNSPTLFNEALHRDLAPFRALNPQVVLLQYVDDLLVAAPTYRDCKEGTQKLLQELSKLGYRVSAKKAQLCQKEVTYLGYLLKEGKRWLTPARKATVMKIPPPTTPRQVREFLGKAGFCRLFIPGFASLAAPLYPLTKPSIPFIWTEEHQKAFDRIKEALLSAPALALPDLTKPFTLYVDERAGVARGVLTQTLGPWRRPVAYLSKKLDPVASGWPTCLKAVAAVALLLKDADKLTLGQNVTVIASHSLESIVRQPPDRWMTNARMTHYQSLLLNERVSFAPPAVLNPATLLPVESEATPVHRCSEILAEETGTRRDLKDQPLPGVPAWYTDGSSFIAEGKRRAGAAIVDGKRTVWASSLPEGTSAQKAELVALTQALRLAEGKDINIYTDSRYAFATAHIHGAIYKQRGWLTSAGKDIKNKEEILALLEAIHLPKRVAIIHCPGHQKGNDPVATGNRRADEAAKQAALSTRVLAETTKPAGKRTADGSEFEKRTADGSEFESPKKKAKVE

SEQ ID NO: 893 - protein, 2113 aa, synthetic construct
MPAAKRVKLDGGDKKYSIGLDIGTNSVGWAVITDEYKVPSKKFKVLGNTDRHSIKKNLIGALLFDSGETAEATRLKRTARRRYTRRKNRICYLQEIFSNEMAKVDDSFFHRLEESFLVEEDKKHERHPIFGNIVDEVAYHEKYPTIYHLRKKLVDSTDKADLRLIYLALAHMIKFRGHFLIEGDLNPDNSDVDKLFIQLVQTYNQLFEENPINASGVDAKAILSARLSKSRRLENLIAQLPGEKKNGLFGNLIALSLGLTPNFKSNFDLAEDAKLQLSKDTYDDDLDNLLAQIGDQYADLFLAAKNLSDAILLSDILRVNTEITKAPLSASMIKRYDEHHQDLTLLKALVRQQLPEKYKEIFFDQSKNGYAGYIDGGASQEEFYKFIKPILEKMDGTEELLVKLNREDLLRKQRTFDNGSIPHQIHLGELHAILRRQEDFYPFLKDNREKIEKILTFRIPYYVGPLARGNSRFAWMTRKSEETITPWNFEEVVDKGASAQSFIERMTNFDKNLPNEKVLPKHSLLYEYFTVYNELTKVKYVTEGMRKPAFLSGEQKKAIVDLLFKTNRKVTVKQLKEDYFKKIECFDSVEISGVEDRFNASLGTYHDLLKIIKDKDFLDNEENEDILEDIVLTLTLFEDREMIEERLKTYAHLFDDKVMKQLKRRRYTGWGRLSRKLINGIRDKQSGKTILDFLKSDGFANRNFMQLIHDDSLTFKEDIQKAQVSGQGDSLHEHIANLAGSPAIKKGILQTVKVVDELVKVMGRHKPENIVIEMARENQTTQKGQKNSRERMKRIEEGIKELGSQILKEHPVENTQLQNEKLYLYYLQNGRDMYVDQELDINRLSDYDVDHIVPQSFLKDDSIDNKVLTRSDKARGKSDNVPSEEVVKKMKNYWRQLLNAKLITQRKFDNLTKAERGGLSELDKAGFIKRQLVETRQITKHVAQILDSRMNTKYDENDKLIREVKVITLKSKLVSDFRKDFQFYKVREINNYHHAHDAYLNAVVGTALIKKYPKLESEFVYGDYKVYDVRKMIAKSEQEIGKATAKYFFYSNIMNFFKTEITLANGEIRKRPLIETNGETGEIVWDKGRDFATVRKVLSMPQVNIVKKTEVQTGGFSKESILPKRNSDKLIARKKDWDPKKYGGFDSPTVAYSVLVVAKVEKGKSKKLKSVKELLGITIMERSSFEKNPIDFLEAKGYKEVKKDLIIKLPKYSLFELENGRKRMLASAGELQKGNELALPSKYVNFLYLASHYEKLKGSPEDNEQKQLFVEQHKHYLDEIIEQISEFSKRVILADANLDKVLSAYNKHRDKPIREQAENIIHLFTLTNLGAPAAFKYFDTTIDRKRYTSTKEVLDATLIHQSITGLYETRIDLSQLGGDGGEAAAKEAAAKEAAAKEAAAKEAAAKEAAAKGGVLNLEEEYRLHEKPVPSSIDPSWLQLFPTVWAERAGMGLANQVPPVVVELRSGASPVAVRQYPMSKEAREGIRPHIQRFLDLGVLVPCQSPWNTPLLPVKKPGTNDYRPVQDLREINKRVQDIHPTVPNPYNLLSSLPPSHTWYSVLDLKDAFFCLKLHPNSQPLFAFEWRDPEKGNTGQLTWTRLPQGFKNSPTLFNEALHRDLAPFRALNPQVVLLQYVDDLLVAAPTYRDCKEGTQKLLQELSKLGYRVSAKKAQLCQKEVTYLGYLLKEGKRWLTPARKATVMKIPPPTTPRQVREFLGKAGFCRLFIPGFASLAAPLYPLTKPSIPFIWTEEHQKAFDRIKEALLSAPALALPDLTKPFTLYVDERAGVARGVLTQTLGPWRRPVAYLSKKLDPVASGWPTCLKAVAAVALLLKDADKLTLGQNVTVIASHSLESIVRQPPDRWMTNARMTHYQSLLLNERVSFAPPAVLNPATLLPVESEATPVHRCSEILAEETGTRRDLKDQPLPGVPAWYTDGSSFIAEGKRRAGAAIVDGKRTVWASSLPEGTSAQKAELVALTQALRLAEGKDINIYTDSRYAFATAHIHGAIYKQRGWLTSAGKDIKNKEEILALLEAIHLPKRVAIIHCPGHQKGNDPVATGNRRADEAAKQAALSTRVLAETTKPAGKRTADGSEFEKRTADGSEFESPKKKAKVE

SEQ ID NO: 894 - protein, 2088 aa, synthetic construct
MPAAKRVKLDGGDKKYSIGLDIGTNSVGWAVITDEYKVPSKKFKVLGNTDRHSIKKNLIGALLFDSGETAEATRLKRTARRRYTRRKNRICYLQEIFSNEMAKVDDSFFHRLEESFLVEEDKKHERHPIFGNIVDEVAYHEKYPTIYHLRKKLVDSTDKADLRLIYLALAHMIKFRGHFLIEGDLNPDNSDVDKLFIQLVQTYNQLFEENPINASGVDAKAILSARLSKSRRLENLIAQLPGEKKNGLFGNLIALSLGLTPNFKSNFDLAEDAKLQLSKDTYDDDLDNLLAQIGDQYADLFLAAKNLSDAILLSDILRVNTEITKAPLSASMIKRYDEHHQDLTLLKALVRQQLPEKYKEIFFDQSKNGYAGYIDGGASQEEFYKFIKPILEKMDGTEELLVKLNREDLLRKQRTFDNGSIPHQIHLGELHAILRRQEDFYPFLKDNREKIEKILTFRIPYYVGPLARGNSRFAWMTRKSEETITPWNFEEVVDKGASAQSFIERMTNFDKNLPNEKVLPKHSLLYEYFTVYNELTKVKYVTEGMRKPAFLSGEQKKAIVDLLFKTNRKVTVKQLKEDYFKKIECFDSVEISGVEDRFNASLGTYHDLLKIIKDKDFLDNEENEDILEDIVLTLTLFEDREMIEERLKTYAHLFDDKVMKQLKRRRYTGWGRLSRKLINGIRDKQSGKTILDFLKSDGFANRNFMQLIHDDSLTFKEDIQKAQVSGQGDSLHEHIANLAGSPAIKKGILQTVKVVDELVKVMGRHKPENIVIEMARENQTTQKGQKNSRERMKRIEEGIKELGSQILKEHPVENTQLQNEKLYLYYLQNGRDMYVDQELDINRLSDYDVDHIVPQSFLKDDSIDNKVLTRSDKARGKSDNVPSEEVVKKMKNYWRQLLNAKLITQRKFDNLTKAERGGLSELDKAGFIKRQLVETRQITKHVAQILDSRMNTKYDENDKLIREVKVITLKSKLVSDFRKDFQFYKVREINNYHHAHDAYLNAVVGTALIKKYPKLESEFVYGDYKVYDVRKMIAKSEQEIGKATAKYFFYSNIMNFFKTEITLANGEIRKRPLIETNGETGEIVWDKGRDFATVRKVLSMPQVNIVKKTEVQTGGFSKESILPKRNSDKLIARKKDWDPKKYGGFDSPTVAYSVLVVAKVEKGKSKKLKSVKELLGITIMERSSFEKNPIDFLEAKGYKEVKKDLIIKLPKYSLFELENGRKRMLASAGELQKGNELALPSKYVNFLYLASHYEKLKGSPEDNEQKQLFVEQHKHYLDEIIEQISEFSKRVILADANLDKVLSAYNKHRDKPIREQAENIIHLFTLTNLGAPAAFKYFDTTIDRKRYTSTKEVLDATLIHQSITGLYETRIDLSQLGGDGGEAAAKGGVLNLEEEYRLHEKPVPSSIDPSWLQLFPTVWAERAGMGLANQVPPVVVELRSGASPVAVRQYPMSKEAREGIRPHIQRFLDLGVLVPCQSPWNTPLLPVKKPGTNDYRPVQDLREINKRVQDIHPTVPNPYNLLSSLPPSHTWYSVLDLKDAFFCLKLHPNSQPLFAFEWRDPEKGNTGQLTWTRLPQGFKNSPTLFNEALHRDLAPFRALNPQVVLLQYVDDLLVAAPTYRDCKEGTQKLLQELSKLGYRVSAKKAQLCQKEVTYLGYLLKEGKRWLTPARKATVMKIPPPTTPRQVREFLGKAGFCRLFIPGFASLAAPLYPLTKPSIPFIWTEEHQKAFDRIKEALLSAPALALPDLTKPFTLYVDERAGVARGVLTQTLGPWRRPVAYLSKKLDPVASGWPTCLKAVAAVALLLKDADKLTLGQNVTVIASHSLESIVRQPPDRWMTNARMTHYQSLLLNERVSFAPPAVLNPATLLPVESEATPVHRCSEILAEETGTRRDLKDQPLPGVPAWYTDGSSFIAEGKRRAGAAIVDGKRTVWASSLPEGTSAQKAELVALTQALRLAEGKDINIYTDSRYAFATAHIHGAIYKQRGWLTSAGKDIKNKEEILALLEAIHLPKRVAIIHCPGHQKGNDPVATGNRRADEAAKQAALSTRVLAETTKPAGKRTADGSEFEKRTADGSEFESPKKKAKVE

SEQ ID NO: 895 - protein, 2088 aa, synthetic construct
MPAAKRVKLDGGDKKYSIGLDIGTNSVGWAVITDEYKVPSKKFKVLGNTDRHSIKKNLIGALLFDSGETAEATRLKRTARRRYTRRKNRICYLQEIFSNEMAKVDDSFFHRLEESFLVEEDKKHERHPIFGNIVDEVAYHEKYPTIYHLRKKLVDSTDKADLRLIYLALAHMIKFRGHFLIEGDLNPDNSDVDKLFIQLVQTYNQLFEENPINASGVDAKAILSARLSKSRRLENLIAQLPGEKKNGLFGNLIALSLGLTPNFKSNFDLAEDAKLQLSKDTYDDDLDNLLAQIGDQYADLFLAAKNLSDAILLSDILRVNTEITKAPLSASMIKRYDEHHQDLTLLKALVRQQLPEKYKEIFFDQSKNGYAGYIDGGASQEEFYKFIKPILEKMDGTEELLVKLNREDLLRKQRTFDNGSIPHQIHLGELHAILRRQEDFYPFLKDNREKIEKILTFRIPYYVGPLARGNSRFAWMTRKSEETITPWNFEEVVDKGASAQSFIERMTNFDKNLPNEKVLPKHSLLYEYFTVYNELTKVKYVTEGMRKPAFLSGEQKKAIVDLLFKTNRKVTVKQLKEDYFKKIECFDSVEISGVEDRFNASLGTYHDLLKIIKDKDFLDNEENEDILEDIVLTLTLFEDREMIEERLKTYAHLFDDKVMKQLKRRRYTGWGRLSRKLINGIRDKQSGKTILDFLKSDGFANRNFMQLIHDDSLTFKEDIQKAQVSGQGDSLHEHIANLAGSPAIKKGILQTVKVVDELVKVMGRHKPENIVIEMARENQTTQKGQKNSRERMKRIEEGIKELGSQILKEHPVENTQLQNEKLYLYYLQNGRDMYVDQELDINRLSDYDVDHIVPQSFLKDDSIDNKVLTRSDKARGKSDNVPSEEVVKKMKNYWRQLLNAKLITQRKFDNLTKAERGGLSELDKAGFIKRQLVETRQITKHVAQILDSRMNTKYDENDKLIREVKVITLKSKLVSDFRKDFQFYKVREINNYHHAHDAYLNAVVGTALIKKYPKLESEFVYGDYKVYDVRKMIAKSEQEIGKATAKYFFYSNIMNFFKTEITLANGEIRKRPLIETNGETGEIVWDKGRDFATVRKVLSMPQVNIVKKTEVQTGGFSKESILPKRNSDKLIARKKDWDPKKYGGFDSPTVAYSVLVVAKVEKGKSKKLKSVKELLGITIMERSSFEKNPIDFLEAKGYKEVKKDLIIKLPKYSLFELENGRKRMLASAGELQKGNELALPSKYVNFLYLASHYEKLKGSPEDNEQKQLFVEQHKHYLDEIIEQISEFSKRVILADANLDKVLSAYNKHRDKPIREQAENIIHLFTLTNLGAPAAFKYFDTTIDRKRYTSTKEVLDATLIHQSITGLYETRIDLSQLGGDGGGGGGGGGVLNLEEEYRLHEKPVPSSIDPSWLQLFPTVWAERAGMGLANQVPPVVVELRSGASPVAVRQYPMSKEAREGIRPHIQRFLDLGVLVPCQSPWNTPLLPVKKPGTNDYRPVQDLREINKRVQDIHPTVPNPYNLLSSLPPSHTWYSVLDLKDAFFCLKLHPNSQPLFAFEWRDPEKGNTGQLTWTRLPQGFKNSPTLFNEALHRDLAPFRALNPQVVLLQYVDDLLVAAPTYRDCKEGTQKLLQELSKLGYRVSAKKAQLCQKEVTYLGYLLKEGKRWLTPARKATVMKIPPPTTPRQVREFLGKAGFCRLFIPGFASLAAPLYPLTKPSIPFIWTEEHQKAFDRIKEALLSAPALALPDLTKPFTLYVDERAGVARGVLTQTLGPWRRPVAYLSKKLDPVASGWPTCLKAVAAVALLLKDADKLTLGQNVTVIASHSLESIVRQPPDRWMTNARMTHYQSLLLNERVSFAPPAVLNPATLLPVESEATPVHRCSEILAEETGTRRDLKDQPLPGVPAWYTDGSSFIAEGKRRAGAAIVDGKRTVWASSLPEGTSAQKAELVALTQALRLAEGKDINIYTDSRYAFATAHIHGAIYKQRGWLTSAGKDIKNKEEILALLEAIHLPKRVAIIHCPGHQKGNDPVATGNRRADEAAKQAALSTRVLAETTKPAGKRTADGSEFEKRTADGSEFESPKKKAKVE

SEQ ID NO: 896 - protein, 2094 aa, synthetic construct
MPAAKRVKLDGGDKKYSIGLDIGTNSVGWAVITDEYKVPSKKFKVLGNTDRHSIKKNLIGALLFDSGETAEATRLKRTARRRYTRRKNRICYLQEIFSNEMAKVDDSFFHRLEESFLVEEDKKHERHPIFGNIVDEVAYHEKYPTIYHLRKKLVDSTDKADLRLIYLALAHMIKFRGHFLIEGDLNPDNSDVDKLFIQLVQTYNQLFEENPINASGVDAKAILSARLSKSRRLENLIAQLPGEKKNGLFGNLIALSLGLTPNFKSNFDLAEDAKLQLSKDTYDDDLDNLLAQIGDQYADLFLAAKNLSDAILLSDILRVNTEITKAPLSASMIKRYDEHHQDLTLLKALVRQQLPEKYKEIFFDQSKNGYAGYIDGGASQEEFYKFIKPILEKMDGTEELLVKLNREDLLRKQRTFDNGSIPHQIHLGELHAILRRQEDFYPFLKDNREKIEKILTFRIPYYVGPLARGNSRFAWMTRKSEETITPWNFEEVVDKGASAQSFIERMTNFDKNLPNEKVLPKHSLLYEYFTVYNELTKVKYVTEGMRKPAFLSGEQKKAIVDLLFKTNRKVTVKQLKEDYFKKIECFDSVEISGVEDRFNASLGTYHDLLKIIKDKDFLDNEENEDILEDIVLTLTLFEDREMIEERLKTYAHLFDDKVMKQLKRRRYTGWGRLSRKLINGIRDKQSGKTILDFLKSDGFANRNFMQLIHDDSLTFKEDIQKAQVSGQGDSLHEHIANLAGSPAIKKGILQTVKVVDELVKVMGRHKPENIVIEMARENQTTQKGQKNSRERMKRIEEGIKELGSQILKEHPVENTQLQNEKLYLYYLQNGRDMYVDQELDINRLSDYDVDHIVPQSFLKDDSIDNKVLTRSDKARGKSDNVPSEEVVKKMKNYWRQLLNAKLITQRKFDNLTKAERGGLSELDKAGFIKRQLVETRQITKHVAQILDSRMNTKYDENDKLIREVKVITLKSKLVSDFRKDFQFYKVREINNYHHAHDAYLNAVVGTALIKKYPKLESEFVYGDYKVYDVRKMIAKSEQEIGKATAKYFFYSNIMNFFKTEITLANGEIRKRPLIETNGETGEIVWDKGRDFATVRKVLSMPQVNIVKKTEVQTGGFSKESILPKRNSDKLIARKKDWDPKKYGGFDSPTVAYSVLVVAKVEKGKSKKLKSVKELLGITIMERSSFEKNPIDFLEAKGYKEVKKDLIIKLPKYSLFELENGRKRMLASAGELQKGNELALPSKYVNFLYLASHYEKLKGSPEDNEQKQLFVEQHKHYLDEIIEQISEFSKRVILADANLDKVLSAYNKHRDKPIREQAENIIHLFTLTNLGAPAAFKYFDTTIDRKRYTSTKEVLDATLIHQSITGLYETRIDLSQLGGDGGPAPEAAAKGGGGGVLNLEEEYRLHEKPVPSSIDPSWLQLFPTVWAERAGMGLANQVPPVVVELRSGASPVAVRQYPMSKEAREGIRPHIQRFLDLGVLVPCQSPWNTPLLPVKKPGTNDYRPVQDLREINKRVQDIHPTVPNPYNLLSSLPPSHTWYSVLDLKDAFFCLKLHPNSQPLFAFEWRDPEKGNTGQLTWTRLPQGFKNSPTLFNEALHRDLAPFRALNPQVVLLQYVDDLLVAAPTYRDCKEGTQKLLQELSKLGYRVSAKKAQLCQKEVTYLGYLLKEGKRWLTPARKATVMKIPPPTTPRQVREFLGKAGFCRLFIPGFASLAAPLYPLTKPSIPFIWTEEHQKAFDRIKEALLSAPALALPDLTKPFTLYVDERAGVARGVLTQTLGPWRRPVAYLSKKLDPVASGWPTCLKAVAAVALLLKDADKLTLGQNVTVIASHSLESIVRQPPDRWMTNARMTHYQSLLLNERVSFAPPAVLNPATLLPVESEATPVHRCSEILAEETGTRRDLKDQPLPGVPAWYTDGSSFIAEGKRRAGAAIVDGKRTVWASSLPEGTSAQKAELVALTQALRLAEGKDINIYTDSRYAFATAHIHGAIYKQRGWLTSAGKDIKNKEEILALLEAIHLPKRVAIIHCPGHQKGNDPVATGNRRADEAAKQAALSTRVLAETTKPAGKRTADGSEFEKRTADGSEFESPKKKAKVE

SEQ ID NO: 897 - protein, 2091 aa, synthetic construct
MPAAKRVKLDGGDKKYSIGLDIGTNSVGWAVITDEYKVPSKKFKVLGNTDRHSIKKNLIGALLFDSGETAEATRLKRTARRRYTRRKNRICYLQEIFSNEMAKVDDSFFHRLEESFLVEEDKKHERHPIFGNIVDEVAYHEKYPTIYHLRKKLVDSTDKADLRLIYLALAHMIKFRGHFLIEGDLNPDNSDVDKLFIQLVQTYNQLFEENPINASGVDAKAILSARLSKSRRLENLIAQLPGEKKNGLFGNLIALSLGLTPNFKSNFDLAEDAKLQLSKDTYDDDLDNLLAQIGDQYADLFLAAKNLSDAILLSDILRVNTEITKAPLSASMIKRYDEHHQDLTLLKALVRQQLPEKYKEIFFDQSKNGYAGYIDGGASQEEFYKFIKPILEKMDGTEELLVKLNREDLLRKQRTFDNGSIPHQIHLGELHAILRRQEDFYPFLKDNREKIEKILTFRIPYYVGPLARGNSRFAWMTRKSEETITPWNFEEVVDKGASAQSFIERMTNFDKNLPNEKVLPKHSLLYEYFTVYNELTKVKYVTEGMRKPAFLSGEQKKAIVDLLFKTNRKVTVKQLKEDYFKKIECFDSVEISGVEDRFNASLGTYHDLLKIIKDKDFLDNEENEDILEDIVLTLTLFEDREMIEERLKTYAHLFDDKVMKQLKRRRYTGWGRLSRKLINGIRDKQSGKTILDFLKSDGFANRNFMQLIHDDSLTFKEDIQKAQVSGQGDSLHEHIANLAGSPAIKKGILQTVKVVDELVKVMGRHKPENIVIEMARENQTTQKGQKNSRERMKRIEEGIKELGSQILKEHPVENTQLQNEKLYLYYLQNGRDMYVDQELDINRLSDYDVDHIVPQSFLKDDSIDNKVLTRSDKARGKSDNVPSEEVVKKMKNYWRQLLNAKLITQRKFDNLTKAERGGLSELDKAGFIKRQLVETRQITKHVAQILDSRMNTKYDENDKLIREVKVITLKSKLVSDFRKDFQFYKVREINNYHHAHDAYLNAVVGTALIKKYPKLESEFVYGDYKVYDVRKMIAKSEQEIGKATAKYFFYSNIMNFFKTEITLANGEIRKRPLIETNGETGEIVWDKGRDFATVRKVLSMPQVNIVKKTEVQTGGFSKESILPKRNSDKLIARKKDWDPKKYGGFDSPTVAYSVLVVAKVEKGKSKKLKSVKELLGITIMERSSFEKNPIDFLEAKGYKEVKKDLIIKLPKYSLFELENGRKRMLASAGELQKGNELALPSKYVNFLYLASHYEKLKGSPEDNEQKQLFVEQHKHYLDEIIEQISEFSKRVILADANLDKVLSAYNKHRDKPIREQAENIIHLFTLTNLGAPAAFKYFDTTIDRKRYTSTKEVLDATLIHQSITGLYETRIDLSQLGGDGGEAAAKGGSGGVLNLEEEYRLHEKPVPSSIDPSWLQLFPTVWAERAGMGLANQVPPVVVELRSGASPVAVRQYPMSKEAREGIRPHIQRFLDLGVLVPCQSPWNTPLLPVKKPGTNDYRPVQDLREINKRVQDIHPTVPNPYNLLSSLPPSHTWYSVLDLKDAFFCLKLHPNSQPLFAFEWRDPEKGNTGQLTWTRLPQGFKNSPTLFNEALHRDLAPFRALNPQVVLLQYVDDLLVAAPTYRDCKEGTQKLLQELSKLGYRVSAKKAQLCQKEVTYLGYLLKEGKRWLTPARKATVMKIPPPTTPRQVREFLGKAGFCRLFIPGFASLAAPLYPLTKPSIPFIWTEEHQKAFDRIKEALLSAPALALPDLTKPFTLYVDERAGVARGVLTQTLGPWRRPVAYLSKKLDPVASGWPTCLKAVAAVALLLKDADKLTLGQNVTVIASHSLESIVRQPPDRWMTNARMTHYQSLLLNERVSFAPPAVLNPATLLPVESEATPVHRCSEILAEETGTRRDLKDQPLPGVPAWYTDGSSFIAEGKRRAGAAIVDGKRTVWASSLPEGTSAQKAELVALTQALRLAEGKDINIYTDSRYAFATAHIHGAIYKQRGWLTSAGKDIKNKEEILALLEAIHLPKRVAIIHCPGHQKGNDPVATGNRRADEAAKQAALSTRVLAETTKPAGKRTADGSEFEKRTADGSEFESPKKKAKVE

SEQ ID NO: 898 - protein, 2094 aa, synthetic construct
MPAAKRVKLDGGDKKYSIGLDIGTNSVGWAVITDEYKVPSKKFKVLGNTDRHSIKKNLIGALLFDSGETAEATRLKRTARRRYTRRKNRICYLQEIFSNEMAKVDDSFFHRLEESFLVEEDKKHERHPIFGNIVDEVAYHEKYPTIYHLRKKLVDSTDKADLRLIYLALAHMIKFRGHFLIEGDLNPDNSDVDKLFIQLVQTYNQLFEENPINASGVDAKAILSARLSKSRRLENLIAQLPGEKKNGLFGNLIALSLGLTPNFKSNFDLAEDAKLQLSKDTYDDDLDNLLAQIGDQYADLFLAAKNLSDAILLSDILRVNTEITKAPLSASMIKRYDEHHQDLTLLKALVRQQLPEKYKEIFFDQSKNGYAGYIDGGASQEEFYKFIKPILEKMDGTEELLVKLNREDLLRKQRTFDNGSIPHQIHLGELHAILRRQEDFYPFLKDNREKIEKILTFRIPYYVGPLARGNSRFAWMTRKSEETITPWNFEEVVDKGASAQSFIERMTNFDKNLPNEKVLPKHSLLYEYFTVYNELTKVKYVTEGMRKPAFLSGEQKKAIVDLLFKTNRKVTVKQLKEDYFKKIECFDSVEISGVEDRFNASLGTYHDLLKIIKDKDFLDNEENEDILEDIVLTLTLFEDREMIEERLKTYAHLFDDKVMKQLKRRRYTGWGRLSRKLINGIRDKQSGKTILDFLKSDGFANRNFMQLIHDDSLTFKEDIQKAQVSGQGDSLHEHIANLAGSPAIKKGILQTVKVVDELVKVMGRHKPENIVIEMARENQTTQKGQKNSRERMKRIEEGIKELGSQILKEHPVENTQLQNEKLYLYYLQNGRDMYVDQELDINRLSDYDVDHIVPQSFLKDDSIDNKVLTRSDKARGKSDNVPSEEVVKKMKNYWRQLLNAKLITQRKFDNLTKAERGGLSELDKAGFIKRQLVETRQITKHVAQILDSRMNTKYDENDKLIREVKVITLKSKLVSDFRKDFQFYKVREINNYHHAHDAYLNAVVGTALIKKYPKLESEFVYGDYKVYDVRKMIAKSEQEIGKATAKYFFYSNIMNFFKTEITLANGEIRKRPLIETNGETGEIVWDKGRDFATVRKVLSMPQVNIVKKTEVQTGGFSKESILPKRNSDKLIARKKDWDPKKYGGFDSPTVAYSVLVVAKVEKGKSKKLKSVKELLGITIMERSSFEKNPIDFLEAKGYKEVKKDLIIKLPKYSLFELENGRKRMLASAGELQKGNELALPSKYVNFLYLASHYEKLKGSPEDNEQKQLFVEQHKHYLDEIIEQISEFSKRVILADANLDKVLSAYNKHRDKPIREQAENIIHLFTLTNLGAPAAFKYFDTTIDRKRYTSTKEVLDATLIHQSITGLYETRIDLSQLGGDGGGGSPAPEAAAKGGVLNLEEEYRLHEKPVPSSIDPSWLQLFPTVWAERAGMGLANQVPPVVVELRSGASPVAVRQYPMSKEAREGIRPHIQRFLDLGVLVPCQSPWNTPLLPVKKPGTNDYRPVQDLREINKRVQDIHPTVPNPYNLLSSLPPSHTWYSVLDLKDAFFCLKLHPNSQPLFAFEWRDPEKGNTGQLTWTRLPQGFKNSPTLFNEALHRDLAPFRALNPQVVLLQYVDDLLVAAPTYRDCKEGTQKLLQELSKLGYRVSAKKAQLCQKEVTYLGYLLKEGKRWLTPARKATVMKIPPPTTPRQVREFLGKAGFCRLFIPGFASLAAPLYPLTKPSIPFIWTEEHQKAFDRIKEALLSAPALALPDLTKPFTLYVDERAGVARGVLTQTLGPWRRPVAYLSKKLDPVASGWPTCLKAVAAVALLLKDADKLTLGQNVTVIASHSLESIVRQPPDRWMTNARMTHYQSLLLNERVSFAPPAVLNPATLLPVESEATPVHRCSEILAEETGTRRDLKDQPLPGVPAWYTDGSSFIAEGKRRAGAAIVDGKRTVWASSLPEGTSAQKAELVALTQALRLAEGKDINIYTDSRYAFATAHIHGAIYKQRGWLTSAGKDIKNKEEILALLEAIHLPKRVAIIHCPGHQKGNDPVATGNRRADEAAKQAALSTRVLAETTKPAGKRTADGSEFEKRTADGSEFESPKKKAKVE

SEQ ID NO: 899 - protein, 2101 aa, synthetic construct
MPAAKRVKLDGGDKKYSIGLDIGTNSVGWAVITDEYKVPSKKFKVLGNTDRHSIKKNLIGALLFDSGETAEATRLKRTARRRYTRRKNRICYLQEIFSNEMAKVDDSFFHRLEESFLVEEDKKHERHPIFGNIVDEVAYHEKYPTIYHLRKKLVDSTDKADLRLIYLALAHMIKFRGHFLIEGDLNPDNSDVDKLFIQLVQTYNQLFEENPINASGVDAKAILSARLSKSRRLENLIAQLPGEKKNGLFGNLIALSLGLTPNFKSNFDLAEDAKLQLSKDTYDDDLDNLLAQIGDQYADLFLAAKNLSDAILLSDILRVNTEITKAPLSASMIKRYDEHHQDLTLLKALVRQQLPEKYKEIFFDQSKNGYAGYIDGGASQEEFYKFIKPILEKMDGTEELLVKLNREDLLRKQRTFDNGSIPHQIHLGELHAILRRQEDFYPFLKDNREKIEKILTFRIPYYVGPLARGNSRFAWMTRKSEETITPWNFEEVVDKGASAQSFIERMTNFDKNLPNEKVLPKHSLLYEYFTVYNELTKVKYVTEGMRKPAFLSGEQKKAIVDLLFKTNRKVTVKQLKEDYFKKIECFDSVEISGVEDRFNASLGTYHDLLKIIKDKDFLDNEENEDILEDIVLTLTLFEDREMIEERLKTYAHLFDDKVMKQLKRRRYTGWGRLSRKLINGIRDKQSGKTILDFLKSDGFANRNFMQLIHDDSLTFKEDIQKAQVSGQGDSLHEHIANLAGSPAIKKGILQTVKVVDELVKVMGRHKPENIVIEMARENQTTQKGQKNSRERMKRIEEGIKELGSQILKEHPVENTQLQNEKLYLYYLQNGRDMYVDQELDINRLSDYDVDHIVPQSFLKDDSIDNKVLTRSDKARGKSDNVPSEEVVKKMKNYWRQLLNAKLITQRKFDNLTKAERGGLSELDKAGFIKRQLVETRQITKHVAQILDSRMNTKYDENDKLIREVKVITLKSKLVSDFRKDFQFYKVREINNYHHAHDAYLNAVVGTALIKKYPKLESEFVYGDYKVYDVRKMIAKSEQEIGKATAKYFFYSNIMNFFKTEITLANGEIRKRPLIETNGETGEIVWDKGRDFATVRKVLSMPQVNIVKKTEVQTGGFSKESILPKRNSDKLIARKKDWDPKKYGGFDSPTVAYSVLVVAKVEKGKSKKLKSVKELLGITIMERSSFEKNPIDFLEAKGYKEVKKDLIIKLPKYSLFELENGRKRMLASAGELQKGNELALPSKYVNFLYLASHYEKLKGSPEDNEQKQLFVEQHKHYLDEIIEQISEFSKRVILADANLDKVLSAYNKHRDKPIREQAENIIHLFTLTNLGAPAAFKYFDTTIDRKRYTSTKEVLDATLIHQSITGLYETRIDLSQLGGDGGGGSGGSGGSGGSGGSGGSGGVLNLEEEYRLHEKPVPSSIDPSWLQLFPTVWAERAGMGLANQVPPVVVELRSGASPVAVRQYPMSKEAREGIRPHIQRFLDLGVLVPCQSPWNTPLLPVKKPGTNDYRPVQDLREINKRVQDIHPTVPNPYNLLSSLPPSHTWYSVLDLKDAFFCLKLHPNSQPLFAFEWRDPEKGNTGQLTWTRLPQGFKNSPTLFNEALHRDLAPFRALNPQVVLLQYVDDLLVAAPTYRDCKEGTQKLLQELSKLGYRVSAKKAQLCQKEVTYLGYLLKEGKRWLTPARKATVMKIPPPTTPRQVREFLGKAGFCRLFIPGFASLAAPLYPLTKPSIPFIWTEEHQKAFDRIKEALLSAPALALPDLTKPFTLYVDERAGVARGVLTQTLGPWRRPVAYLSKKLDPVASGWPTCLKAVAAVALLLKDADKLTLGQNVTVIASHSLESIVRQPPDRWMTNARMTHYQSLLLNERVSFAPPAVLNPATLLPVESEATPVHRCSEILAEETGTRRDLKDQPLPGVPAWYTDGSSFIAEGKRRAGAAIVDGKRTVWASSLPEGTSAQKAELVALTQALRLAEGKDINIYTDSRYAFATAHIHGAIYKQRGWLTSAGKDIKNKEEILALLEAIHLPKRVAIIHCPGHQKGNDPVATGNRRADEAAKQAALSTRVLAETTKPAGKRTADGSEFEKRTADGSEFESPKKKAKVE

SEQ ID NO: 900 - protein, 2098 aa, synthetic construct
MPAAKRVKLDGGDKKYSIGLDIGTNSVGWAVITDEYKVPSKKFKVLGNTDRHSIKKNLIGALLFDSGETAEATRLKRTARRRYTRRKNRICYLQEIFSNEMAKVDDSFFHRLEESFLVEEDKKHERHPIFGNIVDEVAYHEKYPTIYHLRKKLVDSTDKADLRLIYLALAHMIKFRGHFLIEGDLNPDNSDVDKLFIQLVQTYNQLFEENPINASGVDAKAILSARLSKSRRLENLIAQLPGEKKNGLFGNLIALSLGLTPNFKSNFDLAEDAKLQLSKDTYDDDLDNLLAQIGDQYADLFLAAKNLSDAILLSDILRVNTEITKAPLSASMIKRYDEHHQDLTLLKALVRQQLPEKYKEIFFDQSKNGYAGYIDGGASQEEFYKFIKPILEKMDGTEELLVKLNREDLLRKQRTFDNGSIPHQIHLGELHAILRRQEDFYPFLKDNREKIEKILTFRIPYYVGPLARGNSRFAWMTRKSEETITPWNFEEVVDKGASAQSFIERMTNFDKNLPNEKVLPKHSLLYEYFTVYNELTKVKYVTEGMRKPAFLSGEQKKAIVDLLFKTNRKVTVKQLKEDYFKKIECFDSVEISGVEDRFNASLGTYHDLLKIIKDKDFLDNEENEDILEDIVLTLTLFEDREMIEERLKTYAHLFDDKVMKQLKRRRYTGWGRLSRKLINGIRDKQSGKTILDFLKSDGFANRNFMQLIHDDSLTFKEDIQKAQVSGQGDSLHEHIANLAGSPAIKKGILQTVKVVDELVKVMGRHKPENIVIEMARENQTTQKGQKNSRERMKRIEEGIKELGSQILKEHPVENTQLQNEKLYLYYLQNGRDMYVDQELDINRLSDYDVDHIVPQSFLKDDSIDNKVLTRSDKARGKSDNVPSEEVVKKMKNYWRQLLNAKLITQRKFDNLTKAERGGLSELDKAGFIKRQLVETRQITKHVAQILDSRMNTKYDENDKLIREVKVITLKSKLVSDFRKDFQFYKVREINNYHHAHDAYLNAVVGTALIKKYPKLESEFVYGDYKVYDVRKMIAKSEQEIGKATAKYFFYSNIMNFFKTEITLANGEIRKRPLIETNGETGEIVWDKGRDFATVRKVLSMPQVNIVKKTEVQTGGFSKESILPKRNSDKLIARKKDWDPKKYGGFDSPTVAYSVLVVAKVEKGKSKKLKSVKELLGITIMERSSFEKNPIDFLEAKGYKEVKKDLIIKLPKYSLFELENGRKRMLASAGELQKGNELALPSKYVNFLYLASHYEKLKGSPEDNEQKQLFVEQHKHYLDEIIEQISEFSKRVILADANLDKVLSAYNKHRDKPIREQAENIIHLFTLTNLGAPAAFKYFDTTIDRKRYTSTKEVLDATLIHQSITGLYETRIDLSQLGGDGGEAAAKGGGGSEAAAKGGVLNLEEEYRLHEKPVPSSIDPSWLQLFPTVWAERAGMGLANQVPPVVVELRSGASPVAVRQYPMSKEAREGIRPHIQRFLDLGVLVPCQSPWNTPLLPVKKPGTNDYRPVQDLREINKRVQDIHPTVPNPYNLLSSLPPSHTWYSVLDLKDAFFCLKLHPNSQPLFAFEWRDPEKGNTGQLTWTRLPQGFKNSPTLFNEALHRDLAPFRALNPQVVLLQYVDDLLVAAPTYRDCKEGTQKLLQELSKLGYRVSAKKAQLCQKEVTYLGYLLKEGKRWLTPARKATVMKIPPPTTPRQVREFLGKAGFCRLFIPGFASLAAPLYPLTKPSIPFIWTEEHQKAFDRIKEALLSAPALALPDLTKPFTLYVDERAGVARGVLTQTLGPWRRPVAYLSKKLDPVASGWPTCLKAVAAVALLLKDADKLTLGQNVTVIASHSLESIVRQPPDRWMTNARMTHYQSLLLNERVSFAPPAVLNPATLLPVESEATPVHRCSEILAEETGTRRDLKDQPLPGVPAWYTDGSSFIAEGKRRAGAAIVDGKRTVWASSLPEGTSAQKAELVALTQALRLAEGKDINIYTDSRYAFATAHIHGAIYKQRGWLTSAGKDIKNKEEILALLEAIHLPKRVAIIHCPGHQKGNDPVATGNRRADEAAKQAALSTRVLAETTKPAGKRTADGSEFEKRTADGSEFESPKKKAKVE

SEQ ID NO: 901 - protein, 2094 aa, synthetic construct
MPAAKRVKLDGGDKKYSIGLDIGTNSVGWAVITDEYKVPSKKFKVLGNTDRHSIKKNLIGALLFDSGETAEATRLKRTARRRYTRRKNRICYLQEIFSNEMAKVDDSFFHRLEESFLVEEDKKHERHPIFGNIVDEVAYHEKYPTIYHLRKKLVDSTDKADLRLIYLALAHMIKFRGHFLIEGDLNPDNSDVDKLFIQLVQTYNQLFEENPINASGVDAKAILSARLSKSRRLENLIAQLPGEKKNGLFGNLIALSLGLTPNFKSNFDLAEDAKLQLSKDTYDDDLDNLLAQIGDQYADLFLAAKNLSDAILLSDILRVNTEITKAPLSASMIKRYDEHHQDLTLLKALVRQQLPEKYKEIFFDQSKNGYAGYIDGGASQEEFYKFIKPILEKMDGTEELLVKLNREDLLRKQRTFDNGSIPHQIHLGELHAILRRQEDFYPFLKDNREKIEKILTFRIPYYVGPLARGNSRFAWMTRKSEETITPWNFEEVVDKGASAQSFIERMTNFDKNLPNEKVLPKHSLLYEYFTVYNELTKVKYVTEGMRKPAFLSGEQKKAIVDLLFKTNRKVTVKQLKEDYFKKIECFDSVEISGVEDRFNASLGTYHDLLKIIKDKDFLDNEENEDILEDIVLTLTLFEDREMIEERLKTYAHLFDDKVMKQLKRRRYTGWGRLSRKLINGIRDKQSGKTILDFLKSDGFANRNFMQLIHDDSLTFKEDIQKAQVSGQGDSLHEHIANLAGSPAIKKGILQTVKVVDELVKVMGRHKPENIVIEMARENQTTQKGQKNSRERMKRIEEGIKELGSQILKEHPVENTQLQNEKLYLYYLQNGRDMYVDQELDINRLSDYDVDHIVPQSFLKDDSIDNKVLTRSDKARGKSDNVPSEEVVKKMKNYWRQLLNAKLITQRKFDNLTKAERGGLSELDKAGFIKRQLVETRQITKHVAQILDSRMNTKYDENDKLIREVKVITLKSKLVSDFRKDFQFYKVREINNYHHAHDAYLNAVVGTALIKKYPKLESEFVYGDYKVYDVRKMIAKSEQEIGKATAKYFFYSNIMNFFKTEITLANGEIRKRPLIETNGETGEIVWDKGRDFATVRKVLSMPQVNIVKKTEVQTGGFSKESILPKRNSDKLIARKKDWDPKKYGGFDSPTVAYSVLVVAKVEKGKSKKLKSVKELLGITIMERSSFEKNPIDFLEAKGYKEVKKDLIIKLPKYSLFELENGRKRMLASAGELQKGNELALPSKYVNFLYLASHYEKLKGSPEDNEQKQLFVEQHKHYLDEIIEQISEFSKRVILADANLDKVLSAYNKHRDKPIREQAENIIHLFTLTNLGAPAAFKYFDTTIDRKRYTSTKEVLDATLIHQSITGLYETRIDLSQLGGDGGGGGEAAAKGGSGGVLNLEEEYRLHEKPVPSSIDPSWLQLFPTVWAERAGMGLANQVPPVVVELRSGASPVAVRQYPMSKEAREGIRPHIQRFLDLGVLVPCQSPWNTPLLPVKKPGTNDYRPVQDLREINKRVQDIHPTVPNPYNLLSSLPPSHTWYSVLDLKDAFFCLKLHPNSQPLFAFEWRDPEKGNTGQLTWTRLPQGFKNSPTLFNEALHRDLAPFRALNPQVVLLQYVDDLLVAAPTYRDCKEGTQKLLQELSKLGYRVSAKKAQLCQKEVTYLGYLLKEGKRWLTPARKATVMKIPPPTTPRQVREFLGKAGFCRLFIPGFASLAAPLYPLTKPSIPFIWTEEHQKAFDRIKEALLSAPALALPDLTKPFTLYVDERAGVARGVLTQTLGPWRRPVAYLSKKLDPVASGWPTCLKAVAAVALLLKDADKLTLGQNVTVIASHSLESIVRQPPDRWMTNARMTHYQSLLLNERVSFAPPAVLNPATLLPVESEATPVHRCSEILAEETGTRRDLKDQPLPGVPAWYTDGSSFIAEGKRRAGAAIVDGKRTVWASSLPEGTSAQKAELVALTQALRLAEGKDINIYTDSRYAFATAHIHGAIYKQRGWLTSAGKDIKNKEEILALLEAIHLPKRVAIIHCPGHQKGNDPVATGNRRADEAAKQAALSTRVLAETTKPAGKRTADGSEFEKRTADGSEFESPKKKAKVE

SEQ ID NO: 902 - protein, 2094 aa, synthetic construct
MPAAKRVKLDGGDKKYSIGLDIGTNSVGWAVITDEYKVPSKKFKVLGNTDRHSIKKNLIGALLFDSGETAEATRLKRTARRRYTRRKNRICYLQEIFSNEMAKVDDSFFHRLEESFLVEEDKKHERHPIFGNIVDEVAYHEKYPTIYHLRKKLVDSTDKADLRLIYLALAHMIKFRGHFLIEGDLNPDNSDVDKLFIQLVQTYNQLFEENPINASGVDAKAILSARLSKSRRLENLIAQLPGEKKNGLFGNLIALSLGLTPNFKSNFDLAEDAKLQLSKDTYDDDLDNLLAQIGDQYADLFLAAKNLSDAILLSDILRVNTEITKAPLSASMIKRYDEHHQDLTLLKALVRQQLPEKYKEIFFDQSKNGYAGYIDGGASQEEFYKFIKPILEKMDGTEELLVKLNREDLLRKQRTFDNGSIPHQIHLGELHAILRRQEDFYPFLKDNREKIEKILTFRIPYYVGPLARGNSRFAWMTRKSEETITPWNFEEVVDKGASAQSFIERMTNFDKNLPNEKVLPKHSLLYEYFTVYNELTKVKYVTEGMRKPAFLSGEQKKAIVDLLFKTNRKVTVKQLKEDYFKKIECFDSVEISGVEDRFNASLGTYHDLLKIIKDKDFLDNEENEDILEDIVLTLTLFEDREMIEERLKTYAHLFDDKVMKQLKRRRYTGWGRLSRKLINGIRDKQSGKTILDFLKSDGFANRNFMQLIHDDSLTFKEDIQKAQVSGQGDSLHEHIANLAGSPAIKKGILQTVKVVDELVKVMGRHKPENIVIEMARENQTTQKGQKNSRERMKRIEEGIKELGSQILKEHPVENTQLQNEKLYLYYLQNGRDMYVDQELDINRLSDYDVDHIVPQSFLKDDSIDNKVLTRSDKARGKSDNVPSEEVVKKMKNYWRQLLNAKLITQRKFDNLTKAERGGLSELDKAGFIKRQLVETRQITKHVAQILDSRMNTKYDENDKLIREVKVITLKSKLVSDFRKDFQFYKVREINNYHHAHDAYLNAVVGTALIKKYPKLESEFVYGDYKVYDVRKMIAKSEQEIGKATAKYFFYSNIMNFFKTEITLANGEIRKRPLIETNGETGEIVWDKGRDFATVRKVLSMPQVNIVKKTEVQTGGFSKESILPKRNSDKLIARKKDWDPKKYGGFDSPTVAYSVLVVAKVEKGKSKKLKSVKELLGITIMERSSFEKNPIDFLEAKGYKEVKKDLIIKLPKYSLFELENGRKRMLASAGELQKGNELALPSKYVNFLYLASHYEKLKGSPEDNEQKQLFVEQHKHYLDEIIEQISEFSKRVILADANLDKVLSAYNKHRDKPIREQAENIIHLFTLTNLGAPAAFKYFDTTIDRKRYTSTKEVLDATLIHQSITGLYETRIDLSQLGGDGGGGSEAAAKGGGGGVLNLEEEYRLHEKPVPSSIDPSWLQLFPTVWAERAGMGLANQVPPVVVELRSGASPVAVRQYPMSKEAREGIRPHIQRFLDLGVLVPCQSPWNTPLLPVKKPGTNDYRPVQDLREINKRVQDIHPTVPNPYNLLSSLPPSHTWYSVLDLKDAFFCLKLHPNSQPLFAFEWRDPEKGNTGQLTWTRLPQGFKNSPTLFNEALHRDLAPFRALNPQVVLLQYVDDLLVAAPTYRDCKEGTQKLLQELSKLGYRVSAKKAQLCQKEVTYLGYLLKEGKRWLTPARKATVMKIPPPTTPRQVREFLGKAGFCRLFIPGFASLAAPLYPLTKPSIPFIWTEEHQKAFDRIKEALLSAPALALPDLTKPFTLYVDERAGVARGVLTQTLGPWRRPVAYLSKKLDPVASGWPTCLKAVAAVALLLKDADKLTLGQNVTVIASHSLESIVRQPPDRWMTNARMTHYQSLLLNERVSFAPPAVLNPATLLPVESEATPVHRCSEILAEETGTRRDLKDQPLPGVPAWYTDGSSFIAEGKRRAGAAIVDGKRTVWASSLPEGTSAQKAELVALTQALRLAEGKDINIYTDSRYAFATAHIHGAIYKQRGWLTSAGKDIKNKEEILALLEAIHLPKRVAIIHCPGHQKGNDPVATGNRRADEAAKQAALSTRVLAETTKPAGKRTADGSEFEKRTADGSEFESPKKKAKVE

SEQ ID NO: 903 - protein, 2092 aa, synthetic construct
MPAAKRVKLDGGDKKYSIGLDIGTNSVGWAVITDEYKVPSKKFKVLGNTDRHSIKKNLIGALLFDSGETAEATRLKRTARRRYTRRKNRICYLQEIFSNEMAKVDDSFFHRLEESFLVEEDKKHERHPIFGNIVDEVAYHEKYPTIYHLRKKLVDSTDKADLRLIYLALAHMIKFRGHFLIEGDLNPDNSDVDKLFIQLVQTYNQLFEENPINASGVDAKAILSARLSKSRRLENLIAQLPGEKKNGLFGNLIALSLGLTPNFKSNFDLAEDAKLQLSKDTYDDDLDNLLAQIGDQYADLFLAAKNLSDAILLSDILRVNTEITKAPLSASMIKRYDEHHQDLTLLKALVRQQLPEKYKEIFFDQSKNGYAGYIDGGASQEEFYKFIKPILEKMDGTEELLVKLNREDLLRKQRTFDNGSIPHQIHLGELHAILRRQEDFYPFLKDNREKIEKILTFRIPYYVGPLARGNSRFAWMTRKSEETITPWNFEEVVDKGASAQSFIERMTNFDKNLPNEKVLPKHSLLYEYFTVYNELTKVKYVTEGMRKPAFLSGEQKKAIVDLLFKTNRKVTVKQLKEDYFKKIECFDSVEISGVEDRFNASLGTYHDLLKIIKDKDFLDNEENEDILEDIVLTLTLFEDREMIEERLKTYAHLFDDKVMKQLKRRRYTGWGRLSRKLINGIRDKQSGKTILDFLKSDGFANRNFMQLIHDDSLTFKEDIQKAQVSGQGDSLHEHIANLAGSPAIKKGILQTVKVVDELVKVMGRHKPENIVIEMARENQTTQKGQKNSRERMKRIEEGIKELGSQILKEHPVENTQLQNEKLYLYYLQNGRDMYVDQELDINRLSDYDVDHIVPQSFLKDDSIDNKVLTRSDKARGKSDNVPSEEVVKKMKNYWRQLLNAKLITQRKFDNLTKAERGGLSELDKAGFIKRQLVETRQITKHVAQILDSRMNTKYDENDKLIREVKVITLKSKLVSDFRKDFQFYKVREINNYHHAHDAYLNAVVGTALIKKYPKLESEFVYGDYKVYDVRKMIAKSEQEIGKATAKYFFYSNIMNFFKTEITLANGEIRKRPLIETNGETGEIVWDKGRDFATVRKVLSMPQVNIVKKTEVQTGGFSKESILPKRNSDKLIARKKDWDPKKYGGFDSPTVAYSVLVVAKVEKGKSKKLKSVKELLGITIMERSSFEKNPIDFLEAKGYKEVKKDLIIKLPKYSLFELENGRKRMLASAGELQKGNELALPSKYVNFLYLASHYEKLKGSPEDNEQKQLFVEQHKHYLDEIIEQISEFSKRVILADANLDKVLSAYNKHRDKPIREQAENIIHLFTLTNLGAPAAFKYFDTTIDRKRYTSTKEVLDATLIHQSITGLYETRIDLSQLGGDGGGGSGGGGSSGGVLNLEEEYRLHEKPVPSSIDPSWLQLFPTVWAERAGMGLANQVPPVVVELRSGASPVAVRQYPMSKEAREGIRPHIQRFLDLGVLVPCQSPWNTPLLPVKKPGTNDYRPVQDLREINKRVQDIHPTVPNPYNLLSSLPPSHTWYSVLDLKDAFFCLKLHPNSQPLFAFEWRDPEKGNTGQLTWTRLPQGFKNSPTLFNEALHRDLAPFRALNPQVVLLQYVDDLLVAAPTYRDCKEGTQKLLQELSKLGYRVSAKKAQLCQKEVTYLGYLLKEGKRWLTPARKATVMKIPPPTTPRQVREFLGKAGFCRLFIPGFASLAAPLYPLTKPSIPFIWTEEHQKAFDRIKEALLSAPALALPDLTKPFTLYVDERAGVARGVLTQTLGPWRRPVAYLSKKLDPVASGWPTCLKAVAAVALLLKDADKLTLGQNVTVIASHSLESIVRQPPDRWMTNARMTHYQSLLLNERVSFAPPAVLNPATLLPVESEATPVHRCSEILAEETGTRRDLKDQPLPGVPAWYTDGSSFIAEGKRRAGAAIVDGKRTVWASSLPEGTSAQKAELVALTQALRLAEGKDINIYTDSRYAFATAHIHGAIYKQRGWLTSAGKDIKNKEEILALLEAIHLPKRVAIIHCPGHQKGNDPVATGNRRADEAAKQAALSTRVLAETTKPAGKRTADGSEFEKRTADGSEFESPKKKAKVE

SEQ ID NO: 904 - protein, 2088 aa, synthetic construct
MPAAKRVKLDGGDKKYSIGLDIGTNSVGWAVITDEYKVPSKKFKVLGNTDRHSIKKNLIGALLFDSGETAEATRLKRTARRRYTRRKNRICYLQEIFSNEMAKVDDSFFHRLEESFLVEEDKKHERHPIFGNIVDEVAYHEKYPTIYHLRKKLVDSTDKADLRLIYLALAHMIKFRGHFLIEGDLNPDNSDVDKLFIQLVQTYNQLFEENPINASGVDAKAILSARLSKSRRLENLIAQLPGEKKNGLFGNLIALSLGLTPNFKSNFDLAEDAKLQLSKDTYDDDLDNLLAQIGDQYADLFLAAKNLSDAILLSDILRVNTEITKAPLSASMIKRYDEHHQDLTLLKALVRQQLPEKYKEIFFDQSKNGYAGYIDGGASQEEFYKFIKPILEKMDGTEELLVKLNREDLLRKQRTFDNGSIPHQIHLGELHAILRRQEDFYPFLKDNREKIEKILTFRIPYYVGPLARGNSRFAWMTRKSEETITPWNFEEVVDKGASAQSFIERMTNFDKNLPNEKVLPKHSLLYEYFTVYNELTKVKYVTEGMRKPAFLSGEQKKAIVDLLFKTNRKVTVKQLKEDYFKKIECFDSVEISGVEDRFNASLGTYHDLLKIIKDKDFLDNEENEDILEDIVLTLTLFEDREMIEERLKTYAHLFDDKVMKQLKRRRYTGWGRLSRKLINGIRDKQSGKTILDFLKSDGFANRNFMQLIHDDSLTFKEDIQKAQVSGQGDSLHEHIANLAGSPAIKKGILQTVKVVDELVKVMGRHKPENIVIEMARENQTTQKGQKNSRERMKRIEEGIKELGSQILKEHPVENTQLQNEKLYLYYLQNGRDMYVDQELDINRLSDYDVDHIVPQSFLKDDSIDNKVLTRSDKARGKSDNVPSEEVVKKMKNYWRQLLNAKLITQRKFDNLTKAERGGLSELDKAGFIKRQLVETRQITKHVAQILDSRMNTKYDENDKLIREVKVITLKSKLVSDFRKDFQFYKVREINNYHHAHDAYLNAVVGTALIKKYPKLESEFVYGDYKVYDVRKMIAKSEQEIGKATAKYFFYSNIMNFFKTEITLANGEIRKRPLIETNGETGEIVWDKGRDFATVRKVLSMPQVNIVKKTEVQTGGFSKESILPKRNSDKLIARKKDWDPKKYGGFDSPTVAYSVLVVAKVEKGKSKKLKSVKELLGITIMERSSFEKNPIDFLEAKGYKEVKKDLIIKLPKYSLFELENGRKRMLASAGELQKGNELALPSKYVNFLYLASHYEKLKGSPEDNEQKQLFVEQHKHYLDEIIEQISEFSKRVILADANLDKVLSAYNKHRDKPIREQAENIIHLFTLTNLGAPAAFKYFDTTIDRKRYTSTKEVLDATLIHQSITGLYETRIDLSQLGGDGGPAPAPGGVLNLEEEYRLHEKPVPSSIDPSWLQLFPTVWAERAGMGLANQVPPVVVELRSGASPVAVRQYPMSKEAREGIRPHIQRFLDLGVLVPCQSPWNTPLLPVKKPGTNDYRPVQDLREINKRVQDIHPTVPNPYNLLSSLPPSHTWYSVLDLKDAFFCLKLHPNSQPLFAFEWRDPEKGNTGQLTWTRLPQGFKNSPTLFNEALHRDLAPFRALNPQVVLLQYVDDLLVAAPTYRDCKEGTQKLLQELSKLGYRVSAKKAQLCQKEVTYLGYLLKEGKRWLTPARKATVMKIPPPTTPRQVREFLGKAGFCRLFIPGFASLAAPLYPLTKPSIPFIWTEEHQKAFDRIKEALLSAPALALPDLTKPFTLYVDERAGVARGVLTQTLGPWRRPVAYLSKKLDPVASGWPTCLKAVAAVALLLKDADKLTLGQNVTVIASHSLESIVRQPPDRWMTNARMTHYQSLLLNERVSFAPPAVLNPATLLPVESEATPVHRCSEILAEETGTRRDLKDQPLPGVPAWYTDGSSFIAEGKRRAGAAIVDGKRTVWASSLPEGTSAQKAELVALTQALRLAEGKDINIYTDSRYAFATAHIHGAIYKQRGWLTSAGKDIKNKEEILALLEAIHLPKRVAIIHCPGHQKGNDPVATGNRRADEAAKQAALSTRVLAETTKPAGKRTADGSEFEKRTADGSEFESPKKKAKVE

SEQ ID NO: 905 - protein, 2094 aa, synthetic construct
MPAAKRVKLDGGDKKYSIGLDIGTNSVGWAVITDEYKVPSKKFKVLGNTDRHSIKKNLIGALLFDSGETAEATRLKRTARRRYTRRKNRICYLQEIFSNEMAKVDDSFFHRLEESFLVEEDKKHERHPIFGNIVDEVAYHEKYPTIYHLRKKLVDSTDKADLRLIYLALAHMIKFRGHFLIEGDLNPDNSDVDKLFIQLVQTYNQLFEENPINASGVDAKAILSARLSKSRRLENLIAQLPGEKKNGLFGNLIALSLGLTPNFKSNFDLAEDAKLQLSKDTYDDDLDNLLAQIGDQYADLFLAAKNLSDAILLSDILRVNTEITKAPLSASMIKRYDEHHQDLTLLKALVRQQLPEKYKEIFFDQSKNGYAGYIDGGASQEEFYKFIKPILEKMDGTEELLVKLNREDLLRKQRTFDNGSIPHQIHLGELHAILRRQEDFYPFLKDNREKIEKILTFRIPYYVGPLARGNSRFAWMTRKSEETITPWNFEEVVDKGASAQSFIERMTNFDKNLPNEKVLPKHSLLYEYFTVYNELTKVKYVTEGMRKPAFLSGEQKKAIVDLLFKTNRKVTVKQLKEDYFKKIECFDSVEISGVEDRFNASLGTYHDLLKIIKDKDFLDNEENEDILEDIVLTLTLFEDREMIEERLKTYAHLFDDKVMKQLKRRRYTGWGRLSRKLINGIRDKQSGKTILDFLKSDGFANRNFMQLIHDDSLTFKEDIQKAQVSGQGDSLHEHIANLAGSPAIKKGILQTVKVVDELVKVMGRHKPENIVIEMARENQTTQKGQKNSRERMKRIEEGIKELGSQILKEHPVENTQLQNEKLYLYYLQNGRDMYVDQELDINRLSDYDVDHIVPQSFLKDDSIDNKVLTRSDKARGKSDNVPSEEVVKKMKNYWRQLLNAKLITQRKFDNLTKAERGGLSELDKAGFIKRQLVETRQITKHVAQILDSRMNTKYDENDKLIREVKVITLKSKLVSDFRKDFQFYKVREINNYHHAHDAYLNAVVGTALIKKYPKLESEFVYGDYKVYDVRKMIAKSEQEIGKATAKYFFYSNIMNFFKTEITLANGEIRKRPLIETNGETGEIVWDKGRDFATVRKVLSMPQVNIVKKTEVQTGGFSKESILPKRNSDKLIARKKDWDPKKYGGFDSPTVAYSVLVVAKVEKGKSKKLKSVKELLGITIMERSSFEKNPIDFLEAKGYKEVKKDLIIKLPKYSLFELENGRKRMLASAGELQKGNELALPSKYVNFLYLASHYEKLKGSPEDNEQKQLFVEQHKHYLDEIIEQISEFSKRVILADANLDKVLSAYNKHRDKPIREQAENIIHLFTLTNLGAPAAFKYFDTTIDRKRYTSTKEVLDATLIHQSITGLYETRIDLSQLGGDGGEAAAKGGSGSSGGVLNLEEEYRLHEKPVPSSIDPSWLQLFPTVWAERAGMGLANQVPPVVVELRSGASPVAVRQYPMSKEAREGIRPHIQRFLDLGVLVPCQSPWNTPLLPVKKPGTNDYRPVQDLREINKRVQDIHPTVPNPYNLLSSLPPSHTWYSVLDLKDAFFCLKLHPNSQPLFAFEWRDPEKGNTGQLTWTRLPQGFKNSPTLFNEALHRDLAPFRALNPQVVLLQYVDDLLVAAPTYRDCKEGTQKLLQELSKLGYRVSAKKAQLCQKEVTYLGYLLKEGKRWLTPARKATVMKIPPPTTPRQVREFLGKAGFCRLFIPGFASLAAPLYPLTKPSIPFIWTEEHQKAFDRIKEALLSAPALALPDLTKPFTLYVDERAGVARGVLTQTLGPWRRPVAYLSKKLDPVASGWPTCLKAVAAVALLLKDADKLTLGQNVTVIASHSLESIVRQPPDRWMTNARMTHYQSLLLNERVSFAPPAVLNPATLLPVESEATPVHRCSEILAEETGTRRDLKDQPLPGVPAWYTDGSSFIAEGKRRAGAAIVDGKRTVWASSLPEGTSAQKAELVALTQALRLAEGKDINIYTDSRYAFATAHIHGAIYKQRGWLTSAGKDIKNKEEILALLEAIHLPKRVAIIHCPGHQKGNDPVATGNRRADEAAKQAALSTRVLAETTKPAGKRTADGSEFEKRTADGSEFESPKKKAKVE

SEQ ID NO: 906 - protein, 2089 aa, synthetic construct
MPAAKRVKLDGGDKKYSIGLDIGTNSVGWAVITDEYKVPSKKFKVLGNTDRHSIKKNLIGALLFDSGETAEATRLKRTARRRYTRRKNRICYLQEIFSNEMAKVDDSFFHRLEESFLVEEDKKHERHPIFGNIVDEVAYHEKYPTIYHLRKKLVDSTDKADLRLIYLALAHMIKFRGHFLIEGDLNPDNSDVDKLFIQLVQTYNQLFEENPINASGVDAKAILSARLSKSRRLENLIAQLPGEKKNGLFGNLIALSLGLTPNFKSNFDLAEDAKLQLSKDTYDDDLDNLLAQIGDQYADLFLAAKNLSDAILLSDILRVNTEITKAPLSASMIKRYDEHHQDLTLLKALVRQQLPEKYKEIFFDQSKNGYAGYIDGGASQEEFYKFIKPILEKMDGTEELLVKLNREDLLRKQRTFDNGSIPHQIHLGELHAILRRQEDFYPFLKDNREKIEKILTFRIPYYVGPLARGNSRFAWMTRKSEETITPWNFEEVVDKGASAQSFIERMTNFDKNLPNEKVLPKHSLLYEYFTVYNELTKVKYVTEGMRKPAFLSGEQKKAIVDLLFKTNRKVTVKQLKEDYFKKIECFDSVEISGVEDRFNASLGTYHDLLKIIKDKDFLDNEENEDILEDIVLTLTLFEDREMIEERLKTYAHLFDDKVMKQLKRRRYTGWGRLSRKLINGIRDKQSGKTILDFLKSDGFANRNFMQLIHDDSLTFKEDIQKAQVSGQGDSLHEHIANLAGSPAIKKGILQTVKVVDELVKVMGRHKPENIVIEMARENQTTQKGQKNSRERMKRIEEGIKELGSQILKEHPVENTQLQNEKLYLYYLQNGRDMYVDQELDINRLSDYDVDHIVPQSFLKDDSIDNKVLTRSDKARGKSDNVPSEEVVKKMKNYWRQLLNAKLITQRKFDNLTKAERGGLSELDKAGFIKRQLVETRQITKHVAQILDSRMNTKYDENDKLIREVKVITLKSKLVSDFRKDFQFYKVREINNYHHAHDAYLNAVVGTALIKKYPKLESEFVYGDYKVYDVRKMIAKSEQEIGKATAKYFFYSNIMNFFKTEITLANGEIRKRPLIETNGETGEIVWDKGRDFATVRKVLSMPQVNIVKKTEVQTGGFSKESILPKRNSDKLIARKKDWDPKKYGGFDSPTVAYSVLVVAKVEKGKSKKLKSVKELLGITIMERSSFEKNPIDFLEAKGYKEVKKDLIIKLPKYSLFELENGRKRMLASAGELQKGNELALPSKYVNFLYLASHYEKLKGSPEDNEQKQLFVEQHKHYLDEIIEQISEFSKRVILADANLDKVLSAYNKHRDKPIREQAENIIHLFTLTNLGAPAAFKYFDTTIDRKRYTSTKEVLDATLIHQSITGLYETRIDLSQLGGDGGGGSGGSGGVLNLEEEYRLHEKPVPSSIDPSWLQLFPTVWAERAGMGLANQVPPVVVELRSGASPVAVRQYPMSKEAREGIRPHIQRFLDLGVLVPCQSPWNTPLLPVKKPGTNDYRPVQDLREINKRVQDIHPTVPNPYNLLSSLPPSHTWYSVLDLKDAFFCLKLHPNSQPLFAFEWRDPEKGNTGQLTWTRLPQGFKNSPTLFNEALHRDLAPFRALNPQVVLLQYVDDLLVAAPTYRDCKEGTQKLLQELSKLGYRVSAKKAQLCQKEVTYLGYLLKEGKRWLTPARKATVMKIPPPTTPRQVREFLGKAGFCRLFIPGFASLAAPLYPLTKPSIPFIWTEEHQKAFDRIKEALLSAPALALPDLTKPFTLYVDERAGVARGVLTQTLGPWRRPVAYLSKKLDPVASGWPTCLKAVAAVALLLKDADKLTLGQNVTVIASHSLESIVRQPPDRWMTNARMTHYQSLLLNERVSFAPPAVLNPATLLPVESEATPVHRCSEILAEETGTRRDLKDQPLPGVPAWYTDGSSFIAEGKRRAGAAIVDGKRTVWASSLPEGTSAQKAELVALTQALRLAEGKDINIYTDSRYAFATAHIHGAIYKQRGWLTSAGKDIKNKEEILALLEAIHLPKRVAIIHCPGHQKGNDPVATGNRRADEAAKQAALSTRVLAETTKPAGKRTADGSEFEKRTADGSEFESPKKKAKVE

SEQ ID NO: 907 - protein, 2095 aa, synthetic construct
MPAAKRVKLDGGDKKYSIGLDIGTNSVGWAVITDEYKVPSKKFKVLGNTDRHSIKKNLIGALLFDSGETAEATRLKRTARRRYTRRKNRICYLQEIFSNEMAKVDDSFFHRLEESFLVEEDKKHERHPIFGNIVDEVAYHEKYPTIYHLRKKLVDSTDKADLRLIYLALAHMIKFRGHFLIEGDLNPDNSDVDKLFIQLVQTYNQLFEENPINASGVDAKAILSARLSKSRRLENLIAQLPGEKKNGLFGNLIALSLGLTPNFKSNFDLAEDAKLQLSKDTYDDDLDNLLAQIGDQYADLFLAAKNLSDAILLSDILRVNTEITKAPLSASMIKRYDEHHQDLTLLKALVRQQLPEKYKEIFFDQSKNGYAGYIDGGASQEEFYKFIKPILEKMDGTEELLVKLNREDLLRKQRTFDNGSIPHQIHLGELHAILRRQEDFYPFLKDNREKIEKILTFRIPYYVGPLARGNSRFAWMTRKSEETITPWNFEEVVDKGASAQSFIERMTNFDKNLPNEKVLPKHSLLYEYFTVYNELTKVKYVTEGMRKPAFLSGEQKKAIVDLLFKTNRKVTVKQLKEDYFKKIECFDSVEISGVEDRFNASLGTYHDLLKIIKDKDFLDNEENEDILEDIVLTLTLFEDREMIEERLKTYAHLFDDKVMKQLKRRRYTGWGRLSRKLINGIRDKQSGKTILDFLKSDGFANRNFMQLIHDDSLTFKEDIQKAQVSGQGDSLHEHIANLAGSPAIKKGILQTVKVVDELVKVMGRHKPENIVIEMARENQTTQKGQKNSRERMKRIEEGIKELGSQILKEHPVENTQLQNEKLYLYYLQNGRDMYVDQELDINRLSDYDVDHIVPQSFLKDDSIDNKVLTRSDKARGKSDNVPSEEVVKKMKNYWRQLLNAKLITQRKFDNLTKAERGGLSELDKAGFIKRQLVETRQITKHVAQILDSRMNTKYDENDKLIREVKVITLKSKLVSDFRKDFQFYKVREINNYHHAHDAYLNAVVGTALIKKYPKLESEFVYGDYKVYDVRKMIAKSEQEIGKATAKYFFYSNIMNFFKTEITLANGEIRKRPLIETNGETGEIVWDKGRDFATVRKVLSMPQVNIVKKTEVQTGGFSKESILPKRNSDKLIARKKDWDPKKYGGFDSPTVAYSVLVVAKVEKGKSKKLKSVKELLGITIMERSSFEKNPIDFLEAKGYKEVKKDLIIKLPKYSLFELENGRKRMLASAGELQKGNELALPSKYVNFLYLASHYEKLKGSPEDNEQKQLFVEQHKHYLDEIIEQISEFSKRVILADANLDKVLSAYNKHRDKPIREQAENIIHLFTLTNLGAPAAFKYFDTTIDRKRYTSTKEVLDATLIHQSITGLYETRIDLSQLGGDGGGSAGSAAGSGEFGGVLNLEEEYRLHEKPVPSSIDPSWLQLFPTVWAERAGMGLANQVPPVVVELRSGASPVAVRQYPMSKEAREGIRPHIQRFLDLGVLVPCQSPWNTPLLPVKKPGTNDYRPVQDLREINKRVQDIHPTVPNPYNLLSSLPPSHTWYSVLDLKDAFFCLKLHPNSQPLFAFEWRDPEKGNTGQLTWTRLPQGFKNSPTLFNEALHRDLAPFRALNPQVVLLQYVDDLLVAAPTYRDCKEGTQKLLQELSKLGYRVSAKKAQLCQKEVTYLGYLLKEGKRWLTPARKATVMKIPPPTTPRQVREFLGKAGFCRLFIPGFASLAAPLYPLTKPSIPFIWTEEHQKAFDRIKEALLSAPALALPDLTKPFTLYVDERAGVARGVLTQTLGPWRRPVAYLSKKLDPVASGWPTCLKAVAAVALLLKDADKLTLGQNVTVIASHSLESIVRQPPDRWMTNARMTHYQSLLLNERVSFAPPAVLNPATLLPVESEATPVHRCSEILAEETGTRRDLKDQPLPGVPAWYTDGSSFIAEGKRRAGAAIVDGKRTVWASSLPEGTSAQKAELVALTQALRLAEGKDINIYTDSRYAFATAHIHGAIYKQRGWLTSAGKDIKNKEEILALLEAIHLPKRVAIIHCPGHQKGNDPVATGNRRADEAAKQAALSTRVLAETTKPAGKRTADGSEFEKRTADGSEFESPKKKAKVE

SEQ ID NO: 908 - protein, 2092 aa, synthetic construct
MPAAKRVKLDGGDKKYSIGLDIGTNSVGWAVITDEYKVPSKKFKVLGNTDRHSIKKNLIGALLFDSGETAEATRLKRTARRRYTRRKNRICYLQEIFSNEMAKVDDSFFHRLEESFLVEEDKKHERHPIFGNIVDEVAYHEKYPTIYHLRKKLVDSTDKADLRLIYLALAHMIKFRGHFLIEGDLNPDNSDVDKLFIQLVQTYNQLFEENPINASGVDAKAILSARLSKSRRLENLIAQLPGEKKNGLFGNLIALSLGLTPNFKSNFDLAEDAKLQLSKDTYDDDLDNLLAQIGDQYADLFLAAKNLSDAILLSDILRVNTEITKAPLSASMIKRYDEHHQDLTLLKALVRQQLPEKYKEIFFDQSKNGYAGYIDGGASQEEFYKFIKPILEKMDGTEELLVKLNREDLLRKQRTFDNGSIPHQIHLGELHAILRRQEDFYPFLKDNREKIEKILTFRIPYYVGPLARGNSRFAWMTRKSEETITPWNFEEVVDKGASAQSFIERMTNFDKNLPNEKVLPKHSLLYEYFTVYNELTKVKYVTEGMRKPAFLSGEQKKAIVDLLFKTNRKVTVKQLKEDYFKKIECFDSVEISGVEDRFNASLGTYHDLLKIIKDKDFLDNEENEDILEDIVLTLTLFEDREMIEERLKTYAHLFDDKVMKQLKRRRYTGWGRLSRKLINGIRDKQSGKTILDFLKSDGFANRNFMQLIHDDSLTFKEDIQKAQVSGQGDSLHEHIANLAGSPAIKKGILQTVKVVDELVKVMGRHKPENIVIEMARENQTTQKGQKNSRERMKRIEEGIKELGSQILKEHPVENTQLQNEKLYLYYLQNGRDMYVDQELDINRLSDYDVDHIVPQSFLKDDSIDNKVLTRSDKARGKSDNVPSEEVVKKMKNYWRQLLNAKLITQRKFDNLTKAERGGLSELDKAGFIKRQLVETRQITKHVAQILDSRMNTKYDENDKLIREVKVITLKSKLVSDFRKDFQFYKVREINNYHHAHDAYLNAVVGTALIKKYPKLESEFVYGDYKVYDVRKMIAKSEQEIGKATAKYFFYSNIMNFFKTEITLANGEIRKRPLIETNGETGEIVWDKGRDFATVRKVLSMPQVNIVKKTEVQTGGFSKESILPKRNSDKLIARKKDWDPKKYGGFDSPTVAYSVLVVAKVEKGKSKKLKSVKELLGITIMERSSFEKNPIDFLEAKGYKEVKKDLIIKLPKYSLFELENGRKRMLASAGELQKGNELALPSKYVNFLYLASHYEKLKGSPEDNEQKQLFVEQHKHYLDEIIEQISEFSKRVILADANLDKVLSAYNKHRDKPIREQAENIIHLFTLTNLGAPAAFKYFDTTIDRKRYTSTKEVLDATLIHQSITGLYETRIDLSQLGGDGGGGSGGGPAPGGVLNLEEEYRLHEKPVPSSIDPSWLQLFPTVWAERAGMGLANQVPPVVVELRSGASPVAVRQYPMSKEAREGIRPHIQRFLDLGVLVPCQSPWNTPLLPVKKPGTNDYRPVQDLREINKRVQDIHPTVPNPYNLLSSLPPSHTWYSVLDLKDAFFCLKLHPNSQPLFAFEWRDPEKGNTGQLTWTRLPQGFKNSPTLFNEALHRDLAPFRALNPQVVLLQYVDDLLVAAPTYRDCKEGTQKLLQELSKLGYRVSAKKAQLCQKEVTYLGYLLKEGKRWLTPARKATVMKIPPPTTPRQVREFLGKAGFCRLFIPGFASLAAPLYPLTKPSIPFIWTEEHQKAFDRIKEALLSAPALALPDLTKPFTLYVDERAGVARGVLTQTLGPWRRPVAYLSKKLDPVASGWPTCLKAVAAVALLLKDADKLTLGQNVTVIASHSLESIVRQPPDRWMTNARMTHYQSLLLNERVSFAPPAVLNPATLLPVESEATPVHRCSEILAEETGTRRDLKDQPLPGVPAWYTDGSSFIAEGKRRAGAAIVDGKRTVWASSLPEGTSAQKAELVALTQALRLAEGKDINIYTDSRYAFATAHIHGAIYKQRGWLTSAGKDIKNKEEILALLEAIHLPKRVAIIHCPGHQKGNDPVATGNRRADEAAKQAALSTRVLAETTKPAGKRTADGSEFEKRTADGSEFESPKKKAKVE

SEQ ID NO: 909 - protein, 2092 aa, synthetic construct
MPAAKRVKLDGGDKKYSIGLDIGTNSVGWAVITDEYKVPSKKFKVLGNTDRHSIKKNLIGALLFDSGETAEATRLKRTARRRYTRRKNRICYLQEIFSNEMAKVDDSFFHRLEESFLVEEDKKHERHPIFGNIVDEVAYHEKYPTIYHLRKKLVDSTDKADLRLIYLALAHMIKFRGHFLIEGDLNPDNSDVDKLFIQLVQTYNQLFEENPINASGVDAKAILSARLSKSRRLENLIAQLPGEKKNGLFGNLIALSLGLTPNFKSNFDLAEDAKLQLSKDTYDDDLDNLLAQIGDQYADLFLAAKNLSDAILLSDILRVNTEITKAPLSASMIKRYDEHHQDLTLLKALVRQQLPEKYKEIFFDQSKNGYAGYIDGGASQEEFYKFIKPILEKMDGTEELLVKLNREDLLRKQRTFDNGSIPHQIHLGELHAILRRQEDFYPFLKDNREKIEKILTFRIPYYVGPLARGNSRFAWMTRKSEETITPWNFEEVVDKGASAQSFIERMTNFDKNLPNEKVLPKHSLLYEYFTVYNELTKVKYVTEGMRKPAFLSGEQKKAIVDLLFKTNRKVTVKQLKEDYFKKIECFDSVEISGVEDRFNASLGTYHDLLKIIKDKDFLDNEENEDILEDIVLTLTLFEDREMIEERLKTYAHLFDDKVMKQLKRRRYTGWGRLSRKLINGIRDKQSGKTILDFLKSDGFANRNFMQLIHDDSLTFKEDIQKAQVSGQGDSLHEHIANLAGSPAIKKGILQTVKVVDELVKVMGRHKPENIVIEMARENQTTQKGQKNSRERMKRIEEGIKELGSQILKEHPVENTQLQNEKLYLYYLQNGRDMYVDQELDINRLSDYDVDHIVPQSFLKDDSIDNKVLTRSDKARGKSDNVPSEEVVKKMKNYWRQLLNAKLITQRKFDNLTKAERGGLSELDKAGFIKRQLVETRQITKHVAQILDSRMNTKYDENDKLIREVKVITLKSKLVSDFRKDFQFYKVREINNYHHAHDAYLNAVVGTALIKKYPKLESEFVYGDYKVYDVRKMIAKSEQEIGKATAKYFFYSNIMNFFKTEITLANGEIRKRPLIETNGETGEIVWDKGRDFATVRKVLSMPQVNIVKKTEVQTGGFSKESILPKRNSDKLIARKKDWDPKKYGGFDSPTVAYSVLVVAKVEKGKSKKLKSVKELLGITIMERSSFEKNPIDFLEAKGYKEVKKDLIIKLPKYSLFELENGRKRMLASAGELQKGNELALPSKYVNFLYLASHYEKLKGSPEDNEQKQLFVEQHKHYLDEIIEQISEFSKRVILADANLDKVLSAYNKHRDKPIREQAENIIHLFTLTNLGAPAAFKYFDTTIDRKRYTSTKEVLDATLIHQSITGLYETRIDLSQLGGDGGGGSGSSGGGGGVLNLEEEYRLHEKPVPSSIDPSWLQLFPTVWAERAGMGLANQVPPVVVELRSGASPVAVRQYPMSKEAREGIRPHIQRFLDLGVLVPCQSPWNTPLLPVKKPGTNDYRPVQDLREINKRVQDIHPTVPNPYNLLSSLPPSHTWYSVLDLKDAFFCLKLHPNSQPLFAFEWRDPEKGNTGQLTWTRLPQGFKNSPTLFNEALHRDLAPFRALNPQVVLLQYVDDLLVAAPTYRDCKEGTQKLLQELSKLGYRVSAKKAQLCQKEVTYLGYLLKEGKRWLTPARKATVMKIPPPTTPRQVREFLGKAGFCRLFIPGFASLAAPLYPLTKPSIPFIWTEEHQKAFDRIKEALLSAPALALPDLTKPFTLYVDERAGVARGVLTQTLGPWRRPVAYLSKKLDPVASGWPTCLKAVAAVALLLKDADKLTLGQNVTVIASHSLESIVRQPPDRWMTNARMTHYQSLLLNERVSFAPPAVLNPATLLPVESEATPVHRCSEILAEETGTRRDLKDQPLPGVPAWYTDGSSFIAEGKRRAGAAIVDGKRTVWASSLPEGTSAQKAELVALTQALRLAEGKDINIYTDSRYAFATAHIHGAIYKQRGWLTSAGKDIKNKEEILALLEAIHLPKRVAIIHCPGHQKGNDPVATGNRRADEAAKQAALSTRVLAETTKPAGKRTADGSEFEKRTADGSEFESPKKKAKVE

SEQ ID NO: 910 - protein, 2094 aa, synthetic construct
MPAAKRVKLDGGDKKYSIGLDIGTNSVGWAVITDEYKVPSKKFKVLGNTDRHSIKKNLIGALLFDSGETAEATRLKRTARRRYTRRKNRICYLQEIFSNEMAKVDDSFFHRLEESFLVEEDKKHERHPIFGNIVDEVAYHEKYPTIYHLRKKLVDSTDKADLRLIYLALAHMIKFRGHFLIEGDLNPDNSDVDKLFIQLVQTYNQLFEENPINASGVDAKAILSARLSKSRRLENLIAQLPGEKKNGLFGNLIALSLGLTPNFKSNFDLAEDAKLQLSKDTYDDDLDNLLAQIGDQYADLFLAAKNLSDAILLSDILRVNTEITKAPLSASMIKRYDEHHQDLTLLKALVRQQLPEKYKEIFFDQSKNGYAGYIDGGASQEEFYKFIKPILEKMDGTEELLVKLNREDLLRKQRTFDNGSIPHQIHLGELHAILRRQEDFYPFLKDNREKIEKILTFRIPYYVGPLARGNSRFAWMTRKSEETITPWNFEEVVDKGASAQSFIERMTNFDKNLPNEKVLPKHSLLYEYFTVYNELTKVKYVTEGMRKPAFLSGEQKKAIVDLLFKTNRKVTVKQLKEDYFKKIECFDSVEISGVEDRFNASLGTYHDLLKIIKDKDFLDNEENEDILEDIVLTLTLFEDREMIEERLKTYAHLFDDKVMKQLKRRRYTGWGRLSRKLINGIRDKQSGKTILDFLKSDGFANRNFMQLIHDDSLTFKEDIQKAQVSGQGDSLHEHIANLAGSPAIKKGILQTVKVVDELVKVMGRHKPENIVIEMARENQTTQKGQKNSRERMKRIEEGIKELGSQILKEHPVENTQLQNEKLYLYYLQNGRDMYVDQELDINRLSDYDVDHIVPQSFLKDDSIDNKVLTRSDKARGKSDNVPSEEVVKKMKNYWRQLLNAKLITQRKFDNLTKAERGGLSELDKAGFIKRQLVETRQITKHVAQILDSRMNTKYDENDKLIREVKVITLKSKLVSDFRKDFQFYKVREINNYHHAHDAYLNAVVGTALIKKYPKLESEFVYGDYKVYDVRKMIAKSEQEIGKATAKYFFYSNIMNFFKTEITLANGEIRKRPLIETNGETGEIVWDKGRDFATVRKVLSMPQVNIVKKTEVQTGGFSKESILPKRNSDKLIARKKDWDPKKYGGFDSPTVAYSVLVVAKVEKGKSKKLKSVKELLGITIMERSSFEKNPIDFLEAKGYKEVKKDLIIKLPKYSLFELENGRKRMLASAGELQKGNELALPSKYVNFLYLASHYEKLKGSPEDNEQKQLFVEQHKHYLDEIIEQISEFSKRVILADANLDKVLSAYNKHRDKPIREQAENIIHLFTLTNLGAPAAFKYFDTTIDRKRYTSTKEVLDATLIHQSITGLYETRIDLSQLGGDGGGSSEAAAKGGGGGVLNLEEEYRLHEKPVPSSIDPSWLQLFPTVWAERAGMGLANQVPPVVVELRSGASPVAVRQYPMSKEAREGIRPHIQRFLDLGVLVPCQSPWNTPLLPVKKPGTNDYRPVQDLREINKRVQDIHPTVPNPYNLLSSLPPSHTWYSVLDLKDAFFCLKLHPNSQPLFAFEWRDPEKGNTGQLTWTRLPQGFKNSPTLFNEALHRDLAPFRALNPQVVLLQYVDDLLVAAPTYRDCKEGTQKLLQELSKLGYRVSAKKAQLCQKEVTYLGYLLKEGKRWLTPARKATVMKIPPPTTPRQVREFLGKAGFCRLFIPGFASLAAPLYPLTKPSIPFIWTEEHQKAFDRIKEALLSAPALALPDLTKPFTLYVDERAGVARGVLTQTLGPWRRPVAYLSKKLDPVASGWPTCLKAVAAVALLLKDADKLTLGQNVTVIASHSLESIVRQPPDRWMTNARMTHYQSLLLNERVSFAPPAVLNPATLLPVESEATPVHRCSEILAEETGTRRDLKDQPLPGVPAWYTDGSSFIAEGKRRAGAAIVDGKRTVWASSLPEGTSAQKAELVALTQALRLAEGKDINIYTDSRYAFATAHIHGAIYKQRGWLTSAGKDIKNKEEILALLEAIHLPKRVAIIHCPGHQKGNDPVATGNRRADEAAKQAALSTRVLAETTKPAGKRTADGSEFEKRTADGSEFESPKKKAKVE

SEQ ID NO: 911 - protein, 2098 aa, synthetic construct
MPAAKRVKLDGGDKKYSIGLDIGTNSVGWAVITDEYKVPSKKFKVLGNTDRHSIKKNLIGALLFDSGETAEATRLKRTARRRYTRRKNRICYLQEIFSNEMAKVDDSFFHRLEESFLVEEDKKHERHPIFGNIVDEVAYHEKYPTIYHLRKKLVDSTDKADLRLIYLALAHMIKFRGHFLIEGDLNPDNSDVDKLFIQLVQTYNQLFEENPINASGVDAKAILSARLSKSRRLENLIAQLPGEKKNGLFGNLIALSLGLTPNFKSNFDLAEDAKLQLSKDTYDDDLDNLLAQIGDQYADLFLAAKNLSDAILLSDILRVNTEITKAPLSASMIKRYDEHHQDLTLLKALVRQQLPEKYKEIFFDQSKNGYAGYIDGGASQEEFYKFIKPILEKMDGTEELLVKLNREDLLRKQRTFDNGSIPHQIHLGELHAILRRQEDFYPFLKDNREKIEKILTFRIPYYVGPLARGNSRFAWMTRKSEETITPWNFEEVVDKGASAQSFIERMTNFDKNLPNEKVLPKHSLLYEYFTVYNELTKVKYVTEGMRKPAFLSGEQKKAIVDLLFKTNRKVTVKQLKEDYFKKIECFDSVEISGVEDRFNASLGTYHDLLKIIKDKDFLDNEENEDILEDIVLTLTLFEDREMIEERLKTYAHLFDDKVMKQLKRRRYTGWGRLSRKLINGIRDKQSGKTILDFLKSDGFANRNFMQLIHDDSLTFKEDIQKAQVSGQGDSLHEHIANLAGSPAIKKGILQTVKVVDELVKVMGRHKPENIVIEMARENQTTQKGQKNSRERMKRIEEGIKELGSQILKEHPVENTQLQNEKLYLYYLQNGRDMYVDQELDINRLSDYDVDHIVPQSFLKDDSIDNKVLTRSDKARGKSDNVPSEEVVKKMKNYWRQLLNAKLITQRKFDNLTKAERGGLSELDKAGFIKRQLVETRQITKHVAQILDSRMNTKYDENDKLIREVKVITLKSKLVSDFRKDFQFYKVREINNYHHAHDAYLNAVVGTALIKKYPKLESEFVYGDYKVYDVRKMIAKSEQEIGKATAKYFFYSNIMNFFKTEITLANGEIRKRPLIETNGETGEIVWDKGRDFATVRKVLSMPQVNIVKKTEVQTGGFSKESILPKRNSDKLIARKKDWDPKKYGGFDSPTVAYSVLVVAKVEKGKSKKLKSVKELLGITIMERSSFEKNPIDFLEAKGYKEVKKDLIIKLPKYSLFELENGRKRMLASAGELQKGNELALPSKYVNFLYLASHYEKLKGSPEDNEQKQLFVEQHKHYLDEIIEQISEFSKRVILADANLDKVLSAYNKHRDKPIREQAENIIHLFTLTNLGAPAAFKYFDTTIDRKRYTSTKEVLDATLIHQSITGLYETRIDLSQLGGDGGGGGGSEAAAKGGGGSGGVLNLEEEYRLHEKPVPSSIDPSWLQLFPTVWAERAGMGLANQVPPVVVELRSGASPVAVRQYPMSKEAREGIRPHIQRFLDLGVLVPCQSPWNTPLLPVKKPGTNDYRPVQDLREINKRVQDIHPTVPNPYNLLSSLPPSHTWYSVLDLKDAFFCLKLHPNSQPLFAFEWRDPEKGNTGQLTWTRLPQGFKNSPTLFNEALHRDLAPFRALNPQVVLLQYVDDLLVAAPTYRDCKEGTQKLLQELSKLGYRVSAKKAQLCQKEVTYLGYLLKEGKRWLTPARKATVMKIPPPTTPRQVREFLGKAGFCRLFIPGFASLAAPLYPLTKPSIPFIWTEEHQKAFDRIKEALLSAPALALPDLTKPFTLYVDERAGVARGVLTQTLGPWRRPVAYLSKKLDPVASGWPTCLKAVAAVALLLKDADKLTLGQNVTVIASHSLESIVRQPPDRWMTNARMTHYQSLLLNERVSFAPPAVLNPATLLPVESEATPVHRCSEILAEETGTRRDLKDQPLPGVPAWYTDGSSFIAEGKRRAGAAIVDGKRTVWASSLPEGTSAQKAELVALTQALRLAEGKDINIYTDSRYAFATAHIHGAIYKQRGWLTSAGKDIKNKEEILALLEAIHLPKRVAIIHCPGHQKGNDPVATGNRRADEAAKQAALSTRVLAETTKPAGKRTADGSEFEKRTADGSEFESPKKKAKVE

SEQ ID NO: 912 - protein, 2094 aa, synthetic construct
MPAAKRVKLDGGDKKYSIGLDIGTNSVGWAVITDEYKVPSKKFKVLGNTDRHSIKKNLIGALLFDSGETAEATRLKRTARRRYTRRKNRICYLQEIFSNEMAKVDDSFFHRLEESFLVEEDKKHERHPIFGNIVDEVAYHEKYPTIYHLRKKLVDSTDKADLRLIYLALAHMIKFRGHFLIEGDLNPDNSDVDKLFIQLVQTYNQLFEENPINASGVDAKAILSARLSKSRRLENLIAQLPGEKKNGLFGNLIALSLGLTPNFKSNFDLAEDAKLQLSKDTYDDDLDNLLAQIGDQYADLFLAAKNLSDAILLSDILRVNTEITKAPLSASMIKRYDEHHQDLTLLKALVRQQLPEKYKEIFFDQSKNGYAGYIDGGASQEEFYKFIKPILEKMDGTEELLVKLNREDLLRKQRTFDNGSIPHQIHLGELHAILRRQEDFYPFLKDNREKIEKILTFRIPYYVGPLARGNSRFAWMTRKSEETITPWNFEEVVDKGASAQSFIERMTNFDKNLPNEKVLPKHSLLYEYFTVYNELTKVKYVTEGMRKPAFLSGEQKKAIVDLLFKTNRKVTVKQLKEDYFKKIECFDSVEISGVEDRFNASLGTYHDLLKIIKDKDFLDNEENEDILEDIVLTLTLFEDREMIEERLKTYAHLFDDKVMKQLKRRRYTGWGRLSRKLINGIRDKQSGKTILDFLKSDGFANRNFMQLIHDDSLTFKEDIQKAQVSGQGDSLHEHIANLAGSPAIKKGILQTVKVVDELVKVMGRHKPENIVIEMARENQTTQKGQKNSRERMKRIEEGIKELGSQILKEHPVENTQLQNEKLYLYYLQNGRDMYVDQELDINRLSDYDVDHIVPQSFLKDDSIDNKVLTRSDKARGKSDNVPSEEVVKKMKNYWRQLLNAKLITQRKFDNLTKAERGGLSELDKAGFIKRQLVETRQITKHVAQILDSRMNTKYDENDKLIREVKVITLKSKLVSDFRKDFQFYKVREINNYHHAHDAYLNAVVGTALIKKYPKLESEFVYGDYKVYDVRKMIAKSEQEIGKATAKYFFYSNIMNFFKTEITLANGEIRKRPLIETNGETGEIVWDKGRDFATVRKVLSMPQVNIVKKTEVQTGGFSKESILPKRNSDKLIARKKDWDPKKYGGFDSPTVAYSVLVVAKVEKGKSKKLKSVKELLGITIMERSSFEKNPIDFLEAKGYKEVKKDLIIKLPKYSLFELENGRKRMLASAGELQKGNELALPSKYVNFLYLASHYEKLKGSPEDNEQKQLFVEQHKHYLDEIIEQISEFSKRVILADANLDKVLSAYNKHRDKPIREQAENIIHLFTLTNLGAPAAFKYFDTTIDRKRYTSTKEVLDATLIHQSITGLYETRIDLSQLGGDGGGGSEAAAKPAPGGVLNLEEEYRLHEKPVPSSIDPSWLQLFPTVWAERAGMGLANQVPPVVVELRSGASPVAVRQYPMSKEAREGIRPHIQRFLDLGVLVPCQSPWNTPLLPVKKPGTNDYRPVQDLREINKRVQDIHPTVPNPYNLLSSLPPSHTWYSVLDLKDAFFCLKLHPNSQPLFAFEWRDPEKGNTGQLTWTRLPQGFKNSPTLFNEALHRDLAPFRALNPQVVLLQYVDDLLVAAPTYRDCKEGTQKLLQELSKLGYRVSAKKAQLCQKEVTYLGYLLKEGKRWLTPARKATVMKIPPPTTPRQVREFLGKAGFCRLFIPGFASLAAPLYPLTKPSIPFIWTEEHQKAFDRIKEALLSAPALALPDLTKPFTLYVDERAGVARGVLTQTLGPWRRPVAYLSKKLDPVASGWPTCLKAVAAVALLLKDADKLTLGQNVTVIASHSLESIVRQPPDRWMTNARMTHYQSLLLNERVSFAPPAVLNPATLLPVESEATPVHRCSEILAEETGTRRDLKDQPLPGVPAWYTDGSSFIAEGKRRAGAAIVDGKRTVWASSLPEGTSAQKAELVALTQALRLAEGKDINIYTDSRYAFATAHIHGAIYKQRGWLTSAGKDIKNKEEILALLEAIHLPKRVAIIHCPGHQKGNDPVATGNRRADEAAKQAALSTRVLAETTKPAGKRTADGSEFEKRTADGSEFESPKKKAKVE

SEQ ID NO: 913 - protein, 2092 aa, synthetic construct
MPAAKRVKLDGGDKKYSIGLDIGTNSVGWAVITDEYKVPSKKFKVLGNTDRHSIKKNLIGALLFDSGETAEATRLKRTARRRYTRRKNRICYLQEIFSNEMAKVDDSFFHRLEESFLVEEDKKHERHPIFGNIVDEVAYHEKYPTIYHLRKKLVDSTDKADLRLIYLALAHMIKFRGHFLIEGDLNPDNSDVDKLFIQLVQTYNQLFEENPINASGVDAKAILSARLSKSRRLENLIAQLPGEKKNGLFGNLIALSLGLTPNFKSNFDLAEDAKLQLSKDTYDDDLDNLLAQIGDQYADLFLAAKNLSDAILLSDILRVNTEITKAPLSASMIKRYDEHHQDLTLLKALVRQQLPEKYKEIFFDQSKNGYAGYIDGGASQEEFYKFIKPILEKMDGTEELLVKLNREDLLRKQRTFDNGSIPHQIHLGELHAILRRQEDFYPFLKDNREKIEKILTFRIPYYVGPLARGNSRFAWMTRKSEETITPWNFEEVVDKGASAQSFIERMTNFDKNLPNEKVLPKHSLLYEYFTVYNELTKVKYVTEGMRKPAFLSGEQKKAIVDLLFKTNRKVTVKQLKEDYFKKIECFDSVEISGVEDRFNASLGTYHDLLKIIKDKDFLDNEENEDILEDIVLTLTLFEDREMIEERLKTYAHLFDDKVMKQLKRRRYTGWGRLSRKLINGIRDKQSGKTILDFLKSDGFANRNFMQLIHDDSLTFKEDIQKAQVSGQGDSLHEHIANLAGSPAIKKGILQTVKVVDELVKVMGRHKPENIVIEMARENQTTQKGQKNSRERMKRIEEGIKELGSQILKEHPVENTQLQNEKLYLYYLQNGRDMYVDQELDINRLSDYDVDHIVPQSFLKDDSIDNKVLTRSDKARGKSDNVPSEEVVKKMKNYWRQLLNAKLITQRKFDNLTKAERGGLSELDKAGFIKRQLVETRQITKHVAQILDSRMNTKYDENDKLIREVKVITLKSKLVSDFRKDFQFYKVREINNYHHAHDAYLNAVVGTALIKKYPKLESEFVYGDYKVYDVRKMIAKSEQEIGKATAKYFFYSNIMNFFKTEITLANGEIRKRPLIETNGETGEIVWDKGRDFATVRKVLSMPQVNIVKKTEVQTGGFSKESILPKRNSDKLIARKKDWDPKKYGGFDSPTVAYSVLVVAKVEKGKSKKLKSVKELLGITIMERSSFEKNPIDFLEAKGYKEVKKDLIIKLPKYSLFELENGRKRMLASAGELQKGNELALPSKYVNFLYLASHYEKLKGSPEDNEQKQLFVEQHKHYLDEIIEQISEFSKRVILADANLDKVLSAYNKHRDKPIREQAENIIHLFTLTNLGAPAAFKYFDTTIDRKRYTSTKEVLDATLIHQSITGLYETRIDLSQLGGDGGGGGPAPGSSGGVLNLEEEYRLHEKPVPSSIDPSWLQLFPTVWAERAGMGLANQVPPVVVELRSGASPVAVRQYPMSKEAREGIRPHIQRFLDLGVLVPCQSPWNTPLLPVKKPGTNDYRPVQDLREINKRVQDIHPTVPNPYNLLSSLPPSHTWYSVLDLKDAFFCLKLHPNSQPLFAFEWRDPEKGNTGQLTWTRLPQGFKNSPTLFNEALHRDLAPFRALNPQVVLLQYVDDLLVAAPTYRDCKEGTQKLLQELSKLGYRVSAKKAQLCQKEVTYLGYLLKEGKRWLTPARKATVMKIPPPTTPRQVREFLGKAGFCRLFIPGFASLAAPLYPLTKPSIPFIWTEEHQKAFDRIKEALLSAPALALPDLTKPFTLYVDERAGVARGVLTQTLGPWRRPVAYLSKKLDPVASGWPTCLKAVAAVALLLKDADKLTLGQNVTVIASHSLESIVRQPPDRWMTNARMTHYQSLLLNERVSFAPPAVLNPATLLPVESEATPVHRCSEILAEETGTRRDLKDQPLPGVPAWYTDGSSFIAEGKRRAGAAIVDGKRTVWASSLPEGTSAQKAELVALTQALRLAEGKDINIYTDSRYAFATAHIHGAIYKQRGWLTSAGKDIKNKEEILALLEAIHLPKRVAIIHCPGHQKGNDPVATGNRRADEAAKQAALSTRVLAETTKPAGKRTADGSEFEKRTADGSEFESPKKKAKVE

SEQ ID NO: 914 - protein, 2089 aa, synthetic construct
MPAAKRVKLDGGDKKYSIGLDIGTNSVGWAVITDEYKVPSKKFKVLGNTDRHSIKKNLIGALLFDSGETAEATRLKRTARRRYTRRKNRICYLQEIFSNEMAKVDDSFFHRLEESFLVEEDKKHERHPIFGNIVDEVAYHEKYPTIYHLRKKLVDSTDKADLRLIYLALAHMIKFRGHFLIEGDLNPDNSDVDKLFIQLVQTYNQLFEENPINASGVDAKAILSARLSKSRRLENLIAQLPGEKKNGLFGNLIALSLGLTPNFKSNFDLAEDAKLQLSKDTYDDDLDNLLAQIGDQYADLFLAAKNLSDAILLSDILRVNTEITKAPLSASMIKRYDEHHQDLTLLKALVRQQLPEKYKEIFFDQSKNGYAGYIDGGASQEEFYKFIKPILEKMDGTEELLVKLNREDLLRKQRTFDNGSIPHQIHLGELHAILRRQEDFYPFLKDNREKIEKILTFRIPYYVGPLARGNSRFAWMTRKSEETITPWNFEEVVDKGASAQSFIERMTNFDKNLPNEKVLPKHSLLYEYFTVYNELTKVKYVTEGMRKPAFLSGEQKKAIVDLLFKTNRKVTVKQLKEDYFKKIECFDSVEISGVEDRFNASLGTYHDLLKIIKDKDFLDNEENEDILEDIVLTLTLFEDREMIEERLKTYAHLFDDKVMKQLKRRRYTGWGRLSRKLINGIRDKQSGKTILDFLKSDGFANRNFMQLIHDDSLTFKEDIQKAQVSGQGDSLHEHIANLAGSPAIKKGILQTVKVVDELVKVMGRHKPENIVIEMARENQTTQKGQKNSRERMKRIEEGIKELGSQILKEHPVENTQLQNEKLYLYYLQNGRDMYVDQELDINRLSDYDVDHIVPQSFLKDDSIDNKVLTRSDKARGKSDNVPSEEVVKKMKNYWRQLLNAKLITQRKFDNLTKAERGGLSELDKAGFIKRQLVETRQITKHVAQILDSRMNTKYDENDKLIREVKVITLKSKLVSDFRKDFQFYKVREINNYHHAHDAYLNAVVGTALIKKYPKLESEFVYGDYKVYDVRKMIAKSEQEIGKATAKYFFYSNIMNFFKTEITLANGEIRKRPLIETNGETGEIVWDKGRDFATVRKVLSMPQVNIVKKTEVQTGGFSKESILPKRNSDKLIARKKDWDPKKYGGFDSPTVAYSVLVVAKVEKGKSKKLKSVKELLGITIMERSSFEKNPIDFLEAKGYKEVKKDLIIKLPKYSLFELENGRKRMLASAGELQKGNELALPSKYVNFLYLASHYEKLKGSPEDNEQKQLFVEQHKHYLDEIIEQISEFSKRVILADANLDKVLSAYNKHRDKPIREQAENIIHLFTLTNLGAPAAFKYFDTTIDRKRYTSTKEVLDATLIHQSITGLYETRIDLSQLGGDGGPAPGGGGGVLNLEEEYRLHEKPVPSSIDPSWLQLFPTVWAERAGMGLANQVPPVVVELRSGASPVAVRQYPMSKEAREGIRPHIQRFLDLGVLVPCQSPWNTPLLPVKKPGTNDYRPVQDLREINKRVQDIHPTVPNPYNLLSSLPPSHTWYSVLDLKDAFFCLKLHPNSQPLFAFEWRDPEKGNTGQLTWTRLPQGFKNSPTLFNEALHRDLAPFRALNPQVVLLQYVDDLLVAAPTYRDCKEGTQKLLQELSKLGYRVSAKKAQLCQKEVTYLGYLLKEGKRWLTPARKATVMKIPPPTTPRQVREFLGKAGFCRLFIPGFASLAAPLYPLTKPSIPFIWTEEHQKAFDRIKEALLSAPALALPDLTKPFTLYVDERAGVARGVLTQTLGPWRRPVAYLSKKLDPVASGWPTCLKAVAAVALLLKDADKLTLGQNVTVIASHSLESIVRQPPDRWMTNARMTHYQSLLLNERVSFAPPAVLNPATLLPVESEATPVHRCSEILAEETGTRRDLKDQPLPGVPAWYTDGSSFIAEGKRRAGAAIVDGKRTVWASSLPEGTSAQKAELVALTQALRLAEGKDINIYTDSRYAFATAHIHGAIYKQRGWLTSAGKDIKNKEEILALLEAIHLPKRVAIIHCPGHQKGNDPVATGNRRADEAAKQAALSTRVLAETTKPAGKRTADGSEFEKRTADGSEFESPKKKAKVE

SEQ ID NO: 915 - protein, 2094 aa, synthetic construct
MPAAKRVKLDGGDKKYSIGLDIGTNSVGWAVITDEYKVPSKKFKVLGNTDRHSIKKNLIGALLFDSGETAEATRLKRTARRRYTRRKNRICYLQEIFSNEMAKVDDSFFHRLEESFLVEEDKKHERHPIFGNIVDEVAYHEKYPTIYHLRKKLVDSTDKADLRLIYLALAHMIKFRGHFLIEGDLNPDNSDVDKLFIQLVQTYNQLFEENPINASGVDAKAILSARLSKSRRLENLIAQLPGEKKNGLFGNLIALSLGLTPNFKSNFDLAEDAKLQLSKDTYDDDLDNLLAQIGDQYADLFLAAKNLSDAILLSDILRVNTEITKAPLSASMIKRYDEHHQDLTLLKALVRQQLPEKYKEIFFDQSKNGYAGYIDGGASQEEFYKFIKPILEKMDGTEELLVKLNREDLLRKQRTFDNGSIPHQIHLGELHAILRRQEDFYPFLKDNREKIEKILTFRIPYYVGPLARGNSRFAWMTRKSEETITPWNFEEVVDKGASAQSFIERMTNFDKNLPNEKVLPKHSLLYEYFTVYNELTKVKYVTEGMRKPAFLSGEQKKAIVDLLFKTNRKVTVKQLKEDYFKKIECFDSVEISGVEDRFNASLGTYHDLLKIIKDKDFLDNEENEDILEDIVLTLTLFEDREMIEERLKTYAHLFDDKVMKQLKRRRYTGWGRLSRKLINGIRDKQSGKTILDFLKSDGFANRNFMQLIHDDSLTFKEDIQKAQVSGQGDSLHEHIANLAGSPAIKKGILQTVKVVDELVKVMGRHKPENIVIEMARENQTTQKGQKNSRERMKRIEEGIKELGSQILKEHPVENTQLQNEKLYLYYLQNGRDMYVDQELDINRLSDYDVDHIVPQSFLKDDSIDNKVLTRSDKARGKSDNVPSEEVVKKMKNYWRQLLNAKLITQRKFDNLTKAERGGLSELDKAGFIKRQLVETRQITKHVAQILDSRMNTKYDENDKLIREVKVITLKSKLVSDFRKDFQFYKVREINNYHHAHDAYLNAVVGTALIKKYPKLESEFVYGDYKVYDVRKMIAKSEQEIGKATAKYFFYSNIMNFFKTEITLANGEIRKRPLIETNGETGEIVWDKGRDFATVRKVLSMPQVNIVKKTEVQTGGFSKESILPKRNSDKLIARKKDWDPKKYGGFDSPTVAYSVLVVAKVEKGKSKKLKSVKELLGITIMERSSFEKNPIDFLEAKGYKEVKKDLIIKLPKYSLFELENGRKRMLASAGELQKGNELALPSKYVNFLYLASHYEKLKGSPEDNEQKQLFVEQHKHYLDEIIEQISEFSKRVILADANLDKVLSAYNKHRDKPIREQAENIIHLFTLTNLGAPAAFKYFDTTIDRKRYTSTKEVLDATLIHQSITGLYETRIDLSQLGGDGGGSSGGSEAAAKGGVLNLEEEYRLHEKPVPSSIDPSWLQLFPTVWAERAGMGLANQVPPVVVELRSGASPVAVRQYPMSKEAREGIRPHIQRFLDLGVLVPCQSPWNTPLLPVKKPGTNDYRPVQDLREINKRVQDIHPTVPNPYNLLSSLPPSHTWYSVLDLKDAFFCLKLHPNSQPLFAFEWRDPEKGNTGQLTWTRLPQGFKNSPTLFNEALHRDLAPFRALNPQVVLLQYVDDLLVAAPTYRDCKEGTQKLLQELSKLGYRVSAKKAQLCQKEVTYLGYLLKEGKRWLTPARKATVMKIPPPTTPRQVREFLGKAGFCRLFIPGFASLAAPLYPLTKPSIPFIWTEEHQKAFDRIKEALLSAPALALPDLTKPFTLYVDERAGVARGVLTQTLGPWRRPVAYLSKKLDPVASGWPTCLKAVAAVALLLKDADKLTLGQNVTVIASHSLESIVRQPPDRWMTNARMTHYQSLLLNERVSFAPPAVLNPATLLPVESEATPVHRCSEILAEETGTRRDLKDQPLPGVPAWYTDGSSFIAEGKRRAGAAIVDGKRTVWASSLPEGTSAQKAELVALTQALRLAEGKDINIYTDSRYAFATAHIHGAIYKQRGWLTSAGKDIKNKEEILALLEAIHLPKRVAIIHCPGHQKGNDPVATGNRRADEAAKQAALSTRVLAETTKPAGKRTADGSEFEKRTADGSEFESPKKKAKVE

SEQ ID NO: 916 - protein, 2092 aa, synthetic construct
MPAAKRVKLDGGDKKYSIGLDIGTNSVGWAVITDEYKVPSKKFKVLGNTDRHSIKKNLIGALLFDSGETAEATRLKRTARRRYTRRKNRICYLQEIFSNEMAKVDDSFFHRLEESFLVEEDKKHERHPIFGNIVDEVAYHEKYPTIYHLRKKLVDSTDKADLRLIYLALAHMIKFRGHFLIEGDLNPDNSDVDKLFIQLVQTYNQLFEENPINASGVDAKAILSARLSKSRRLENLIAQLPGEKKNGLFGNLIALSLGLTPNFKSNFDLAEDAKLQLSKDTYDDDLDNLLAQIGDQYADLFLAAKNLSDAILLSDILRVNTEITKAPLSASMIKRYDEHHQDLTLLKALVRQQLPEKYKEIFFDQSKNGYAGYIDGGASQEEFYKFIKPILEKMDGTEELLVKLNREDLLRKQRTFDNGSIPHQIHLGELHAILRRQEDFYPFLKDNREKIEKILTFRIPYYVGPLARGNSRFAWMTRKSEETITPWNFEEVVDKGASAQSFIERMTNFDKNLPNEKVLPKHSLLYEYFTVYNELTKVKYVTEGMRKPAFLSGEQKKAIVDLLFKTNRKVTVKQLKEDYFKKIECFDSVEISGVEDRFNASLGTYHDLLKIIKDKDFLDNEENEDILEDIVLTLTLFEDREMIEERLKTYAHLFDDKVMKQLKRRRYTGWGRLSRKLINGIRDKQSGKTILDFLKSDGFANRNFMQLIHDDSLTFKEDIQKAQVSGQGDSLHEHIANLAGSPAIKKGILQTVKVVDELVKVMGRHKPENIVIEMARENQTTQKGQKNSRERMKRIEEGIKELGSQILKEHPVENTQLQNEKLYLYYLQNGRDMYVDQELDINRLSDYDVDHIVPQSFLKDDSIDNKVLTRSDKARGKSDNVPSEEVVKKMKNYWRQLLNAKLITQRKFDNLTKAERGGLSELDKAGFIKRQLVETRQITKHVAQILDSRMNTKYDENDKLIREVKVITLKSKLVSDFRKDFQFYKVREINNYHHAHDAYLNAVVGTALIKKYPKLESEFVYGDYKVYDVRKMIAKSEQEIGKATAKYFFYSNIMNFFKTEITLANGEIRKRPLIETNGETGEIVWDKGRDFATVRKVLSMPQVNIVKKTEVQTGGFSKESILPKRNSDKLIARKKDWDPKKYGGFDSPTVAYSVLVVAKVEKGKSKKLKSVKELLGITIMERSSFEKNPIDFLEAKGYKEVKKDLIIKLPKYSLFELENGRKRMLASAGELQKGNELALPSKYVNFLYLASHYEKLKGSPEDNEQKQLFVEQHKHYLDEIIEQISEFSKRVILADANLDKVLSAYNKHRDKPIREQAENIIHLFTLTNLGAPAAFKYFDTTIDRKRYTSTKEVLDATLIHQSITGLYETRIDLSQLGGDGGPAPAPAPAPGGVLNLEEEYRLHEKPVPSSIDPSWLQLFPTVWAERAGMGLANQVPPVVVELRSGASPVAVRQYPMSKEAREGIRPHIQRFLDLGVLVPCQSPWNTPLLPVKKPGTNDYRPVQDLREINKRVQDIHPTVPNPYNLLSSLPPSHTWYSVLDLKDAFFCLKLHPNSQPLFAFEWRDPEKGNTGQLTWTRLPQGFKNSPTLFNEALHRDLAPFRALNPQVVLLQYVDDLLVAAPTYRDCKEGTQKLLQELSKLGYRVSAKKAQLCQKEVTYLGYLLKEGKRWLTPARKATVMKIPPPTTPRQVREFLGKAGFCRLFIPGFASLAAPLYPLTKPSIPFIWTEEHQKAFDRIKEALLSAPALALPDLTKPFTLYVDERAGVARGVLTQTLGPWRRPVAYLSKKLDPVASGWPTCLKAVAAVALLLKDADKLTLGQNVTVIASHSLESIVRQPPDRWMTNARMTHYQSLLLNERVSFAPPAVLNPATLLPVESEATPVHRCSEILAEETGTRRDLKDQPLPGVPAWYTDGSSFIAEGKRRAGAAIVDGKRTVWASSLPEGTSAQKAELVALTQALRLAEGKDINIYTDSRYAFATAHIHGAIYKQRGWLTSAGKDIKNKEEILALLEAIHLPKRVAIIHCPGHQKGNDPVATGNRRADEAAKQAALSTRVLAETTKPAGKRTADGSEFEKRTADGSEFESPKKKAKVE

SEQ ID NO: 917 - protein, 2093 aa, synthetic construct
MPAAKRVKLDGGDKKYSIGLDIGTNSVGWAVITDEYKVPSKKFKVLGNTDRHSIKKNLIGALLFDSGETAEATRLKRTARRRYTRRKNRICYLQEIFSNEMAKVDDSFFHRLEESFLVEEDKKHERHPIFGNIVDEVAYHEKYPTIYHLRKKLVDSTDKADLRLIYLALAHMIKFRGHFLIEGDLNPDNSDVDKLFIQLVQTYNQLFEENPINASGVDAKAILSARLSKSRRLENLIAQLPGEKKNGLFGNLIALSLGLTPNFKSNFDLAEDAKLQLSKDTYDDDLDNLLAQIGDQYADLFLAAKNLSDAILLSDILRVNTEITKAPLSASMIKRYDEHHQDLTLLKALVRQQLPEKYKEIFFDQSKNGYAGYIDGGASQEEFYKFIKPILEKMDGTEELLVKLNREDLLRKQRTFDNGSIPHQIHLGELHAILRRQEDFYPFLKDNREKIEKILTFRIPYYVGPLARGNSRFAWMTRKSEETITPWNFEEVVDKGASAQSFIERMTNFDKNLPNEKVLPKHSLLYEYFTVYNELTKVKYVTEGMRKPAFLSGEQKKAIVDLLFKTNRKVTVKQLKEDYFKKIECFDSVEISGVEDRFNASLGTYHDLLKIIKDKDFLDNEENEDILEDIVLTLTLFEDREMIEERLKTYAHLFDDKVMKQLKRRRYTGWGRLSRKLINGIRDKQSGKTILDFLKSDGFANRNFMQLIHDDSLTFKEDIQKAQVSGQGDSLHEHIANLAGSPAIKKGILQTVKVVDELVKVMGRHKPENIVIEMARENQTTQKGQKNSRERMKRIEEGIKELGSQILKEHPVENTQLQNEKLYLYYLQNGRDMYVDQELDINRLSDYDVDHIVPQSFLKDDSIDNKVLTRSDKARGKSDNVPSEEVVKKMKNYWRQLLNAKLITQRKFDNLTKAERGGLSELDKAGFIKRQLVETRQITKHVAQILDSRMNTKYDENDKLIREVKVITLKSKLVSDFRKDFQFYKVREINNYHHAHDAYLNAVVGTALIKKYPKLESEFVYGDYKVYDVRKMIAKSEQEIGKATAKYFFYSNIMNFFKTEITLANGEIRKRPLIETNGETGEIVWDKGRDFATVRKVLSMPQVNIVKKTEVQTGGFSKESILPKRNSDKLIARKKDWDPKKYGGFDSPTVAYSVLVVAKVEKGKSKKLKSVKELLGITIMERSSFEKNPIDFLEAKGYKEVKKDLIIKLPKYSLFELENGRKRMLASAGELQKGNELALPSKYVNFLYLASHYEKLKGSPEDNEQKQLFVEQHKHYLDEIIEQISEFSKRVILADANLDKVLSAYNKHRDKPIREQAENIIHLFTLTNLGAPAAFKYFDTTIDRKRYTSTKEVLDATLIHQSITGLYETRIDLSQLGGDGGEAAAKEAAAKGGVLNLEEEYRLHEKPVPSSIDPSWLQLFPTVWAERAGMGLANQVPPVVVELRSGASPVAVRQYPMSKEAREGIRPHIQRFLDLGVLVPCQSPWNTPLLPVKKPGTNDYRPVQDLREINKRVQDIHPTVPNPYNLLSSLPPSHTWYSVLDLKDAFFCLKLHPNSQPLFAFEWRDPEKGNTGQLTWTRLPQGFKNSPTLFNEALHRDLAPFRALNPQVVLLQYVDDLLVAAPTYRDCKEGTQKLLQELSKLGYRVSAKKAQLCQKEVTYLGYLLKEGKRWLTPARKATVMKIPPPTTPRQVREFLGKAGFCRLFIPGFASLAAPLYPLTKPSIPFIWTEEHQKAFDRIKEALLSAPALALPDLTKPFTLYVDERAGVARGVLTQTLGPWRRPVAYLSKKLDPVASGWPTCLKAVAAVALLLKDADKLTLGQNVTVIASHSLESIVRQPPDRWMTNARMTHYQSLLLNERVSFAPPAVLNPATLLPVESEATPVHRCSEILAEETGTRRDLKDQPLPGVPAWYTDGSSFIAEGKRRAGAAIVDGKRTVWASSLPEGTSAQKAELVALTQALRLAEGKDINIYTDSRYAFATAHIHGAIYKQRGWLTSAGKDIKNKEEILALLEAIHLPKRVAIIHCPGHQKGNDPVATGNRRADEAAKQAALSTRVLAETTKPAGKRTADGSEFEKRTADGSEFESPKKKAKVE

SEQ ID NO: 918 - protein, 2092 aa, synthetic construct
MPAAKRVKLDGGDKKYSIGLDIGTNSVGWAVITDEYKVPSKKFKVLGNTDRHSIKKNLIGALLFDSGETAEATRLKRTARRRYTRRKNRICYLQEIFSNEMAKVDDSFFHRLEESFLVEEDKKHERHPIFGNIVDEVAYHEKYPTIYHLRKKLVDSTDKADLRLIYLALAHMIKFRGHFLIEGDLNPDNSDVDKLFIQLVQTYNQLFEENPINASGVDAKAILSARLSKSRRLENLIAQLPGEKKNGLFGNLIALSLGLTPNFKSNFDLAEDAKLQLSKDTYDDDLDNLLAQIGDQYADLFLAAKNLSDAILLSDILRVNTEITKAPLSASMIKRYDEHHQDLTLLKALVRQQLPEKYKEIFFDQSKNGYAGYIDGGASQEEFYKFIKPILEKMDGTEELLVKLNREDLLRKQRTFDNGSIPHQIHLGELHAILRRQEDFYPFLKDNREKIEKILTFRIPYYVGPLARGNSRFAWMTRKSEETITPWNFEEVVDKGASAQSFIERMTNFDKNLPNEKVLPKHSLLYEYFTVYNELTKVKYVTEGMRKPAFLSGEQKKAIVDLLFKTNRKVTVKQLKEDYFKKIECFDSVEISGVEDRFNASLGTYHDLLKIIKDKDFLDNEENEDILEDIVLTLTLFEDREMIEERLKTYAHLFDDKVMKQLKRRRYTGWGRLSRKLINGIRDKQSGKTILDFLKSDGFANRNFMQLIHDDSLTFKEDIQKAQVSGQGDSLHEHIANLAGSPAIKKGILQTVKVVDELVKVMGRHKPENIVIEMARENQTTQKGQKNSRERMKRIEEGIKELGSQILKEHPVENTQLQNEKLYLYYLQNGRDMYVDQELDINRLSDYDVDHIVPQSFLKDDSIDNKVLTRSDKARGKSDNVPSEEVVKKMKNYWRQLLNAKLITQRKFDNLTKAERGGLSELDKAGFIKRQLVETRQITKHVAQILDSRMNTKYDENDKLIREVKVITLKSKLVSDFRKDFQFYKVREINNYHHAHDAYLNAVVGTALIKKYPKLESEFVYGDYKVYDVRKMIAKSEQEIGKATAKYFFYSNIMNFFKTEITLANGEIRKRPLIETNGETGEIVWDKGRDFATVRKVLSMPQVNIVKKTEVQTGGFSKESILPKRNSDKLIARKKDWDPKKYGGFDSPTVAYSVLVVAKVEKGKSKKLKSVKELLGITIMERSSFEKNPIDFLEAKGYKEVKKDLIIKLPKYSLFELENGRKRMLASAGELQKGNELALPSKYVNFLYLASHYEKLKGSPEDNEQKQLFVEQHKHYLDEIIEQISEFSKRVILADANLDKVLSAYNKHRDKPIREQAENIIHLFTLTNLGAPAAFKYFDTTIDRKRYTSTKEVLDATLIHQSITGLYETRIDLSQLGGDGGGSSGGGGGSGGVLNLEEEYRLHEKPVPSSIDPSWLQLFPTVWAERAGMGLANQVPPVVVELRSGASPVAVRQYPMSKEAREGIRPHIQRFLDLGVLVPCQSPWNTPLLPVKKPGTNDYRPVQDLREINKRVQDIHPTVPNPYNLLSSLPPSHTWYSVLDLKDAFFCLKLHPNSQPLFAFEWRDPEKGNTGQLTWTRLPQGFKNSPTLFNEALHRDLAPFRALNPQVVLLQYVDDLLVAAPTYRDCKEGTQKLLQELSKLGYRVSAKKAQLCQKEVTYLGYLLKEGKRWLTPARKATVMKIPPPTTPRQVREFLGKAGFCRLFIPGFASLAAPLYPLTKPSIPFIWTEEHQKAFDRIKEALLSAPALALPDLTKPFTLYVDERAGVARGVLTQTLGPWRRPVAYLSKKLDPVASGWPTCLKAVAAVALLLKDADKLTLGQNVTVIASHSLESIVRQPPDRWMTNARMTHYQSLLLNERVSFAPPAVLNPATLLPVESEATPVHRCSEILAEETGTRRDLKDQPLPGVPAWYTDGSSFIAEGKRRAGAAIVDGKRTVWASSLPEGTSAQKAELVALTQALRLAEGKDINIYTDSRYAFATAHIHGAIYKQRGWLTSAGKDIKNKEEILALLEAIHLPKRVAIIHCPGHQKGNDPVATGNRRADEAAKQAALSTRVLAETTKPAGKRTADGSEFEKRTADGSEFESPKKKAKVE

SEQ ID NO: 919 - protein, 2094 aa, synthetic construct
MPAAKRVKLDGGDKKYSIGLDIGTNSVGWAVITDEYKVPSKKFKVLGNTDRHSIKKNLIGALLFDSGETAEATRLKRTARRRYTRRKNRICYLQEIFSNEMAKVDDSFFHRLEESFLVEEDKKHERHPIFGNIVDEVAYHEKYPTIYHLRKKLVDSTDKADLRLIYLALAHMIKFRGHFLIEGDLNPDNSDVDKLFIQLVQTYNQLFEENPINASGVDAKAILSARLSKSRRLENLIAQLPGEKKNGLFGNLIALSLGLTPNFKSNFDLAEDAKLQLSKDTYDDDLDNLLAQIGDQYADLFLAAKNLSDAILLSDILRVNTEITKAPLSASMIKRYDEHHQDLTLLKALVRQQLPEKYKEIFFDQSKNGYAGYIDGGASQEEFYKFIKPILEKMDGTEELLVKLNREDLLRKQRTFDNGSIPHQIHLGELHAILRRQEDFYPFLKDNREKIEKILTFRIPYYVGPLARGNSRFAWMTRKSEETITPWNFEEVVDKGASAQSFIERMTNFDKNLPNEKVLPKHSLLYEYFTVYNELTKVKYVTEGMRKPAFLSGEQKKAIVDLLFKTNRKVTVKQLKEDYFKKIECFDSVEISGVEDRFNASLGTYHDLLKIIKDKDFLDNEENEDILEDIVLTLTLFEDREMIEERLKTYAHLFDDKVMKQLKRRRYTGWGRLSRKLINGIRDKQSGKTILDFLKSDGFANRNFMQLIHDDSLTFKEDIQKAQVSGQGDSLHEHIANLAGSPAIKKGILQTVKVVDELVKVMGRHKPENIVIEMARENQTTQKGQKNSRERMKRIEEGIKELGSQILKEHPVENTQLQNEKLYLYYLQNGRDMYVDQELDINRLSDYDVDHIVPQSFLKDDSIDNKVLTRSDKARGKSDNVPSEEVVKKMKNYWRQLLNAKLITQRKFDNLTKAERGGLSELDKAGFIKRQLVETRQITKHVAQILDSRMNTKYDENDKLIREVKVITLKSKLVSDFRKDFQFYKVREINNYHHAHDAYLNAVVGTALIKKYPKLESEFVYGDYKVYDVRKMIAKSEQEIGKATAKYFFYSNIMNFFKTEITLANGEIRKRPLIETNGETGEIVWDKGRDFATVRKVLSMPQVNIVKKTEVQTGGFSKESILPKRNSDKLIARKKDWDPKKYGGFDSPTVAYSVLVVAKVEKGKSKKLKSVKELLGITIMERSSFEKNPIDFLEAKGYKEVKKDLIIKLPKYSLFELENGRKRMLASAGELQKGNELALPSKYVNFLYLASHYEKLKGSPEDNEQKQLFVEQHKHYLDEIIEQISEFSKRVILADANLDKVLSAYNKHRDKPIREQAENIIHLFTLTNLGAPAAFKYFDTTIDRKRYTSTKEVLDATLIHQSITGLYETRIDLSQLGGDGGEAAAKGSSPAPGGVLNLEEEYRLHEKPVPSSIDPSWLQLFPTVWAERAGMGLANQVPPVVVELRSGASPVAVRQYPMSKEAREGIRPHIQRFLDLGVLVPCQSPWNTPLLPVKKPGTNDYRPVQDLREINKRVQDIHPTVPNPYNLLSSLPPSHTWYSVLDLKDAFFCLKLHPNSQPLFAFEWRDPEKGNTGQLTWTRLPQGFKNSPTLFNEALHRDLAPFRALNPQVVLLQYVDDLLVAAPTYRDCKEGTQKLLQELSKLGYRVSAKKAQLCQKEVTYLGYLLKEGKRWLTPARKATVMKIPPPTTPRQVREFLGKAGFCRLFIPGFASLAAPLYPLTKPSIPFIWTEEHQKAFDRIKEALLSAPALALPDLTKPFTLYVDERAGVARGVLTQTLGPWRRPVAYLSKKLDPVASGWPTCLKAVAAVALLLKDADKLTLGQNVTVIASHSLESIVRQPPDRWMTNARMTHYQSLLLNERVSFAPPAVLNPATLLPVESEATPVHRCSEILAEETGTRRDLKDQPLPGVPAWYTDGSSFIAEGKRRAGAAIVDGKRTVWASSLPEGTSAQKAELVALTQALRLAEGKDINIYTDSRYAFATAHIHGAIYKQRGWLTSAGKDIKNKEEILALLEAIHLPKRVAIIHCPGHQKGNDPVATGNRRADEAAKQAALSTRVLAETTKPAGKRTADGSEFEKRTADGSEFESPKKKAKVE

SEQ ID NO: 920 - protein, 2094 aa, synthetic construct
MPAAKRVKLDGGDKKYSIGLDIGTNSVGWAVITDEYKVPSKKFKVLGNTDRHSIKKNLIGALLFDSGETAEATRLKRTARRRYTRRKNRICYLQEIFSNEMAKVDDSFFHRLEESFLVEEDKKHERHPIFGNIVDEVAYHEKYPTIYHLRKKLVDSTDKADLRLIYLALAHMIKFRGHFLIEGDLNPDNSDVDKLFIQLVQTYNQLFEENPINASGVDAKAILSARLSKSRRLENLIAQLPGEKKNGLFGNLIALSLGLTPNFKSNFDLAEDAKLQLSKDTYDDDLDNLLAQIGDQYADLFLAAKNLSDAILLSDILRVNTEITKAPLSASMIKRYDEHHQDLTLLKALVRQQLPEKYKEIFFDQSKNGYAGYIDGGASQEEFYKFIKPILEKMDGTEELLVKLNREDLLRKQRTFDNGSIPHQIHLGELHAILRRQEDFYPFLKDNREKIEKILTFRIPYYVGPLARGNSRFAWMTRKSEETITPWNFEEVVDKGASAQSFIERMTNFDKNLPNEKVLPKHSLLYEYFTVYNELTKVKYVTEGMRKPAFLSGEQKKAIVDLLFKTNRKVTVKQLKEDYFKKIECFDSVEISGVEDRFNASLGTYHDLLKIIKDKDFLDNEENEDILEDIVLTLTLFEDREMIEERLKTYAHLFDDKVMKQLKRRRYTGWGRLSRKLINGIRDKQSGKTILDFLKSDGFANRNFMQLIHDDSLTFKEDIQKAQVSGQGDSLHEHIANLAGSPAIKKGILQTVKVVDELVKVMGRHKPENIVIEMARENQTTQKGQKNSRERMKRIEEGIKELGSQILKEHPVENTQLQNEKLYLYYLQNGRDMYVDQELDINRLSDYDVDHIVPQSFLKDDSIDNKVLTRSDKARGKSDNVPSEEVVKKMKNYWRQLLNAKLITQRKFDNLTKAERGGLSELDKAGFIKRQLVETRQITKHVAQILDSRMNTKYDENDKLIREVKVITLKSKLVSDFRKDFQFYKVREINNYHHAHDAYLNAVVGTALIKKYPKLESEFVYGDYKVYDVRKMIAKSEQEIGKATAKYFFYSNIMNFFKTEITLANGEIRKRPLIETNGETGEIVWDKGRDFATVRKVLSMPQVNIVKKTEVQTGGFSKESILPKRNSDKLIARKKDWDPKKYGGFDSPTVAYSVLVVAKVEKGKSKKLKSVKELLGITIMERSSFEKNPIDFLEAKGYKEVKKDLIIKLPKYSLFELENGRKRMLASAGELQKGNELALPSKYVNFLYLASHYEKLKGSPEDNEQKQLFVEQHKHYLDEIIEQISEFSKRVILADANLDKVLSAYNKHRDKPIREQAENIIHLFTLTNLGAPAAFKYFDTTIDRKRYTSTKEVLDATLIHQSITGLYETRIDLSQLGGDGGGSSGGGEAAAKGGVLNLEEEYRLHEKPVPSSIDPSWLQLFPTVWAERAGMGLANQVPPVVVELRSGASPVAVRQYPMSKEAREGIRPHIQRFLDLGVLVPCQSPWNTPLLPVKKPGTNDYRPVQDLREINKRVQDIHPTVPNPYNLLSSLPPSHTWYSVLDLKDAFFCLKLHPNSQPLFAFEWRDPEKGNTGQLTWTRLPQGFKNSPTLFNEALHRDLAPFRALNPQVVLLQYVDDLLVAAPTYRDCKEGTQKLLQELSKLGYRVSAKKAQLCQKEVTYLGYLLKEGKRWLTPARKATVMKIPPPTTPRQVREFLGKAGFCRLFIPGFASLAAPLYPLTKPSIPFIWTEEHQKAFDRIKEALLSAPALALPDLTKPFTLYVDERAGVARGVLTQTLGPWRRPVAYLSKKLDPVASGWPTCLKAVAAVALLLKDADKLTLGQNVTVIASHSLESIVRQPPDRWMTNARMTHYQSLLLNERVSFAPPAVLNPATLLPVESEATPVHRCSEILAEETGTRRDLKDQPLPGVPAWYTDGSSFIAEGKRRAGAAIVDGKRTVWASSLPEGTSAQKAELVALTQALRLAEGKDINIYTDSRYAFATAHIHGAIYKQRGWLTSAGKDIKNKEEILALLEAIHLPKRVAIIHCPGHQKGNDPVATGNRRADEAAKQAALSTRVLAETTKPAGKRTADGSEFEKRTADGSEFESPKKKAKVE

SEQ ID NO: 921 - protein, 2094 aa, synthetic construct
MPAAKRVKLDGGDKKYSIGLDIGTNSVGWAVITDEYKVPSKKFKVLGNTDRHSIKKNLIGALLFDSGETAEATRLKRTARRRYTRRKNRICYLQEIFSNEMAKVDDSFFHRLEESFLVEEDKKHERHPIFGNIVDEVAYHEKYPTIYHLRKKLVDSTDKADLRLIYLALAHMIKFRGHFLIEGDLNPDNSDVDKLFIQLVQTYNQLFEENPINASGVDAKAILSARLSKSRRLENLIAQLPGEKKNGLFGNLIALSLGLTPNFKSNFDLAEDAKLQLSKDTYDDDLDNLLAQIGDQYADLFLAAKNLSDAILLSDILRVNTEITKAPLSASMIKRYDEHHQDLTLLKALVRQQLPEKYKEIFFDQSKNGYAGYIDGGASQEEFYKFIKPILEKMDGTEELLVKLNREDLLRKQRTFDNGSIPHQIHLGELHAILRRQEDFYPFLKDNREKIEKILTFRIPYYVGPLARGNSRFAWMTRKSEETITPWNFEEVVDKGASAQSFIERMTNFDKNLPNEKVLPKHSLLYEYFTVYNELTKVKYVTEGMRKPAFLSGEQKKAIVDLLFKTNRKVTVKQLKEDYFKKIECFDSVEISGVEDRFNASLGTYHDLLKIIKDKDFLDNEENEDILEDIVLTLTLFEDREMIEERLKTYAHLFDDKVMKQLKRRRYTGWGRLSRKLINGIRDKQSGKTILDFLKSDGFANRNFMQLIHDDSLTFKEDIQKAQVSGQGDSLHEHIANLAGSPAIKKGILQTVKVVDELVKVMGRHKPENIVIEMARENQTTQKGQKNSRERMKRIEEGIKELGSQILKEHPVENTQLQNEKLYLYYLQNGRDMYVDQELDINRLSDYDVDHIVPQSFLKDDSIDNKVLTRSDKARGKSDNVPSEEVVKKMKNYWRQLLNAKLITQRKFDNLTKAERGGLSELDKAGFIKRQLVETRQITKHVAQILDSRMNTKYDENDKLIREVKVITLKSKLVSDFRKDFQFYKVREINNYHHAHDAYLNAVVGTALIKKYPKLESEFVYGDYKVYDVRKMIAKSEQEIGKATAKYFFYSNIMNFFKTEITLANGEIRKRPLIETNGETGEIVWDKGRDFATVRKVLSMPQVNIVKKTEVQTGGFSKESILPKRNSDKLIARKKDWDPKKYGGFDSPTVAYSVLVVAKVEKGKSKKLKSVKELLGITIMERSSFEKNPIDFLEAKGYKEVKKDLIIKLPKYSLFELENGRKRMLASAGELQKGNELALPSKYVNFLYLASHYEKLKGSPEDNEQKQLFVEQHKHYLDEIIEQISEFSKRVILADANLDKVLSAYNKHRDKPIREQAENIIHLFTLTNLGAPAAFKYFDTTIDRKRYTSTKEVLDATLIHQSITGLYETRIDLSQLGGDGGEAAAKPAPGGSGGVLNLEEEYRLHEKPVPSSIDPSWLQLFPTVWAERAGMGLANQVPPVVVELRSGASPVAVRQYPMSKEAREGIRPHIQRFLDLGVLVPCQSPWNTPLLPVKKPGTNDYRPVQDLREINKRVQDIHPTVPNPYNLLSSLPPSHTWYSVLDLKDAFFCLKLHPNSQPLFAFEWRDPEKGNTGQLTWTRLPQGFKNSPTLFNEALHRDLAPFRALNPQVVLLQYVDDLLVAAPTYRDCKEGTQKLLQELSKLGYRVSAKKAQLCQKEVTYLGYLLKEGKRWLTPARKATVMKIPPPTTPRQVREFLGKAGFCRLFIPGFASLAAPLYPLTKPSIPFIWTEEHQKAFDRIKEALLSAPALALPDLTKPFTLYVDERAGVARGVLTQTLGPWRRPVAYLSKKLDPVASGWPTCLKAVAAVALLLKDADKLTLGQNVTVIASHSLESIVRQPPDRWMTNARMTHYQSLLLNERVSFAPPAVLNPATLLPVESEATPVHRCSEILAEETGTRRDLKDQPLPGVPAWYTDGSSFIAEGKRRAGAAIVDGKRTVWASSLPEGTSAQKAELVALTQALRLAEGKDINIYTDSRYAFATAHIHGAIYKQRGWLTSAGKDIKNKEEILALLEAIHLPKRVAIIHCPGHQKGNDPVATGNRRADEAAKQAALSTRVLAETTKPAGKRTADGSEFEKRTADGSEFESPKKKAKVE

SEQ ID NO: 922 - protein, 2092 aa, synthetic construct
MPAAKRVKLDGGDKKYSIGLDIGTNSVGWAVITDEYKVPSKKFKVLGNTDRHSIKKNLIGALLFDSGETAEATRLKRTARRRYTRRKNRICYLQEIFSNEMAKVDDSFFHRLEESFLVEEDKKHERHPIFGNIVDEVAYHEKYPTIYHLRKKLVDSTDKADLRLIYLALAHMIKFRGHFLIEGDLNPDNSDVDKLFIQLVQTYNQLFEENPINASGVDAKAILSARLSKSRRLENLIAQLPGEKKNGLFGNLIALSLGLTPNFKSNFDLAEDAKLQLSKDTYDDDLDNLLAQIGDQYADLFLAAKNLSDAILLSDILRVNTEITKAPLSASMIKRYDEHHQDLTLLKALVRQQLPEKYKEIFFDQSKNGYAGYIDGGASQEEFYKFIKPILEKMDGTEELLVKLNREDLLRKQRTFDNGSIPHQIHLGELHAILRRQEDFYPFLKDNREKIEKILTFRIPYYVGPLARGNSRFAWMTRKSEETITPWNFEEVVDKGASAQSFIERMTNFDKNLPNEKVLPKHSLLYEYFTVYNELTKVKYVTEGMRKPAFLSGEQKKAIVDLLFKTNRKVTVKQLKEDYFKKIECFDSVEISGVEDRFNASLGTYHDLLKIIKDKDFLDNEENEDILEDIVLTLTLFEDREMIEERLKTYAHLFDDKVMKQLKRRRYTGWGRLSRKLINGIRDKQSGKTILDFLKSDGFANRNFMQLIHDDSLTFKEDIQKAQVSGQGDSLHEHIANLAGSPAIKKGILQTVKVVDELVKVMGRHKPENIVIEMARENQTTQKGQKNSRERMKRIEEGIKELGSQILKEHPVENTQLQNEKLYLYYLQNGRDMYVDQELDINRLSDYDVDHIVPQSFLKDDSIDNKVLTRSDKARGKSDNVPSEEVVKKMKNYWRQLLNAKLITQRKFDNLTKAERGGLSELDKAGFIKRQLVETRQITKHVAQILDSRMNTKYDENDKLIREVKVITLKSKLVSDFRKDFQFYKVREINNYHHAHDAYLNAVVGTALIKKYPKLESEFVYGDYKVYDVRKMIAKSEQEIGKATAKYFFYSNIMNFFKTEITLANGEIRKRPLIETNGETGEIVWDKGRDFATVRKVLSMPQVNIVKKTEVQTGGFSKESILPKRNSDKLIARKKDWDPKKYGGFDSPTVAYSVLVVAKVEKGKSKKLKSVKELLGITIMERSSFEKNPIDFLEAKGYKEVKKDLIIKLPKYSLFELENGRKRMLASAGELQKGNELALPSKYVNFLYLASHYEKLKGSPEDNEQKQLFVEQHKHYLDEIIEQISEFSKRVILADANLDKVLSAYNKHRDKPIREQAENIIHLFTLTNLGAPAAFKYFDTTIDRKRYTSTKEVLDATLIHQSITGLYETRIDLSQLGGDGGGSSPAPGGGGGVLNLEEEYRLHEKPVPSSIDPSWLQLFPTVWAERAGMGLANQVPPVVVELRSGASPVAVRQYPMSKEAREGIRPHIQRFLDLGVLVPCQSPWNTPLLPVKKPGTNDYRPVQDLREINKRVQDIHPTVPNPYNLLSSLPPSHTWYSVLDLKDAFFCLKLHPNSQPLFAFEWRDPEKGNTGQLTWTRLPQGFKNSPTLFNEALHRDLAPFRALNPQVVLLQYVDDLLVAAPTYRDCKEGTQKLLQELSKLGYRVSAKKAQLCQKEVTYLGYLLKEGKRWLTPARKATVMKIPPPTTPRQVREFLGKAGFCRLFIPGFASLAAPLYPLTKPSIPFIWTEEHQKAFDRIKEALLSAPALALPDLTKPFTLYVDERAGVARGVLTQTLGPWRRPVAYLSKKLDPVASGWPTCLKAVAAVALLLKDADKLTLGQNVTVIASHSLESIVRQPPDRWMTNARMTHYQSLLLNERVSFAPPAVLNPATLLPVESEATPVHRCSEILAEETGTRRDLKDQPLPGVPAWYTDGSSFIAEGKRRAGAAIVDGKRTVWASSLPEGTSAQKAELVALTQALRLAEGKDINIYTDSRYAFATAHIHGAIYKQRGWLTSAGKDIKNKEEILALLEAIHLPKRVAIIHCPGHQKGNDPVATGNRRADEAAKQAALSTRVLAETTKPAGKRTADGSEFEKRTADGSEFESPKKKAKVE

SEQ ID NO: 923 - protein, 2101 aa, synthetic construct
MPAAKRVKLDGGDKKYSIGLDIGTNSVGWAVITDEYKVPSKKFKVLGNTDRHSIKKNLIGALLFDSGETAEATRLKRTARRRYTRRKNRICYLQEIFSNEMAKVDDSFFHRLEESFLVEEDKKHERHPIFGNIVDEVAYHEKYPTIYHLRKKLVDSTDKADLRLIYLALAHMIKFRGHFLIEGDLNPDNSDVDKLFIQLVQTYNQLFEENPINASGVDAKAILSARLSKSRRLENLIAQLPGEKKNGLFGNLIALSLGLTPNFKSNFDLAEDAKLQLSKDTYDDDLDNLLAQIGDQYADLFLAAKNLSDAILLSDILRVNTEITKAPLSASMIKRYDEHHQDLTLLKALVRQQLPEKYKEIFFDQSKNGYAGYIDGGASQEEFYKFIKPILEKMDGTEELLVKLNREDLLRKQRTFDNGSIPHQIHLGELHAILRRQEDFYPFLKDNREKIEKILTFRIPYYVGPLARGNSRFAWMTRKSEETITPWNFEEVVDKGASAQSFIERMTNFDKNLPNEKVLPKHSLLYEYFTVYNELTKVKYVTEGMRKPAFLSGEQKKAIVDLLFKTNRKVTVKQLKEDYFKKIECFDSVEISGVEDRFNASLGTYHDLLKIIKDKDFLDNEENEDILEDIVLTLTLFEDREMIEERLKTYAHLFDDKVMKQLKRRRYTGWGRLSRKLINGIRDKQSGKTILDFLKSDGFANRNFMQLIHDDSLTFKEDIQKAQVSGQGDSLHEHIANLAGSPAIKKGILQTVKVVDELVKVMGRHKPENIVIEMARENQTTQKGQKNSRERMKRIEEGIKELGSQILKEHPVENTQLQNEKLYLYYLQNGRDMYVDQELDINRLSDYDVDHIVPQSFLKDDSIDNKVLTRSDKARGKSDNVPSEEVVKKMKNYWRQLLNAKLITQRKFDNLTKAERGGLSELDKAGFIKRQLVETRQITKHVAQILDSRMNTKYDENDKLIREVKVITLKSKLVSDFRKDFQFYKVREINNYHHAHDAYLNAVVGTALIKKYPKLESEFVYGDYKVYDVRKMIAKSEQEIGKATAKYFFYSNIMNFFKTEITLANGEIRKRPLIETNGETGEIVWDKGRDFATVRKVLSMPQVNIVKKTEVQTGGFSKESILPKRNSDKLIARKKDWDPKKYGGFDSPTVAYSVLVVAKVEKGKSKKLKSVKELLGITIMERSSFEKNPIDFLEAKGYKEVKKDLIIKLPKYSLFELENGRKRMLASAGELQKGNELALPSKYVNFLYLASHYEKLKGSPEDNEQKQLFVEQHKHYLDEIIEQISEFSKRVILADANLDKVLSAYNKHRDKPIREQAENIIHLFTLTNLGAPAAFKYFDTTIDRKRYTSTKEVLDATLIHQSITGLYETRIDLSQLGGDGGGSSGSSGSSGSSGSSGSSGGVLNLEEEYRLHEKPVPSSIDPSWLQLFPTVWAERAGMGLANQVPPVVVELRSGASPVAVRQYPMSKEAREGIRPHIQRFLDLGVLVPCQSPWNTPLLPVKKPGTNDYRPVQDLREINKRVQDIHPTVPNPYNLLSSLPPSHTWYSVLDLKDAFFCLKLHPNSQPLFAFEWRDPEKGNTGQLTWTRLPQGFKNSPTLFNEALHRDLAPFRALNPQVVLLQYVDDLLVAAPTYRDCKEGTQKLLQELSKLGYRVSAKKAQLCQKEVTYLGYLLKEGKRWLTPARKATVMKIPPPTTPRQVREFLGKAGFCRLFIPGFASLAAPLYPLTKPSIPFIWTEEHQKAFDRIKEALLSAPALALPDLTKPFTLYVDERAGVARGVLTQTLGPWRRPVAYLSKKLDPVASGWPTCLKAVAAVALLLKDADKLTLGQNVTVIASHSLESIVRQPPDRWMTNARMTHYQSLLLNERVSFAPPAVLNPATLLPVESEATPVHRCSEILAEETGTRRDLKDQPLPGVPAWYTDGSSFIAEGKRRAGAAIVDGKRTVWASSLPEGTSAQKAELVALTQALRLAEGKDINIYTDSRYAFATAHIHGAIYKQRGWLTSAGKDIKNKEEILALLEAIHLPKRVAIIHCPGHQKGNDPVATGNRRADEAAKQAALSTRVLAETTKPAGKRTADGSEFEKRTADGSEFESPKKKAKVE

SEQ ID NO: 924 - protein, 2092 aa, synthetic construct
MPAAKRVKLDGGDKKYSIGLDIGTNSVGWAVITDEYKVPSKKFKVLGNTDRHSIKKNLIGALLFDSGETAEATRLKRTARRRYTRRKNRICYLQEIFSNEMAKVDDSFFHRLEESFLVEEDKKHERHPIFGNIVDEVAYHEKYPTIYHLRKKLVDSTDKADLRLIYLALAHMIKFRGHFLIEGDLNPDNSDVDKLFIQLVQTYNQLFEENPINASGVDAKAILSARLSKSRRLENLIAQLPGEKKNGLFGNLIALSLGLTPNFKSNFDLAEDAKLQLSKDTYDDDLDNLLAQIGDQYADLFLAAKNLSDAILLSDILRVNTEITKAPLSASMIKRYDEHHQDLTLLKALVRQQLPEKYKEIFFDQSKNGYAGYIDGGASQEEFYKFIKPILEKMDGTEELLVKLNREDLLRKQRTFDNGSIPHQIHLGELHAILRRQEDFYPFLKDNREKIEKILTFRIPYYVGPLARGNSRFAWMTRKSEETITPWNFEEVVDKGASAQSFIERMTNFDKNLPNEKVLPKHSLLYEYFTVYNELTKVKYVTEGMRKPAFLSGEQKKAIVDLLFKTNRKVTVKQLKEDYFKKIECFDSVEISGVEDRFNASLGTYHDLLKIIKDKDFLDNEENEDILEDIVLTLTLFEDREMIEERLKTYAHLFDDKVMKQLKRRRYTGWGRLSRKLINGIRDKQSGKTILDFLKSDGFANRNFMQLIHDDSLTFKEDIQKAQVSGQGDSLHEHIANLAGSPAIKKGILQTVKVVDELVKVMGRHKPENIVIEMARENQTTQKGQKNSRERMKRIEEGIKELGSQILKEHPVENTQLQNEKLYLYYLQNGRDMYVDQELDINRLSDYDVDHIVPQSFLKDDSIDNKVLTRSDKARGKSDNVPSEEVVKKMKNYWRQLLNAKLITQRKFDNLTKAERGGLSELDKAGFIKRQLVETRQITKHVAQILDSRMNTKYDENDKLIREVKVITLKSKLVSDFRKDFQFYKVREINNYHHAHDAYLNAVVGTALIKKYPKLESEFVYGDYKVYDVRKMIAKSEQEIGKATAKYFFYSNIMNFFKTEITLANGEIRKRPLIETNGETGEIVWDKGRDFATVRKVLSMPQVNIVKKTEVQTGGFSKESILPKRNSDKLIARKKDWDPKKYGGFDSPTVAYSVLVVAKVEKGKSKKLKSVKELLGITIMERSSFEKNPIDFLEAKGYKEVKKDLIIKLPKYSLFELENGRKRMLASAGELQKGNELALPSKYVNFLYLASHYEKLKGSPEDNEQKQLFVEQHKHYLDEIIEQISEFSKRVILADANLDKVLSAYNKHRDKPIREQAENIIHLFTLTNLGAPAAFKYFDTTIDRKRYTSTKEVLDATLIHQSITGLYETRIDLSQLGGDGGGGSGSSPAPGGVLNLEEEYRLHEKPVPSSIDPSWLQLFPTVWAERAGMGLANQVPPVVVELRSGASPVAVRQYPMSKEAREGIRPHIQRFLDLGVLVPCQSPWNTPLLPVKKPGTNDYRPVQDLREINKRVQDIHPTVPNPYNLLSSLPPSHTWYSVLDLKDAFFCLKLHPNSQPLFAFEWRDPEKGNTGQLTWTRLPQGFKNSPTLFNEALHRDLAPFRALNPQVVLLQYVDDLLVAAPTYRDCKEGTQKLLQELSKLGYRVSAKKAQLCQKEVTYLGYLLKEGKRWLTPARKATVMKIPPPTTPRQVREFLGKAGFCRLFIPGFASLAAPLYPLTKPSIPFIWTEEHQKAFDRIKEALLSAPALALPDLTKPFTLYVDERAGVARGVLTQTLGPWRRPVAYLSKKLDPVASGWPTCLKAVAAVALLLKDADKLTLGQNVTVIASHSLESIVRQPPDRWMTNARMTHYQSLLLNERVSFAPPAVLNPATLLPVESEATPVHRCSEILAEETGTRRDLKDQPLPGVPAWYTDGSSFIAEGKRRAGAAIVDGKRTVWASSLPEGTSAQKAELVALTQALRLAEGKDINIYTDSRYAFATAHIHGAIYKQRGWLTSAGKDIKNKEEILALLEAIHLPKRVAIIHCPGHQKGNDPVATGNRRADEAAKQAALSTRVLAETTKPAGKRTADGSEFEKRTADGSEFESPKKKAKVE

SEQ ID NO: 925 - protein, 2094 aa, synthetic construct
MPAAKRVKLDGGDKKYSIGLDIGTNSVGWAVITDEYKVPSKKFKVLGNTDRHSIKKNLIGALLFDSGETAEATRLKRTARRRYTRRKNRICYLQEIFSNEMAKVDDSFFHRLEESFLVEEDKKHERHPIFGNIVDEVAYHEKYPTIYHLRKKLVDSTDKADLRLIYLALAHMIKFRGHFLIEGDLNPDNSDVDKLFIQLVQTYNQLFEENPINASGVDAKAILSARLSKSRRLENLIAQLPGEKKNGLFGNLIALSLGLTPNFKSNFDLAEDAKLQLSKDTYDDDLDNLLAQIGDQYADLFLAAKNLSDAILLSDILRVNTEITKAPLSASMIKRYDEHHQDLTLLKALVRQQLPEKYKEIFFDQSKNGYAGYIDGGASQEEFYKFIKPILEKMDGTEELLVKLNREDLLRKQRTFDNGSIPHQIHLGELHAILRRQEDFYPFLKDNREKIEKILTFRIPYYVGPLARGNSRFAWMTRKSEETITPWNFEEVVDKGASAQSFIERMTNFDKNLPNEKVLPKHSLLYEYFTVYNELTKVKYVTEGMRKPAFLSGEQKKAIVDLLFKTNRKVTVKQLKEDYFKKIECFDSVEISGVEDRFNASLGTYHDLLKIIKDKDFLDNEENEDILEDIVLTLTLFEDREMIEERLKTYAHLFDDKVMKQLKRRRYTGWGRLSRKLINGIRDKQSGKTILDFLKSDGFANRNFMQLIHDDSLTFKEDIQKAQVSGQGDSLHEHIANLAGSPAIKKGILQTVKVVDELVKVMGRHKPENIVIEMARENQTTQKGQKNSRERMKRIEEGIKELGSQILKEHPVENTQLQNEKLYLYYLQNGRDMYVDQELDINRLSDYDVDHIVPQSFLKDDSIDNKVLTRSDKARGKSDNVPSEEVVKKMKNYWRQLLNAKLITQRKFDNLTKAERGGLSELDKAGFIKRQLVETRQITKHVAQILDSRMNTKYDENDKLIREVKVITLKSKLVSDFRKDFQFYKVREINNYHHAHDAYLNAVVGTALIKKYPKLESEFVYGDYKVYDVRKMIAKSEQEIGKATAKYFFYSNIMNFFKTEITLANGEIRKRPLIETNGETGEIVWDKGRDFATVRKVLSMPQVNIVKKTEVQTGGFSKESILPKRNSDKLIARKKDWDPKKYGGFDSPTVAYSVLVVAKVEKGKSKKLKSVKELLGITIMERSSFEKNPIDFLEAKGYKEVKKDLIIKLPKYSLFELENGRKRMLASAGELQKGNELALPSKYVNFLYLASHYEKLKGSPEDNEQKQLFVEQHKHYLDEIIEQISEFSKRVILADANLDKVLSAYNKHRDKPIREQAENIIHLFTLTNLGAPAAFKYFDTTIDRKRYTSTKEVLDATLIHQSITGLYETRIDLSQLGGDGGGGGEAAAKGSSGGVLNLEEEYRLHEKPVPSSIDPSWLQLFPTVWAERAGMGLANQVPPVVVELRSGASPVAVRQYPMSKEAREGIRPHIQRFLDLGVLVPCQSPWNTPLLPVKKPGTNDYRPVQDLREINKRVQDIHPTVPNPYNLLSSLPPSHTWYSVLDLKDAFFCLKLHPNSQPLFAFEWRDPEKGNTGQLTWTRLPQGFKNSPTLFNEALHRDLAPFRALNPQVVLLQYVDDLLVAAPTYRDCKEGTQKLLQELSKLGYRVSAKKAQLCQKEVTYLGYLLKEGKRWLTPARKATVMKIPPPTTPRQVREFLGKAGFCRLFIPGFASLAAPLYPLTKPSIPFIWTEEHQKAFDRIKEALLSAPALALPDLTKPFTLYVDERAGVARGVLTQTLGPWRRPVAYLSKKLDPVASGWPTCLKAVAAVALLLKDADKLTLGQNVTVIASHSLESIVRQPPDRWMTNARMTHYQSLLLNERVSFAPPAVLNPATLLPVESEATPVHRCSEILAEETGTRRDLKDQPLPGVPAWYTDGSSFIAEGKRRAGAAIVDGKRTVWASSLPEGTSAQKAELVALTQALRLAEGKDINIYTDSRYAFATAHIHGAIYKQRGWLTSAGKDIKNKEEILALLEAIHLPKRVAIIHCPGHQKGNDPVATGNRRADEAAKQAALSTRVLAETTKPAGKRTADGSEFEKRTADGSEFESPKKKAKVE

SEQ ID NO: 926 - protein, 2087 aa, synthetic construct
MPAAKRVKLDGGDKKYSIGLDIGTNSVGWAVITDEYKVPSKKFKVLGNTDRHSIKKNLIGALLFDSGETAEATRLKRTARRRYTRRKNRICYLQEIFSNEMAKVDDSFFHRLEESFLVEEDKKHERHPIFGNIVDEVAYHEKYPTIYHLRKKLVDSTDKADLRLIYLALAHMIKFRGHFLIEGDLNPDNSDVDKLFIQLVQTYNQLFEENPINASGVDAKAILSARLSKSRRLENLIAQLPGEKKNGLFGNLIALSLGLTPNFKSNFDLAEDAKLQLSKDTYDDDLDNLLAQIGDQYADLFLAAKNLSDAILLSDILRVNTEITKAPLSASMIKRYDEHHQDLTLLKALVRQQLPEKYKEIFFDQSKNGYAGYIDGGASQEEFYKFIKPILEKMDGTEELLVKLNREDLLRKQRTFDNGSIPHQIHLGELHAILRRQEDFYPFLKDNREKIEKILTFRIPYYVGPLARGNSRFAWMTRKSEETITPWNFEEVVDKGASAQSFIERMTNFDKNLPNEKVLPKHSLLYEYFTVYNELTKVKYVTEGMRKPAFLSGEQKKAIVDLLFKTNRKVTVKQLKEDYFKKIECFDSVEISGVEDRFNASLGTYHDLLKIIKDKDFLDNEENEDILEDIVLTLTLFEDREMIEERLKTYAHLFDDKVMKQLKRRRYTGWGRLSRKLINGIRDKQSGKTILDFLKSDGFANRNFMQLIHDDSLTFKEDIQKAQVSGQGDSLHEHIANLAGSPAIKKGILQTVKVVDELVKVMGRHKPENIVIEMARENQTTQKGQKNSRERMKRIEEGIKELGSQILKEHPVENTQLQNEKLYLYYLQNGRDMYVDQELDINRLSDYDVDHIVPQSFLKDDSIDNKVLTRSDKARGKSDNVPSEEVVKKMKNYWRQLLNAKLITQRKFDNLTKAERGGLSELDKAGFIKRQLVETRQITKHVAQILDSRMNTKYDENDKLIREVKVITLKSKLVSDFRKDFQFYKVREINNYHHAHDAYLNAVVGTALIKKYPKLESEFVYGDYKVYDVRKMIAKSEQEIGKATAKYFFYSNIMNFFKTEITLANGEIRKRPLIETNGETGEIVWDKGRDFATVRKVLSMPQVNIVKKTEVQTGGFSKESILPKRNSDKLIARKKDWDPKKYGGFDSPTVAYSVLVVAKVEKGKSKKLKSVKELLGITIMERSSFEKNPIDFLEAKGYKEVKKDLIIKLPKYSLFELENGRKRMLASAGELQKGNELALPSKYVNFLYLASHYEKLKGSPEDNEQKQLFVEQHKHYLDEIIEQISEFSKRVILADANLDKVLSAYNKHRDKPIREQAENIIHLFTLTNLGAPAAFKYFDTTIDRKRYTSTKEVLDATLIHQSITGLYETRIDLSQLGGDGGGGGGGGVLNLEEEYRLHEKPVPSSIDPSWLQLFPTVWAERAGMGLANQVPPVVVELRSGASPVAVRQYPMSKEAREGIRPHIQRFLDLGVLVPCQSPWNTPLLPVKKPGTNDYRPVQDLREINKRVQDIHPTVPNPYNLLSSLPPSHTWYSVLDLKDAFFCLKLHPNSQPLFAFEWRDPEKGNTGQLTWTRLPQGFKNSPTLFNEALHRDLAPFRALNPQVVLLQYVDDLLVAAPTYRDCKEGTQKLLQELSKLGYRVSAKKAQLCQKEVTYLGYLLKEGKRWLTPARKATVMKIPPPTTPRQVREFLGKAGFCRLFIPGFASLAAPLYPLTKPSIPFIWTEEHQKAFDRIKEALLSAPALALPDLTKPFTLYVDERAGVARGVLTQTLGPWRRPVAYLSKKLDPVASGWPTCLKAVAAVALLLKDADKLTLGQNVTVIASHSLESIVRQPPDRWMTNARMTHYQSLLLNERVSFAPPAVLNPATLLPVESEATPVHRCSEILAEETGTRRDLKDQPLPGVPAWYTDGSSFIAEGKRRAGAAIVDGKRTVWASSLPEGTSAQKAELVALTQALRLAEGKDINIYTDSRYAFATAHIHGAIYKQRGWLTSAGKDIKNKEEILALLEAIHLPKRVAIIHCPGHQKGNDPVATGNRRADEAAKQAALSTRVLAETTKPAGKRTADGSEFEKRTADGSEFESPKKKAKVE

SEQ ID NO: 927 - protein, 2092 aa, synthetic construct
MPAAKRVKLDGGDKKYSIGLDIGTNSVGWAVITDEYKVPSKKFKVLGNTDRHSIKKNLIGALLFDSGETAEATRLKRTARRRYTRRKNRICYLQEIFSNEMAKVDDSFFHRLEESFLVEEDKKHERHPIFGNIVDEVAYHEKYPTIYHLRKKLVDSTDKADLRLIYLALAHMIKFRGHFLIEGDLNPDNSDVDKLFIQLVQTYNQLFEENPINASGVDAKAILSARLSKSRRLENLIAQLPGEKKNGLFGNLIALSLGLTPNFKSNFDLAEDAKLQLSKDTYDDDLDNLLAQIGDQYADLFLAAKNLSDAILLSDILRVNTEITKAPLSASMIKRYDEHHQDLTLLKALVRQQLPEKYKEIFFDQSKNGYAGYIDGGASQEEFYKFIKPILEKMDGTEELLVKLNREDLLRKQRTFDNGSIPHQIHLGELHAILRRQEDFYPFLKDNREKIEKILTFRIPYYVGPLARGNSRFAWMTRKSEETITPWNFEEVVDKGASAQSFIERMTNFDKNLPNEKVLPKHSLLYEYFTVYNELTKVKYVTEGMRKPAFLSGEQKKAIVDLLFKTNRKVTVKQLKEDYFKKIECFDSVEISGVEDRFNASLGTYHDLLKIIKDKDFLDNEENEDILEDIVLTLTLFEDREMIEERLKTYAHLFDDKVMKQLKRRRYTGWGRLSRKLINGIRDKQSGKTILDFLKSDGFANRNFMQLIHDDSLTFKEDIQKAQVSGQGDSLHEHIANLAGSPAIKKGILQTVKVVDELVKVMGRHKPENIVIEMARENQTTQKGQKNSRERMKRIEEGIKELGSQILKEHPVENTQLQNEKLYLYYLQNGRDMYVDQELDINRLSDYDVDHIVPQSFLKDDSIDNKVLTRSDKARGKSDNVPSEEVVKKMKNYWRQLLNAKLITQRKFDNLTKAERGGLSELDKAGFIKRQLVETRQITKHVAQILDSRMNTKYDENDKLIREVKVITLKSKLVSDFRKDFQFYKVREINNYHHAHDAYLNAVVGTALIKKYPKLESEFVYGDYKVYDVRKMIAKSEQEIGKATAKYFFYSNIMNFFKTEITLANGEIRKRPLIETNGETGEIVWDKGRDFATVRKVLSMPQVNIVKKTEVQTGGFSKESILPKRNSDKLIARKKDWDPKKYGGFDSPTVAYSVLVVAKVEKGKSKKLKSVKELLGITIMERSSFEKNPIDFLEAKGYKEVKKDLIIKLPKYSLFELENGRKRMLASAGELQKGNELALPSKYVNFLYLASHYEKLKGSPEDNEQKQLFVEQHKHYLDEIIEQISEFSKRVILADANLDKVLSAYNKHRDKPIREQAENIIHLFTLTNLGAPAAFKYFDTTIDRKRYTSTKEVLDATLIHQSITGLYETRIDLSQLGGDGGPAPGSSGGGGGVLNLEEEYRLHEKPVPSSIDPSWLQLFPTVWAERAGMGLANQVPPVVVELRSGASPVAVRQYPMSKEAREGIRPHIQRFLDLGVLVPCQSPWNTPLLPVKKPGTNDYRPVQDLREINKRVQDIHPTVPNPYNLLSSLPPSHTWYSVLDLKDAFFCLKLHPNSQPLFAFEWRDPEKGNTGQLTWTRLPQGFKNSPTLFNEALHRDLAPFRALNPQVVLLQYVDDLLVAAPTYRDCKEGTQKLLQELSKLGYRVSAKKAQLCQKEVTYLGYLLKEGKRWLTPARKATVMKIPPPTTPRQVREFLGKAGFCRLFIPGFASLAAPLYPLTKPSIPFIWTEEHQKAFDRIKEALLSAPALALPDLTKPFTLYVDERAGVARGVLTQTLGPWRRPVAYLSKKLDPVASGWPTCLKAVAAVALLLKDADKLTLGQNVTVIASHSLESIVRQPPDRWMTNARMTHYQSLLLNERVSFAPPAVLNPATLLPVESEATPVHRCSEILAEETGTRRDLKDQPLPGVPAWYTDGSSFIAEGKRRAGAAIVDGKRTVWASSLPEGTSAQKAELVALTQALRLAEGKDINIYTDSRYAFATAHIHGAIYKQRGWLTSAGKDIKNKEEILALLEAIHLPKRVAIIHCPGHQKGNDPVATGNRRADEAAKQAALSTRVLAETTKPAGKRTADGSEFEKRTADGSEFESPKKKAKVE

SEQ ID NO: 928 - protein, 2094 aa, synthetic construct
MPAAKRVKLDGGDKKYSIGLDIGTNSVGWAVITDEYKVPSKKFKVLGNTDRHSIKKNLIGALLFDSGETAEATRLKRTARRRYTRRKNRICYLQEIFSNEMAKVDDSFFHRLEESFLVEEDKKHERHPIFGNIVDEVAYHEKYPTIYHLRKKLVDSTDKADLRLIYLALAHMIKFRGHFLIEGDLNPDNSDVDKLFIQLVQTYNQLFEENPINASGVDAKAILSARLSKSRRLENLIAQLPGEKKNGLFGNLIALSLGLTPNFKSNFDLAEDAKLQLSKDTYDDDLDNLLAQIGDQYADLFLAAKNLSDAILLSDILRVNTEITKAPLSASMIKRYDEHHQDLTLLKALVRQQLPEKYKEIFFDQSKNGYAGYIDGGASQEEFYKFIKPILEKMDGTEELLVKLNREDLLRKQRTFDNGSIPHQIHLGELHAILRRQEDFYPFLKDNREKIEKILTFRIPYYVGPLARGNSRFAWMTRKSEETITPWNFEEVVDKGASAQSFIERMTNFDKNLPNEKVLPKHSLLYEYFTVYNELTKVKYVTEGMRKPAFLSGEQKKAIVDLLFKTNRKVTVKQLKEDYFKKIECFDSVEISGVEDRFNASLGTYHDLLKIIKDKDFLDNEENEDILEDIVLTLTLFEDREMIEERLKTYAHLFDDKVMKQLKRRRYTGWGRLSRKLINGIRDKQSGKTILDFLKSDGFANRNFMQLIHDDSLTFKEDIQKAQVSGQGDSLHEHIANLAGSPAIKKGILQTVKVVDELVKVMGRHKPENIVIEMARENQTTQKGQKNSRERMKRIEEGIKELGSQILKEHPVENTQLQNEKLYLYYLQNGRDMYVDQELDINRLSDYDVDHIVPQSFLKDDSIDNKVLTRSDKARGKSDNVPSEEVVKKMKNYWRQLLNAKLITQRKFDNLTKAERGGLSELDKAGFIKRQLVETRQITKHVAQILDSRMNTKYDENDKLIREVKVITLKSKLVSDFRKDFQFYKVREINNYHHAHDAYLNAVVGTALIKKYPKLESEFVYGDYKVYDVRKMIAKSEQEIGKATAKYFFYSNIMNFFKTEITLANGEIRKRPLIETNGETGEIVWDKGRDFATVRKVLSMPQVNIVKKTEVQTGGFSKESILPKRNSDKLIARKKDWDPKKYGGFDSPTVAYSVLVVAKVEKGKSKKLKSVKELLGITIMERSSFEKNPIDFLEAKGYKEVKKDLIIKLPKYSLFELENGRKRMLASAGELQKGNELALPSKYVNFLYLASHYEKLKGSPEDNEQKQLFVEQHKHYLDEIIEQISEFSKRVILADANLDKVLSAYNKHRDKPIREQAENIIHLFTLTNLGAPAAFKYFDTTIDRKRYTSTKEVLDATLIHQSITGLYETRIDLSQLGGDGGGGGEAAAKPAPGGVLNLEEEYRLHEKPVPSSIDPSWLQLFPTVWAERAGMGLANQVPPVVVELRSGASPVAVRQYPMSKEAREGIRPHIQRFLDLGVLVPCQSPWNTPLLPVKKPGTNDYRPVQDLREINKRVQDIHPTVPNPYNLLSSLPPSHTWYSVLDLKDAFFCLKLHPNSQPLFAFEWRDPEKGNTGQLTWTRLPQGFKNSPTLFNEALHRDLAPFRALNPQVVLLQYVDDLLVAAPTYRDCKEGTQKLLQELSKLGYRVSAKKAQLCQKEVTYLGYLLKEGKRWLTPARKATVMKIPPPTTPRQVREFLGKAGFCRLFIPGFASLAAPLYPLTKPSIPFIWTEEHQKAFDRIKEALLSAPALALPDLTKPFTLYVDERAGVARGVLTQTLGPWRRPVAYLSKKLDPVASGWPTCLKAVAAVALLLKDADKLTLGQNVTVIASHSLESIVRQPPDRWMTNARMTHYQSLLLNERVSFAPPAVLNPATLLPVESEATPVHRCSEILAEETGTRRDLKDQPLPGVPAWYTDGSSFIAEGKRRAGAAIVDGKRTVWASSLPEGTSAQKAELVALTQALRLAEGKDINIYTDSRYAFATAHIHGAIYKQRGWLTSAGKDIKNKEEILALLEAIHLPKRVAIIHCPGHQKGNDPVATGNRRADEAAKQAALSTRVLAETTKPAGKRTADGSEFEKRTADGSEFESPKKKAKVE

SEQ ID NO: 929 - protein, 2092 aa, synthetic construct
MPAAKRVKLDGGDKKYSIGLDIGTNSVGWAVITDEYKVPSKKFKVLGNTDRHSIKKNLIGALLFDSGETAEATRLKRTARRRYTRRKNRICYLQEIFSNEMAKVDDSFFHRLEESFLVEEDKKHERHPIFGNIVDEVAYHEKYPTIYHLRKKLVDSTDKADLRLIYLALAHMIKFRGHFLIEGDLNPDNSDVDKLFIQLVQTYNQLFEENPINASGVDAKAILSARLSKSRRLENLIAQLPGEKKNGLFGNLIALSLGLTPNFKSNFDLAEDAKLQLSKDTYDDDLDNLLAQIGDQYADLFLAAKNLSDAILLSDILRVNTEITKAPLSASMIKRYDEHHQDLTLLKALVRQQLPEKYKEIFFDQSKNGYAGYIDGGASQEEFYKFIKPILEKMDGTEELLVKLNREDLLRKQRTFDNGSIPHQIHLGELHAILRRQEDFYPFLKDNREKIEKILTFRIPYYVGPLARGNSRFAWMTRKSEETITPWNFEEVVDKGASAQSFIERMTNFDKNLPNEKVLPKHSLLYEYFTVYNELTKVKYVTEGMRKPAFLSGEQKKAIVDLLFKTNRKVTVKQLKEDYFKKIECFDSVEISGVEDRFNASLGTYHDLLKIIKDKDFLDNEENEDILEDIVLTLTLFEDREMIEERLKTYAHLFDDKVMKQLKRRRYTGWGRLSRKLINGIRDKQSGKTILDFLKSDGFANRNFMQLIHDDSLTFKEDIQKAQVSGQGDSLHEHIANLAGSPAIKKGILQTVKVVDELVKVMGRHKPENIVIEMARENQTTQKGQKNSRERMKRIEEGIKELGSQILKEHPVENTQLQNEKLYLYYLQNGRDMYVDQELDINRLSDYDVDHIVPQSFLKDDSIDNKVLTRSDKARGKSDNVPSEEVVKKMKNYWRQLLNAKLITQRKFDNLTKAERGGLSELDKAGFIKRQLVETRQITKHVAQILDSRMNTKYDENDKLIREVKVITLKSKLVSDFRKDFQFYKVREINNYHHAHDAYLNAVVGTALIKKYPKLESEFVYGDYKVYDVRKMIAKSEQEIGKATAKYFFYSNIMNFFKTEITLANGEIRKRPLIETNGETGEIVWDKGRDFATVRKVLSMPQVNIVKKTEVQTGGFSKESILPKRNSDKLIARKKDWDPKKYGGFDSPTVAYSVLVVAKVEKGKSKKLKSVKELLGITIMERSSFEKNPIDFLEAKGYKEVKKDLIIKLPKYSLFELENGRKRMLASAGELQKGNELALPSKYVNFLYLASHYEKLKGSPEDNEQKQLFVEQHKHYLDEIIEQISEFSKRVILADANLDKVLSAYNKHRDKPIREQAENIIHLFTLTNLGAPAAFKYFDTTIDRKRYTSTKEVLDATLIHQSITGLYETRIDLSQLGGDGGGSSGSSGSSGGVLNLEEEYRLHEKPVPSSIDPSWLQLFPTVWAERAGMGLANQVPPVVVELRSGASPVAVRQYPMSKEAREGIRPHIQRFLDLGVLVPCQSPWNTPLLPVKKPGTNDYRPVQDLREINKRVQDIHPTVPNPYNLLSSLPPSHTWYSVLDLKDAFFCLKLHPNSQPLFAFEWRDPEKGNTGQLTWTRLPQGFKNSPTLFNEALHRDLAPFRALNPQVVLLQYVDDLLVAAPTYRDCKEGTQKLLQELSKLGYRVSAKKAQLCQKEVTYLGYLLKEGKRWLTPARKATVMKIPPPTTPRQVREFLGKAGFCRLFIPGFASLAAPLYPLTKPSIPFIWTEEHQKAFDRIKEALLSAPALALPDLTKPFTLYVDERAGVARGVLTQTLGPWRRPVAYLSKKLDPVASGWPTCLKAVAAVALLLKDADKLTLGQNVTVIASHSLESIVRQPPDRWMTNARMTHYQSLLLNERVSFAPPAVLNPATLLPVESEATPVHRCSEILAEETGTRRDLKDQPLPGVPAWYTDGSSFIAEGKRRAGAAIVDGKRTVWASSLPEGTSAQKAELVALTQALRLAEGKDINIYTDSRYAFATAHIHGAIYKQRGWLTSAGKDIKNKEEILALLEAIHLPKRVAIIHCPGHQKGNDPVATGNRRADEAAKQAALSTRVLAETTKPAGKRTADGSEFEKRTADGSEFESPKKKAKVE

SEQ ID NO: 930 - protein, 2092 aa, synthetic construct
MPAAKRVKLDGGDKKYSIGLDIGTNSVGWAVITDEYKVPSKKFKVLGNTDRHSIKKNLIGALLFDSGETAEATRLKRTARRRYTRRKNRICYLQEIFSNEMAKVDDSFFHRLEESFLVEEDKKHERHPIFGNIVDEVAYHEKYPTIYHLRKKLVDSTDKADLRLIYLALAHMIKFRGHFLIEGDLNPDNSDVDKLFIQLVQTYNQLFEENPINASGVDAKAILSARLSKSRRLENLIAQLPGEKKNGLFGNLIALSLGLTPNFKSNFDLAEDAKLQLSKDTYDDDLDNLLAQIGDQYADLFLAAKNLSDAILLSDILRVNTEITKAPLSASMIKRYDEHHQDLTLLKALVRQQLPEKYKEIFFDQSKNGYAGYIDGGASQEEFYKFIKPILEKMDGTEELLVKLNREDLLRKQRTFDNGSIPHQIHLGELHAILRRQEDFYPFLKDNREKIEKILTFRIPYYVGPLARGNSRFAWMTRKSEETITPWNFEEVVDKGASAQSFIERMTNFDKNLPNEKVLPKHSLLYEYFTVYNELTKVKYVTEGMRKPAFLSGEQKKAIVDLLFKTNRKVTVKQLKEDYFKKIECFDSVEISGVEDRFNASLGTYHDLLKIIKDKDFLDNEENEDILEDIVLTLTLFEDREMIEERLKTYAHLFDDKVMKQLKRRRYTGWGRLSRKLINGIRDKQSGKTILDFLKSDGFANRNFMQLIHDDSLTFKEDIQKAQVSGQGDSLHEHIANLAGSPAIKKGILQTVKVVDELVKVMGRHKPENIVIEMARENQTTQKGQKNSRERMKRIEEGIKELGSQILKEHPVENTQLQNEKLYLYYLQNGRDMYVDQELDINRLSDYDVDHIVPQSFLKDDSIDNKVLTRSDKARGKSDNVPSEEVVKKMKNYWRQLLNAKLITQRKFDNLTKAERGGLSELDKAGFIKRQLVETRQITKHVAQILDSRMNTKYDENDKLIREVKVITLKSKLVSDFRKDFQFYKVREINNYHHAHDAYLNAVVGTALIKKYPKLESEFVYGDYKVYDVRKMIAKSEQEIGKATAKYFFYSNIMNFFKTEITLANGEIRKRPLIETNGETGEIVWDKGRDFATVRKVLSMPQVNIVKKTEVQTGGFSKESILPKRNSDKLIARKKDWDPKKYGGFDSPTVAYSVLVVAKVEKGKSKKLKSVKELLGITIMERSSFEKNPIDFLEAKGYKEVKKDLIIKLPKYSLFELENGRKRMLASAGELQKGNELALPSKYVNFLYLASHYEKLKGSPEDNEQKQLFVEQHKHYLDEIIEQISEFSKRVILADANLDKVLSAYNKHRDKPIREQAENIIHLFTLTNLGAPAAFKYFDTTIDRKRYTSTKEVLDATLIHQSITGLYETRIDLSQLGGDGGGGSPAPGGGGGVLNLEEEYRLHEKPVPSSIDPSWLQLFPTVWAERAGMGLANQVPPVVVELRSGASPVAVRQYPMSKEAREGIRPHIQRFLDLGVLVPCQSPWNTPLLPVKKPGTNDYRPVQDLREINKRVQDIHPTVPNPYNLLSSLPPSHTWYSVLDLKDAFFCLKLHPNSQPLFAFEWRDPEKGNTGQLTWTRLPQGFKNSPTLFNEALHRDLAPFRALNPQVVLLQYVDDLLVAAPTYRDCKEGTQKLLQELSKLGYRVSAKKAQLCQKEVTYLGYLLKEGKRWLTPARKATVMKIPPPTTPRQVREFLGKAGFCRLFIPGFASLAAPLYPLTKPSIPFIWTEEHQKAFDRIKEALLSAPALALPDLTKPFTLYVDERAGVARGVLTQTLGPWRRPVAYLSKKLDPVASGWPTCLKAVAAVALLLKDADKLTLGQNVTVIASHSLESIVRQPPDRWMTNARMTHYQSLLLNERVSFAPPAVLNPATLLPVESEATPVHRCSEILAEETGTRRDLKDQPLPGVPAWYTDGSSFIAEGKRRAGAAIVDGKRTVWASSLPEGTSAQKAELVALTQALRLAEGKDINIYTDSRYAFATAHIHGAIYKQRGWLTSAGKDIKNKEEILALLEAIHLPKRVAIIHCPGHQKGNDPVATGNRRADEAAKQAALSTRVLAETTKPAGKRTADGSEFEKRTADGSEFESPKKKAKVE

SEQ ID NO: 931 - protein, 2091 aa, synthetic construct
MPAAKRVKLDGGDKKYSIGLDIGTNSVGWAVITDEYKVPSKKFKVLGNTDRHSIKKNLIGALLFDSGETAEATRLKRTARRRYTRRKNRICYLQEIFSNEMAKVDDSFFHRLEESFLVEEDKKHERHPIFGNIVDEVAYHEKYPTIYHLRKKLVDSTDKADLRLIYLALAHMIKFRGHFLIEGDLNPDNSDVDKLFIQLVQTYNQLFEENPINASGVDAKAILSARLSKSRRLENLIAQLPGEKKNGLFGNLIALSLGLTPNFKSNFDLAEDAKLQLSKDTYDDDLDNLLAQIGDQYADLFLAAKNLSDAILLSDILRVNTEITKAPLSASMIKRYDEHHQDLTLLKALVRQQLPEKYKEIFFDQSKNGYAGYIDGGASQEEFYKFIKPILEKMDGTEELLVKLNREDLLRKQRTFDNGSIPHQIHLGELHAILRRQEDFYPFLKDNREKIEKILTFRIPYYVGPLARGNSRFAWMTRKSEETITPWNFEEVVDKGASAQSFIERMTNFDKNLPNEKVLPKHSLLYEYFTVYNELTKVKYVTEGMRKPAFLSGEQKKAIVDLLFKTNRKVTVKQLKEDYFKKIECFDSVEISGVEDRFNASLGTYHDLLKIIKDKDFLDNEENEDILEDIVLTLTLFEDREMIEERLKTYAHLFDDKVMKQLKRRRYTGWGRLSRKLINGIRDKQSGKTILDFLKSDGFANRNFMQLIHDDSLTFKEDIQKAQVSGQGDSLHEHIANLAGSPAIKKGILQTVKVVDELVKVMGRHKPENIVIEMARENQTTQKGQKNSRERMKRIEEGIKELGSQILKEHPVENTQLQNEKLYLYYLQNGRDMYVDQELDINRLSDYDVDHIVPQSFLKDDSIDNKVLTRSDKARGKSDNVPSEEVVKKMKNYWRQLLNAKLITQRKFDNLTKAERGGLSELDKAGFIKRQLVETRQITKHVAQILDSRMNTKYDENDKLIREVKVITLKSKLVSDFRKDFQFYKVREINNYHHAHDAYLNAVVGTALIKKYPKLESEFVYGDYKVYDVRKMIAKSEQEIGKATAKYFFYSNIMNFFKTEITLANGEIRKRPLIETNGETGEIVWDKGRDFATVRKVLSMPQVNIVKKTEVQTGGFSKESILPKRNSDKLIARKKDWDPKKYGGFDSPTVAYSVLVVAKVEKGKSKKLKSVKELLGITIMERSSFEKNPIDFLEAKGYKEVKKDLIIKLPKYSLFELENGRKRMLASAGELQKGNELALPSKYVNFLYLASHYEKLKGSPEDNEQKQLFVEQHKHYLDEIIEQISEFSKRVILADANLDKVLSAYNKHRDKPIREQAENIIHLFTLTNLGAPAAFKYFDTTIDRKRYTSTKEVLDATLIHQSITGLYETRIDLSQLGGDGGEAAAKGGGGGVLNLEEEYRLHEKPVPSSIDPSWLQLFPTVWAERAGMGLANQVPPVVVELRSGASPVAVRQYPMSKEAREGIRPHIQRFLDLGVLVPCQSPWNTPLLPVKKPGTNDYRPVQDLREINKRVQDIHPTVPNPYNLLSSLPPSHTWYSVLDLKDAFFCLKLHPNSQPLFAFEWRDPEKGNTGQLTWTRLPQGFKNSPTLFNEALHRDLAPFRALNPQVVLLQYVDDLLVAAPTYRDCKEGTQKLLQELSKLGYRVSAKKAQLCQKEVTYLGYLLKEGKRWLTPARKATVMKIPPPTTPRQVREFLGKAGFCRLFIPGFASLAAPLYPLTKPSIPFIWTEEHQKAFDRIKEALLSAPALALPDLTKPFTLYVDERAGVARGVLTQTLGPWRRPVAYLSKKLDPVASGWPTCLKAVAAVALLLKDADKLTLGQNVTVIASHSLESIVRQPPDRWMTNARMTHYQSLLLNERVSFAPPAVLNPATLLPVESEATPVHRCSEILAEETGTRRDLKDQPLPGVPAWYTDGSSFIAEGKRRAGAAIVDGKRTVWASSLPEGTSAQKAELVALTQALRLAEGKDINIYTDSRYAFATAHIHGAIYKQRGWLTSAGKDIKNKEEILALLEAIHLPKRVAIIHCPGHQKGNDPVATGNRRADEAAKQAALSTRVLAETTKPAGKRTADGSEFEKRTADGSEFESPKKKAKVE

SEQ ID NO: 932 - protein, 2089 aa, synthetic construct
MPAAKRVKLDGGDKKYSIGLDIGTNSVGWAVITDEYKVPSKKFKVLGNTDRHSIKKNLIGALLFDSGETAEATRLKRTARRRYTRRKNRICYLQEIFSNEMAKVDDSFFHRLEESFLVEEDKKHERHPIFGNIVDEVAYHEKYPTIYHLRKKLVDSTDKADLRLIYLALAHMIKFRGHFLIEGDLNPDNSDVDKLFIQLVQTYNQLFEENPINASGVDAKAILSARLSKSRRLENLIAQLPGEKKNGLFGNLIALSLGLTPNFKSNFDLAEDAKLQLSKDTYDDDLDNLLAQIGDQYADLFLAAKNLSDAILLSDILRVNTEITKAPLSASMIKRYDEHHQDLTLLKALVRQQLPEKYKEIFFDQSKNGYAGYIDGGASQEEFYKFIKPILEKMDGTEELLVKLNREDLLRKQRTFDNGSIPHQIHLGELHAILRRQEDFYPFLKDNREKIEKILTFRIPYYVGPLARGNSRFAWMTRKSEETITPWNFEEVVDKGASAQSFIERMTNFDKNLPNEKVLPKHSLLYEYFTVYNELTKVKYVTEGMRKPAFLSGEQKKAIVDLLFKTNRKVTVKQLKEDYFKKIECFDSVEISGVEDRFNASLGTYHDLLKIIKDKDFLDNEENEDILEDIVLTLTLFEDREMIEERLKTYAHLFDDKVMKQLKRRRYTGWGRLSRKLINGIRDKQSGKTILDFLKSDGFANRNFMQLIHDDSLTFKEDIQKAQVSGQGDSLHEHIANLAGSPAIKKGILQTVKVVDELVKVMGRHKPENIVIEMARENQTTQKGQKNSRERMKRIEEGIKELGSQILKEHPVENTQLQNEKLYLYYLQNGRDMYVDQELDINRLSDYDVDHIVPQSFLKDDSIDNKVLTRSDKARGKSDNVPSEEVVKKMKNYWRQLLNAKLITQRKFDNLTKAERGGLSELDKAGFIKRQLVETRQITKHVAQILDSRMNTKYDENDKLIREVKVITLKSKLVSDFRKDFQFYKVREINNYHHAHDAYLNAVVGTALIKKYPKLESEFVYGDYKVYDVRKMIAKSEQEIGKATAKYFFYSNIMNFFKTEITLANGEIRKRPLIETNGETGEIVWDKGRDFATVRKVLSMPQVNIVKKTEVQTGGFSKESILPKRNSDKLIARKKDWDPKKYGGFDSPTVAYSVLVVAKVEKGKSKKLKSVKELLGITIMERSSFEKNPIDFLEAKGYKEVKKDLIIKLPKYSLFELENGRKRMLASAGELQKGNELALPSKYVNFLYLASHYEKLKGSPEDNEQKQLFVEQHKHYLDEIIEQISEFSKRVILADANLDKVLSAYNKHRDKPIREQAENIIHLFTLTNLGAPAAFKYFDTTIDRKRYTSTKEVLDATLIHQSITGLYETRIDLSQLGGDGGGSSGSSGGVLNLEEEYRLHEKPVPSSIDPSWLQLFPTVWAERAGMGLANQVPPVVVELRSGASPVAVRQYPMSKEAREGIRPHIQRFLDLGVLVPCQSPWNTPLLPVKKPGTNDYRPVQDLREINKRVQDIHPTVPNPYNLLSSLPPSHTWYSVLDLKDAFFCLKLHPNSQPLFAFEWRDPEKGNTGQLTWTRLPQGFKNSPTLFNEALHRDLAPFRALNPQVVLLQYVDDLLVAAPTYRDCKEGTQKLLQELSKLGYRVSAKKAQLCQKEVTYLGYLLKEGKRWLTPARKATVMKIPPPTTPRQVREFLGKAGFCRLFIPGFASLAAPLYPLTKPSIPFIWTEEHQKAFDRIKEALLSAPALALPDLTKPFTLYVDERAGVARGVLTQTLGPWRRPVAYLSKKLDPVASGWPTCLKAVAAVALLLKDADKLTLGQNVTVIASHSLESIVRQPPDRWMTNARMTHYQSLLLNERVSFAPPAVLNPATLLPVESEATPVHRCSEILAEETGTRRDLKDQPLPGVPAWYTDGSSFIAEGKRRAGAAIVDGKRTVWASSLPEGTSAQKAELVALTQALRLAEGKDINIYTDSRYAFATAHIHGAIYKQRGWLTSAGKDIKNKEEILALLEAIHLPKRVAIIHCPGHQKGNDPVATGNRRADEAAKQAALSTRVLAETTKPAGKRTADGSEFEKRTADGSEFESPKKKAKVE

SEQ ID NO: 933 - protein, 2098 aa, synthetic construct
MPAAKRVKLDGGDKKYSIGLDIGTNSVGWAVITDEYKVPSKKFKVLGNTDRHSIKKNLIGALLFDSGETAEATRLKRTARRRYTRRKNRICYLQEIFSNEMAKVDDSFFHRLEESFLVEEDKKHERHPIFGNIVDEVAYHEKYPTIYHLRKKLVDSTDKADLRLIYLALAHMIKFRGHFLIEGDLNPDNSDVDKLFIQLVQTYNQLFEENPINASGVDAKAILSARLSKSRRLENLIAQLPGEKKNGLFGNLIALSLGLTPNFKSNFDLAEDAKLQLSKDTYDDDLDNLLAQIGDQYADLFLAAKNLSDAILLSDILRVNTEITKAPLSASMIKRYDEHHQDLTLLKALVRQQLPEKYKEIFFDQSKNGYAGYIDGGASQEEFYKFIKPILEKMDGTEELLVKLNREDLLRKQRTFDNGSIPHQIHLGELHAILRRQEDFYPFLKDNREKIEKILTFRIPYYVGPLARGNSRFAWMTRKSEETITPWNFEEVVDKGASAQSFIERMTNFDKNLPNEKVLPKHSLLYEYFTVYNELTKVKYVTEGMRKPAFLSGEQKKAIVDLLFKTNRKVTVKQLKEDYFKKIECFDSVEISGVEDRFNASLGTYHDLLKIIKDKDFLDNEENEDILEDIVLTLTLFEDREMIEERLKTYAHLFDDKVMKQLKRRRYTGWGRLSRKLINGIRDKQSGKTILDFLKSDGFANRNFMQLIHDDSLTFKEDIQKAQVSGQGDSLHEHIANLAGSPAIKKGILQTVKVVDELVKVMGRHKPENIVIEMARENQTTQKGQKNSRERMKRIEEGIKELGSQILKEHPVENTQLQNEKLYLYYLQNGRDMYVDQELDINRLSDYDVDHIVPQSFLKDDSIDNKVLTRSDKARGKSDNVPSEEVVKKMKNYWRQLLNAKLITQRKFDNLTKAERGGLSELDKAGFIKRQLVETRQITKHVAQILDSRMNTKYDENDKLIREVKVITLKSKLVSDFRKDFQFYKVREINNYHHAHDAYLNAVVGTALIKKYPKLESEFVYGDYKVYDVRKMIAKSEQEIGKATAKYFFYSNIMNFFKTEITLANGEIRKRPLIETNGETGEIVWDKGRDFATVRKVLSMPQVNIVKKTEVQTGGFSKESILPKRNSDKLIARKKDWDPKKYGGFDSPTVAYSVLVVAKVEKGKSKKLKSVKELLGITIMERSSFEKNPIDFLEAKGYKEVKKDLIIKLPKYSLFELENGRKRMLASAGELQKGNELALPSKYVNFLYLASHYEKLKGSPEDNEQKQLFVEQHKHYLDEIIEQISEFSKRVILADANLDKVLSAYNKHRDKPIREQAENIIHLFTLTNLGAPAAFKYFDTTIDRKRYTSTKEVLDATLIHQSITGLYETRIDLSQLGGDGGEAAAKEAAAKEAAAKGGVLNLEEEYRLHEKPVPSSIDPSWLQLFPTVWAERAGMGLANQVPPVVVELRSGASPVAVRQYPMSKEAREGIRPHIQRFLDLGVLVPCQSPWNTPLLPVKKPGTNDYRPVQDLREINKRVQDIHPTVPNPYNLLSSLPPSHTWYSVLDLKDAFFCLKLHPNSQPLFAFEWRDPEKGNTGQLTWTRLPQGFKNSPTLFNEALHRDLAPFRALNPQVVLLQYVDDLLVAAPTYRDCKEGTQKLLQELSKLGYRVSAKKAQLCQKEVTYLGYLLKEGKRWLTPARKATVMKIPPPTTPRQVREFLGKAGFCRLFIPGFASLAAPLYPLTKPSIPFIWTEEHQKAFDRIKEALLSAPALALPDLTKPFTLYVDERAGVARGVLTQTLGPWRRPVAYLSKKLDPVASGWPTCLKAVAAVALLLKDADKLTLGQNVTVIASHSLESIVRQPPDRWMTNARMTHYQSLLLNERVSFAPPAVLNPATLLPVESEATPVHRCSEILAEETGTRRDLKDQPLPGVPAWYTDGSSFIAEGKRRAGAAIVDGKRTVWASSLPEGTSAQKAELVALTQALRLAEGKDINIYTDSRYAFATAHIHGAIYKQRGWLTSAGKDIKNKEEILALLEAIHLPKRVAIIHCPGHQKGNDPVATGNRRADEAAKQAALSTRVLAETTKPAGKRTADGSEFEKRTADGSEFESPKKKAKVE

SEQ ID NO: 934 - protein, 2091 aa, synthetic construct
MPAAKRVKLDGGDKKYSIGLDIGTNSVGWAVITDEYKVPSKKFKVLGNTDRHSIKKNLIGALLFDSGETAEATRLKRTARRRYTRRKNRICYLQEIFSNEMAKVDDSFFHRLEESFLVEEDKKHERHPIFGNIVDEVAYHEKYPTIYHLRKKLVDSTDKADLRLIYLALAHMIKFRGHFLIEGDLNPDNSDVDKLFIQLVQTYNQLFEENPINASGVDAKAILSARLSKSRRLENLIAQLPGEKKNGLFGNLIALSLGLTPNFKSNFDLAEDAKLQLSKDTYDDDLDNLLAQIGDQYADLFLAAKNLSDAILLSDILRVNTEITKAPLSASMIKRYDEHHQDLTLLKALVRQQLPEKYKEIFFDQSKNGYAGYIDGGASQEEFYKFIKPILEKMDGTEELLVKLNREDLLRKQRTFDNGSIPHQIHLGELHAILRRQEDFYPFLKDNREKIEKILTFRIPYYVGPLARGNSRFAWMTRKSEETITPWNFEEVVDKGASAQSFIERMTNFDKNLPNEKVLPKHSLLYEYFTVYNELTKVKYVTEGMRKPAFLSGEQKKAIVDLLFKTNRKVTVKQLKEDYFKKIECFDSVEISGVEDRFNASLGTYHDLLKIIKDKDFLDNEENEDILEDIVLTLTLFEDREMIEERLKTYAHLFDDKVMKQLKRRRYTGWGRLSRKLINGIRDKQSGKTILDFLKSDGFANRNFMQLIHDDSLTFKEDIQKAQVSGQGDSLHEHIANLAGSPAIKKGILQTVKVVDELVKVMGRHKPENIVIEMARENQTTQKGQKNSRERMKRIEEGIKELGSQILKEHPVENTQLQNEKLYLYYLQNGRDMYVDQELDINRLSDYDVDHIVPQSFLKDDSIDNKVLTRSDKARGKSDNVPSEEVVKKMKNYWRQLLNAKLITQRKFDNLTKAERGGLSELDKAGFIKRQLVETRQITKHVAQILDSRMNTKYDENDKLIREVKVITLKSKLVSDFRKDFQFYKVREINNYHHAHDAYLNAVVGTALIKKYPKLESEFVYGDYKVYDVRKMIAKSEQEIGKATAKYFFYSNIMNFFKTEITLANGEIRKRPLIETNGETGEIVWDKGRDFATVRKVLSMPQVNIVKKTEVQTGGFSKESILPKRNSDKLIARKKDWDPKKYGGFDSPTVAYSVLVVAKVEKGKSKKLKSVKELLGITIMERSSFEKNPIDFLEAKGYKEVKKDLIIKLPKYSLFELENGRKRMLASAGELQKGNELALPSKYVNFLYLASHYEKLKGSPEDNEQKQLFVEQHKHYLDEIIEQISEFSKRVILADANLDKVLSAYNKHRDKPIREQAENIIHLFTLTNLGAPAAFKYFDTTIDRKRYTSTKEVLDATLIHQSITGLYETRIDLSQLGGDGGGGGEAAAKGGVLNLEEEYRLHEKPVPSSIDPSWLQLFPTVWAERAGMGLANQVPPVVVELRSGASPVAVRQYPMSKEAREGIRPHIQRFLDLGVLVPCQSPWNTPLLPVKKPGTNDYRPVQDLREINKRVQDIHPTVPNPYNLLSSLPPSHTWYSVLDLKDAFFCLKLHPNSQPLFAFEWRDPEKGNTGQLTWTRLPQGFKNSPTLFNEALHRDLAPFRALNPQVVLLQYVDDLLVAAPTYRDCKEGTQKLLQELSKLGYRVSAKKAQLCQKEVTYLGYLLKEGKRWLTPARKATVMKIPPPTTPRQVREFLGKAGFCRLFIPGFASLAAPLYPLTKPSIPFIWTEEHQKAFDRIKEALLSAPALALPDLTKPFTLYVDERAGVARGVLTQTLGPWRRPVAYLSKKLDPVASGWPTCLKAVAAVALLLKDADKLTLGQNVTVIASHSLESIVRQPPDRWMTNARMTHYQSLLLNERVSFAPPAVLNPATLLPVESEATPVHRCSEILAEETGTRRDLKDQPLPGVPAWYTDGSSFIAEGKRRAGAAIVDGKRTVWASSLPEGTSAQKAELVALTQALRLAEGKDINIYTDSRYAFATAHIHGAIYKQRGWLTSAGKDIKNKEEILALLEAIHLPKRVAIIHCPGHQKGNDPVATGNRRADEAAKQAALSTRVLAETTKPAGKRTADGSEFEKRTADGSEFESPKKKAKVE

SEQ ID NO: 935 - protein, 2103 aa, synthetic construct
MPAAKRVKLDGGDKKYSIGLDIGTNSVGWAVITDEYKVPSKKFKVLGNTDRHSIKKNLIGALLFDSGETAEATRLKRTARRRYTRRKNRICYLQEIFSNEMAKVDDSFFHRLEESFLVEEDKKHERHPIFGNIVDEVAYHEKYPTIYHLRKKLVDSTDKADLRLIYLALAHMIKFRGHFLIEGDLNPDNSDVDKLFIQLVQTYNQLFEENPINASGVDAKAILSARLSKSRRLENLIAQLPGEKKNGLFGNLIALSLGLTPNFKSNFDLAEDAKLQLSKDTYDDDLDNLLAQIGDQYADLFLAAKNLSDAILLSDILRVNTEITKAPLSASMIKRYDEHHQDLTLLKALVRQQLPEKYKEIFFDQSKNGYAGYIDGGASQEEFYKFIKPILEKMDGTEELLVKLNREDLLRKQRTFDNGSIPHQIHLGELHAILRRQEDFYPFLKDNREKIEKILTFRIPYYVGPLARGNSRFAWMTRKSEETITPWNFEEVVDKGASAQSFIERMTNFDKNLPNEKVLPKHSLLYEYFTVYNELTKVKYVTEGMRKPAFLSGEQKKAIVDLLFKTNRKVTVKQLKEDYFKKIECFDSVEISGVEDRFNASLGTYHDLLKIIKDKDFLDNEENEDILEDIVLTLTLFEDREMIEERLKTYAHLFDDKVMKQLKRRRYTGWGRLSRKLINGIRDKQSGKTILDFLKSDGFANRNFMQLIHDDSLTFKEDIQKAQVSGQGDSLHEHIANLAGSPAIKKGILQTVKVVDELVKVMGRHKPENIVIEMARENQTTQKGQKNSRERMKRIEEGIKELGSQILKEHPVENTQLQNEKLYLYYLQNGRDMYVDQELDINRLSDYDVDHIVPQSFLKDDSIDNKVLTRSDKARGKSDNVPSEEVVKKMKNYWRQLLNAKLITQRKFDNLTKAERGGLSELDKAGFIKRQLVETRQITKHVAQILDSRMNTKYDENDKLIREVKVITLKSKLVSDFRKDFQFYKVREINNYHHAHDAYLNAVVGTALIKKYPKLESEFVYGDYKVYDVRKMIAKSEQEIGKATAKYFFYSNIMNFFKTEITLANGEIRKRPLIETNGETGEIVWDKGRDFATVRKVLSMPQVNIVKKTEVQTGGFSKESILPKRNSDKLIARKKDWDPKKYGGFDSPTVAYSVLVVAKVEKGKSKKLKSVKELLGITIMERSSFEKNPIDFLEAKGYKEVKKDLIIKLPKYSLFELENGRKRMLASAGELQKGNELALPSKYVNFLYLASHYEKLKGSPEDNEQKQLFVEQHKHYLDEIIEQISEFSKRVILADANLDKVLSAYNKHRDKPIREQAENIIHLFTLTNLGAPAAFKYFDTTIDRKRYTSTKEVLDATLIHQSITGLYETRIDLSQLGGDGGEAAAKEAAAKEAAAKEAAAKGGVLNLEEEYRLHEKPVPSSIDPSWLQLFPTVWAERAGMGLANQVPPVVVELRSGASPVAVRQYPMSKEAREGIRPHIQRFLDLGVLVPCQSPWNTPLLPVKKPGTNDYRPVQDLREINKRVQDIHPTVPNPYNLLSSLPPSHTWYSVLDLKDAFFCLKLHPNSQPLFAFEWRDPEKGNTGQLTWTRLPQGFKNSPTLFNEALHRDLAPFRALNPQVVLLQYVDDLLVAAPTYRDCKEGTQKLLQELSKLGYRVSAKKAQLCQKEVTYLGYLLKEGKRWLTPARKATVMKIPPPTTPRQVREFLGKAGFCRLFIPGFASLAAPLYPLTKPSIPFIWTEEHQKAFDRIKEALLSAPALALPDLTKPFTLYVDERAGVARGVLTQTLGPWRRPVAYLSKKLDPVASGWPTCLKAVAAVALLLKDADKLTLGQNVTVIASHSLESIVRQPPDRWMTNARMTHYQSLLLNERVSFAPPAVLNPATLLPVESEATPVHRCSEILAEETGTRRDLKDQPLPGVPAWYTDGSSFIAEGKRRAGAAIVDGKRTVWASSLPEGTSAQKAELVALTQALRLAEGKDINIYTDSRYAFATAHIHGAIYKQRGWLTSAGKDIKNKEEILALLEAIHLPKRVAIIHCPGHQKGNDPVATGNRRADEAAKQAALSTRVLAETTKPAGKRTADGSEFEKRTADGSEFESPKKKAKVE

SEQ ID NO: 936 - protein, 2094 aa, synthetic construct
MPAAKRVKLDGGDKKYSIGLDIGTNSVGWAVITDEYKVPSKKFKVLGNTDRHSIKKNLIGALLFDSGETAEATRLKRTARRRYTRRKNRICYLQEIFSNEMAKVDDSFFHRLEESFLVEEDKKHERHPIFGNIVDEVAYHEKYPTIYHLRKKLVDSTDKADLRLIYLALAHMIKFRGHFLIEGDLNPDNSDVDKLFIQLVQTYNQLFEENPINASGVDAKAILSARLSKSRRLENLIAQLPGEKKNGLFGNLIALSLGLTPNFKSNFDLAEDAKLQLSKDTYDDDLDNLLAQIGDQYADLFLAAKNLSDAILLSDILRVNTEITKAPLSASMIKRYDEHHQDLTLLKALVRQQLPEKYKEIFFDQSKNGYAGYIDGGASQEEFYKFIKPILEKMDGTEELLVKLNREDLLRKQRTFDNGSIPHQIHLGELHAILRRQEDFYPFLKDNREKIEKILTFRIPYYVGPLARGNSRFAWMTRKSEETITPWNFEEVVDKGASAQSFIERMTNFDKNLPNEKVLPKHSLLYEYFTVYNELTKVKYVTEGMRKPAFLSGEQKKAIVDLLFKTNRKVTVKQLKEDYFKKIECFDSVEISGVEDRFNASLGTYHDLLKIIKDKDFLDNEENEDILEDIVLTLTLFEDREMIEERLKTYAHLFDDKVMKQLKRRRYTGWGRLSRKLINGIRDKQSGKTILDFLKSDGFANRNFMQLIHDDSLTFKEDIQKAQVSGQGDSLHEHIANLAGSPAIKKGILQTVKVVDELVKVMGRHKPENIVIEMARENQTTQKGQKNSRERMKRIEEGIKELGSQILKEHPVENTQLQNEKLYLYYLQNGRDMYVDQELDINRLSDYDVDHIVPQSFLKDDSIDNKVLTRSDKARGKSDNVPSEEVVKKMKNYWRQLLNAKLITQRKFDNLTKAERGGLSELDKAGFIKRQLVETRQITKHVAQILDSRMNTKYDENDKLIREVKVITLKSKLVSDFRKDFQFYKVREINNYHHAHDAYLNAVVGTALIKKYPKLESEFVYGDYKVYDVRKMIAKSEQEIGKATAKYFFYSNIMNFFKTEITLANGEIRKRPLIETNGETGEIVWDKGRDFATVRKVLSMPQVNIVKKTEVQTGGFSKESILPKRNSDKLIARKKDWDPKKYGGFDSPTVAYSVLVVAKVEKGKSKKLKSVKELLGITIMERSSFEKNPIDFLEAKGYKEVKKDLIIKLPKYSLFELENGRKRMLASAGELQKGNELALPSKYVNFLYLASHYEKLKGSPEDNEQKQLFVEQHKHYLDEIIEQISEFSKRVILADANLDKVLSAYNKHRDKPIREQAENIIHLFTLTNLGAPAAFKYFDTTIDRKRYTSTKEVLDATLIHQSITGLYETRIDLSQLGGDGGGGSGSSEAAAKGGVLNLEEEYRLHEKPVPSSIDPSWLQLFPTVWAERAGMGLANQVPPVVVELRSGASPVAVRQYPMSKEAREGIRPHIQRFLDLGVLVPCQSPWNTPLLPVKKPGTNDYRPVQDLREINKRVQDIHPTVPNPYNLLSSLPPSHTWYSVLDLKDAFFCLKLHPNSQPLFAFEWRDPEKGNTGQLTWTRLPQGFKNSPTLFNEALHRDLAPFRALNPQVVLLQYVDDLLVAAPTYRDCKEGTQKLLQELSKLGYRVSAKKAQLCQKEVTYLGYLLKEGKRWLTPARKATVMKIPPPTTPRQVREFLGKAGFCRLFIPGFASLAAPLYPLTKPSIPFIWTEEHQKAFDRIKEALLSAPALALPDLTKPFTLYVDERAGVARGVLTQTLGPWRRPVAYLSKKLDPVASGWPTCLKAVAAVALLLKDADKLTLGQNVTVIASHSLESIVRQPPDRWMTNARMTHYQSLLLNERVSFAPPAVLNPATLLPVESEATPVHRCSEILAEETGTRRDLKDQPLPGVPAWYTDGSSFIAEGKRRAGAAIVDGKRTVWASSLPEGTSAQKAELVALTQALRLAEGKDINIYTDSRYAFATAHIHGAIYKQRGWLTSAGKDIKNKEEILALLEAIHLPKRVAIIHCPGHQKGNDPVATGNRRADEAAKQAALSTRVLAETTKPAGKRTADGSEFEKRTADGSEFESPKKKAKVE

SEQ ID NO: 937 - protein, 2092 aa, synthetic construct
MPAAKRVKLDGGDKKYSIGLDIGTNSVGWAVITDEYKVPSKKFKVLGNTDRHSIKKNLIGALLFDSGETAEATRLKRTARRRYTRRKNRICYLQEIFSNEMAKVDDSFFHRLEESFLVEEDKKHERHPIFGNIVDEVAYHEKYPTIYHLRKKLVDSTDKADLRLIYLALAHMIKFRGHFLIEGDLNPDNSDVDKLFIQLVQTYNQLFEENPINASGVDAKAILSARLSKSRRLENLIAQLPGEKKNGLFGNLIALSLGLTPNFKSNFDLAEDAKLQLSKDTYDDDLDNLLAQIGDQYADLFLAAKNLSDAILLSDILRVNTEITKAPLSASMIKRYDEHHQDLTLLKALVRQQLPEKYKEIFFDQSKNGYAGYIDGGASQEEFYKFIKPILEKMDGTEELLVKLNREDLLRKQRTFDNGSIPHQIHLGELHAILRRQEDFYPFLKDNREKIEKILTFRIPYYVGPLARGNSRFAWMTRKSEETITPWNFEEVVDKGASAQSFIERMTNFDKNLPNEKVLPKHSLLYEYFTVYNELTKVKYVTEGMRKPAFLSGEQKKAIVDLLFKTNRKVTVKQLKEDYFKKIECFDSVEISGVEDRFNASLGTYHDLLKIIKDKDFLDNEENEDILEDIVLTLTLFEDREMIEERLKTYAHLFDDKVMKQLKRRRYTGWGRLSRKLINGIRDKQSGKTILDFLKSDGFANRNFMQLIHDDSLTFKEDIQKAQVSGQGDSLHEHIANLAGSPAIKKGILQTVKVVDELVKVMGRHKPENIVIEMARENQTTQKGQKNSRERMKRIEEGIKELGSQILKEHPVENTQLQNEKLYLYYLQNGRDMYVDQELDINRLSDYDVDHIVPQSFLKDDSIDNKVLTRSDKARGKSDNVPSEEVVKKMKNYWRQLLNAKLITQRKFDNLTKAERGGLSELDKAGFIKRQLVETRQITKHVAQILDSRMNTKYDENDKLIREVKVITLKSKLVSDFRKDFQFYKVREINNYHHAHDAYLNAVVGTALIKKYPKLESEFVYGDYKVYDVRKMIAKSEQEIGKATAKYFFYSNIMNFFKTEITLANGEIRKRPLIETNGETGEIVWDKGRDFATVRKVLSMPQVNIVKKTEVQTGGFSKESILPKRNSDKLIARKKDWDPKKYGGFDSPTVAYSVLVVAKVEKGKSKKLKSVKELLGITIMERSSFEKNPIDFLEAKGYKEVKKDLIIKLPKYSLFELENGRKRMLASAGELQKGNELALPSKYVNFLYLASHYEKLKGSPEDNEQKQLFVEQHKHYLDEIIEQISEFSKRVILADANLDKVLSAYNKHRDKPIREQAENIIHLFTLTNLGAPAAFKYFDTTIDRKRYTSTKEVLDATLIHQSITGLYETRIDLSQLGGDGGGGGGGSGSSGGVLNLEEEYRLHEKPVPSSIDPSWLQLFPTVWAERAGMGLANQVPPVVVELRSGASPVAVRQYPMSKEAREGIRPHIQRFLDLGVLVPCQSPWNTPLLPVKKPGTNDYRPVQDLREINKRVQDIHPTVPNPYNLLSSLPPSHTWYSVLDLKDAFFCLKLHPNSQPLFAFEWRDPEKGNTGQLTWTRLPQGFKNSPTLFNEALHRDLAPFRALNPQVVLLQYVDDLLVAAPTYRDCKEGTQKLLQELSKLGYRVSAKKAQLCQKEVTYLGYLLKEGKRWLTPARKATVMKIPPPTTPRQVREFLGKAGFCRLFIPGFASLAAPLYPLTKPSIPFIWTEEHQKAFDRIKEALLSAPALALPDLTKPFTLYVDERAGVARGVLTQTLGPWRRPVAYLSKKLDPVASGWPTCLKAVAAVALLLKDADKLTLGQNVTVIASHSLESIVRQPPDRWMTNARMTHYQSLLLNERVSFAPPAVLNPATLLPVESEATPVHRCSEILAEETGTRRDLKDQPLPGVPAWYTDGSSFIAEGKRRAGAAIVDGKRTVWASSLPEGTSAQKAELVALTQALRLAEGKDINIYTDSRYAFATAHIHGAIYKQRGWLTSAGKDIKNKEEILALLEAIHLPKRVAIIHCPGHQKGNDPVATGNRRADEAAKQAALSTRVLAETTKPAGKRTADGSEFEKRTADGSEFESPKKKAKVE

SEQ ID NO: 938 - protein, 2098 aa, synthetic construct
MPAAKRVKLDGGDKKYSIGLDIGTNSVGWAVITDEYKVPSKKFKVLGNTDRHSIKKNLIGALLFDSGETAEATRLKRTARRRYTRRKNRICYLQEIFSNEMAKVDDSFFHRLEESFLVEEDKKHERHPIFGNIVDEVAYHEKYPTIYHLRKKLVDSTDKADLRLIYLALAHMIKFRGHFLIEGDLNPDNSDVDKLFIQLVQTYNQLFEENPINASGVDAKAILSARLSKSRRLENLIAQLPGEKKNGLFGNLIALSLGLTPNFKSNFDLAEDAKLQLSKDTYDDDLDNLLAQIGDQYADLFLAAKNLSDAILLSDILRVNTEITKAPLSASMIKRYDEHHQDLTLLKALVRQQLPEKYKEIFFDQSKNGYAGYIDGGASQEEFYKFIKPILEKMDGTEELLVKLNREDLLRKQRTFDNGSIPHQIHLGELHAILRRQEDFYPFLKDNREKIEKILTFRIPYYVGPLARGNSRFAWMTRKSEETITPWNFEEVVDKGASAQSFIERMTNFDKNLPNEKVLPKHSLLYEYFTVYNELTKVKYVTEGMRKPAFLSGEQKKAIVDLLFKTNRKVTVKQLKEDYFKKIECFDSVEISGVEDRFNASLGTYHDLLKIIKDKDFLDNEENEDILEDIVLTLTLFEDREMIEERLKTYAHLFDDKVMKQLKRRRYTGWGRLSRKLINGIRDKQSGKTILDFLKSDGFANRNFMQLIHDDSLTFKEDIQKAQVSGQGDSLHEHIANLAGSPAIKKGILQTVKVVDELVKVMGRHKPENIVIEMARENQTTQKGQKNSRERMKRIEEGIKELGSQILKEHPVENTQLQNEKLYLYYLQNGRDMYVDQELDINRLSDYDVDHIVPQSFLKDDSIDNKVLTRSDKARGKSDNVPSEEVVKKMKNYWRQLLNAKLITQRKFDNLTKAERGGLSELDKAGFIKRQLVETRQITKHVAQILDSRMNTKYDENDKLIREVKVITLKSKLVSDFRKDFQFYKVREINNYHHAHDAYLNAVVGTALIKKYPKLESEFVYGDYKVYDVRKMIAKSEQEIGKATAKYFFYSNIMNFFKTEITLANGEIRKRPLIETNGETGEIVWDKGRDFATVRKVLSMPQVNIVKKTEVQTGGFSKESILPKRNSDKLIARKKDWDPKKYGGFDSPTVAYSVLVVAKVEKGKSKKLKSVKELLGITIMERSSFEKNPIDFLEAKGYKEVKKDLIIKLPKYSLFELENGRKRMLASAGELQKGNELALPSKYVNFLYLASHYEKLKGSPEDNEQKQLFVEQHKHYLDEIIEQISEFSKRVILADANLDKVLSAYNKHRDKPIREQAENIIHLFTLTNLGAPAAFKYFDTTIDRKRYTSTKEVLDATLIHQSITGLYETRIDLSQLGGDGGGSSGSSGSSGSSGSSGGVLNLEEEYRLHEKPVPSSIDPSWLQLFPTVWAERAGMGLANQVPPVVVELRSGASPVAVRQYPMSKEAREGIRPHIQRFLDLGVLVPCQSPWNTPLLPVKKPGTNDYRPVQDLREINKRVQDIHPTVPNPYNLLSSLPPSHTWYSVLDLKDAFFCLKLHPNSQPLFAFEWRDPEKGNTGQLTWTRLPQGFKNSPTLFNEALHRDLAPFRALNPQVVLLQYVDDLLVAAPTYRDCKEGTQKLLQELSKLGYRVSAKKAQLCQKEVTYLGYLLKEGKRWLTPARKATVMKIPPPTTPRQVREFLGKAGFCRLFIPGFASLAAPLYPLTKPSIPFIWTEEHQKAFDRIKEALLSAPALALPDLTKPFTLYVDERAGVARGVLTQTLGPWRRPVAYLSKKLDPVASGWPTCLKAVAAVALLLKDADKLTLGQNVTVIASHSLESIVRQPPDRWMTNARMTHYQSLLLNERVSFAPPAVLNPATLLPVESEATPVHRCSEILAEETGTRRDLKDQPLPGVPAWYTDGSSFIAEGKRRAGAAIVDGKRTVWASSLPEGTSAQKAELVALTQALRLAEGKDINIYTDSRYAFATAHIHGAIYKQRGWLTSAGKDIKNKEEILALLEAIHLPKRVAIIHCPGHQKGNDPVATGNRRADEAAKQAALSTRVLAETTKPAGKRTADGSEFEKRTADGSEFESPKKKAKVE

SEQ ID NO: 939 - protein, 2094 aa, synthetic construct
MPAAKRVKLDGGDKKYSIGLDIGTNSVGWAVITDEYKVPSKKFKVLGNTDRHSIKKNLIGALLFDSGETAEATRLKRTARRRYTRRKNRICYLQEIFSNEMAKVDDSFFHRLEESFLVEEDKKHERHPIFGNIVDEVAYHEKYPTIYHLRKKLVDSTDKADLRLIYLALAHMIKFRGHFLIEGDLNPDNSDVDKLFIQLVQTYNQLFEENPINASGVDAKAILSARLSKSRRLENLIAQLPGEKKNGLFGNLIALSLGLTPNFKSNFDLAEDAKLQLSKDTYDDDLDNLLAQIGDQYADLFLAAKNLSDAILLSDILRVNTEITKAPLSASMIKRYDEHHQDLTLLKALVRQQLPEKYKEIFFDQSKNGYAGYIDGGASQEEFYKFIKPILEKMDGTEELLVKLNREDLLRKQRTFDNGSIPHQIHLGELHAILRRQEDFYPFLKDNREKIEKILTFRIPYYVGPLARGNSRFAWMTRKSEETITPWNFEEVVDKGASAQSFIERMTNFDKNLPNEKVLPKHSLLYEYFTVYNELTKVKYVTEGMRKPAFLSGEQKKAIVDLLFKTNRKVTVKQLKEDYFKKIECFDSVEISGVEDRFNASLGTYHDLLKIIKDKDFLDNEENEDILEDIVLTLTLFEDREMIEERLKTYAHLFDDKVMKQLKRRRYTGWGRLSRKLINGIRDKQSGKTILDFLKSDGFANRNFMQLIHDDSLTFKEDIQKAQVSGQGDSLHEHIANLAGSPAIKKGILQTVKVVDELVKVMGRHKPENIVIEMARENQTTQKGQKNSRERMKRIEEGIKELGSQILKEHPVENTQLQNEKLYLYYLQNGRDMYVDQELDINRLSDYDVDHIVPQSFLKDDSIDNKVLTRSDKARGKSDNVPSEEVVKKMKNYWRQLLNAKLITQRKFDNLTKAERGGLSELDKAGFIKRQLVETRQITKHVAQILDSRMNTKYDENDKLIREVKVITLKSKLVSDFRKDFQFYKVREINNYHHAHDAYLNAVVGTALIKKYPKLESEFVYGDYKVYDVRKMIAKSEQEIGKATAKYFFYSNIMNFFKTEITLANGEIRKRPLIETNGETGEIVWDKGRDFATVRKVLSMPQVNIVKKTEVQTGGFSKESILPKRNSDKLIARKKDWDPKKYGGFDSPTVAYSVLVVAKVEKGKSKKLKSVKELLGITIMERSSFEKNPIDFLEAKGYKEVKKDLIIKLPKYSLFELENGRKRMLASAGELQKGNELALPSKYVNFLYLASHYEKLKGSPEDNEQKQLFVEQHKHYLDEIIEQISEFSKRVILADANLDKVLSAYNKHRDKPIREQAENIIHLFTLTNLGAPAAFKYFDTTIDRKRYTSTKEVLDATLIHQSITGLYETRIDLSQLGGDGGPAPEAAAKGGSGGVLNLEEEYRLHEKPVPSSIDPSWLQLFPTVWAERAGMGLANQVPPVVVELRSGASPVAVRQYPMSKEAREGIRPHIQRFLDLGVLVPCQSPWNTPLLPVKKPGTNDYRPVQDLREINKRVQDIHPTVPNPYNLLSSLPPSHTWYSVLDLKDAFFCLKLHPNSQPLFAFEWRDPEKGNTGQLTWTRLPQGFKNSPTLFNEALHRDLAPFRALNPQVVLLQYVDDLLVAAPTYRDCKEGTQKLLQELSKLGYRVSAKKAQLCQKEVTYLGYLLKEGKRWLTPARKATVMKIPPPTTPRQVREFLGKAGFCRLFIPGFASLAAPLYPLTKPSIPFIWTEEHQKAFDRIKEALLSAPALALPDLTKPFTLYVDERAGVARGVLTQTLGPWRRPVAYLSKKLDPVASGWPTCLKAVAAVALLLKDADKLTLGQNVTVIASHSLESIVRQPPDRWMTNARMTHYQSLLLNERVSFAPPAVLNPATLLPVESEATPVHRCSEILAEETGTRRDLKDQPLPGVPAWYTDGSSFIAEGKRRAGAAIVDGKRTVWASSLPEGTSAQKAELVALTQALRLAEGKDINIYTDSRYAFATAHIHGAIYKQRGWLTSAGKDIKNKEEILALLEAIHLPKRVAIIHCPGHQKGNDPVATGNRRADEAAKQAALSTRVLAETTKPAGKRTADGSEFEKRTADGSEFESPKKKAKVE

SEQ ID NO: 940 - protein, 2089 aa, synthetic construct
MPAAKRVKLDGGDKKYSIGLDIGTNSVGWAVITDEYKVPSKKFKVLGNTDRHSIKKNLIGALLFDSGETAEATRLKRTARRRYTRRKNRICYLQEIFSNEMAKVDDSFFHRLEESFLVEEDKKHERHPIFGNIVDEVAYHEKYPTIYHLRKKLVDSTDKADLRLIYLALAHMIKFRGHFLIEGDLNPDNSDVDKLFIQLVQTYNQLFEENPINASGVDAKAILSARLSKSRRLENLIAQLPGEKKNGLFGNLIALSLGLTPNFKSNFDLAEDAKLQLSKDTYDDDLDNLLAQIGDQYADLFLAAKNLSDAILLSDILRVNTEITKAPLSASMIKRYDEHHQDLTLLKALVRQQLPEKYKEIFFDQSKNGYAGYIDGGASQEEFYKFIKPILEKMDGTEELLVKLNREDLLRKQRTFDNGSIPHQIHLGELHAILRRQEDFYPFLKDNREKIEKILTFRIPYYVGPLARGNSRFAWMTRKSEETITPWNFEEVVDKGASAQSFIERMTNFDKNLPNEKVLPKHSLLYEYFTVYNELTKVKYVTEGMRKPAFLSGEQKKAIVDLLFKTNRKVTVKQLKEDYFKKIECFDSVEISGVEDRFNASLGTYHDLLKIIKDKDFLDNEENEDILEDIVLTLTLFEDREMIEERLKTYAHLFDDKVMKQLKRRRYTGWGRLSRKLINGIRDKQSGKTILDFLKSDGFANRNFMQLIHDDSLTFKEDIQKAQVSGQGDSLHEHIANLAGSPAIKKGILQTVKVVDELVKVMGRHKPENIVIEMARENQTTQKGQKNSRERMKRIEEGIKELGSQILKEHPVENTQLQNEKLYLYYLQNGRDMYVDQELDINRLSDYDVDHIVPQSFLKDDSIDNKVLTRSDKARGKSDNVPSEEVVKKMKNYWRQLLNAKLITQRKFDNLTKAERGGLSELDKAGFIKRQLVETRQITKHVAQILDSRMNTKYDENDKLIREVKVITLKSKLVSDFRKDFQFYKVREINNYHHAHDAYLNAVVGTALIKKYPKLESEFVYGDYKVYDVRKMIAKSEQEIGKATAKYFFYSNIMNFFKTEITLANGEIRKRPLIETNGETGEIVWDKGRDFATVRKVLSMPQVNIVKKTEVQTGGFSKESILPKRNSDKLIARKKDWDPKKYGGFDSPTVAYSVLVVAKVEKGKSKKLKSVKELLGITIMERSSFEKNPIDFLEAKGYKEVKKDLIIKLPKYSLFELENGRKRMLASAGELQKGNELALPSKYVNFLYLASHYEKLKGSPEDNEQKQLFVEQHKHYLDEIIEQISEFSKRVILADANLDKVLSAYNKHRDKPIREQAENIIHLFTLTNLGAPAAFKYFDTTIDRKRYTSTKEVLDATLIHQSITGLYETRIDLSQLGGDGGGGGPAPGGVLNLEEEYRLHEKPVPSSIDPSWLQLFPTVWAERAGMGLANQVPPVVVELRSGASPVAVRQYPMSKEAREGIRPHIQRFLDLGVLVPCQSPWNTPLLPVKKPGTNDYRPVQDLREINKRVQDIHPTVPNPYNLLSSLPPSHTWYSVLDLKDAFFCLKLHPNSQPLFAFEWRDPEKGNTGQLTWTRLPQGFKNSPTLFNEALHRDLAPFRALNPQVVLLQYVDDLLVAAPTYRDCKEGTQKLLQELSKLGYRVSAKKAQLCQKEVTYLGYLLKEGKRWLTPARKATVMKIPPPTTPRQVREFLGKAGFCRLFIPGFASLAAPLYPLTKPSIPFIWTEEHQKAFDRIKEALLSAPALALPDLTKPFTLYVDERAGVARGVLTQTLGPWRRPVAYLSKKLDPVASGWPTCLKAVAAVALLLKDADKLTLGQNVTVIASHSLESIVRQPPDRWMTNARMTHYQSLLLNERVSFAPPAVLNPATLLPVESEATPVHRCSEILAEETGTRRDLKDQPLPGVPAWYTDGSSFIAEGKRRAGAAIVDGKRTVWASSLPEGTSAQKAELVALTQALRLAEGKDINIYTDSRYAFATAHIHGAIYKQRGWLTSAGKDIKNKEEILALLEAIHLPKRVAIIHCPGHQKGNDPVATGNRRADEAAKQAALSTRVLAETTKPAGKRTADGSEFEKRTADGSEFESPKKKAKVE

SEQ ID NO: 941 - protein, 2089 aa, synthetic construct
MPAAKRVKLDGGDKKYSIGLDIGTNSVGWAVITDEYKVPSKKFKVLGNTDRHSIKKNLIGALLFDSGETAEATRLKRTARRRYTRRKNRICYLQEIFSNEMAKVDDSFFHRLEESFLVEEDKKHERHPIFGNIVDEVAYHEKYPTIYHLRKKLVDSTDKADLRLIYLALAHMIKFRGHFLIEGDLNPDNSDVDKLFIQLVQTYNQLFEENPINASGVDAKAILSARLSKSRRLENLIAQLPGEKKNGLFGNLIALSLGLTPNFKSNFDLAEDAKLQLSKDTYDDDLDNLLAQIGDQYADLFLAAKNLSDAILLSDILRVNTEITKAPLSASMIKRYDEHHQDLTLLKALVRQQLPEKYKEIFFDQSKNGYAGYIDGGASQEEFYKFIKPILEKMDGTEELLVKLNREDLLRKQRTFDNGSIPHQIHLGELHAILRRQEDFYPFLKDNREKIEKILTFRIPYYVGPLARGNSRFAWMTRKSEETITPWNFEEVVDKGASAQSFIERMTNFDKNLPNEKVLPKHSLLYEYFTVYNELTKVKYVTEGMRKPAFLSGEQKKAIVDLLFKTNRKVTVKQLKEDYFKKIECFDSVEISGVEDRFNASLGTYHDLLKIIKDKDFLDNEENEDILEDIVLTLTLFEDREMIEERLKTYAHLFDDKVMKQLKRRRYTGWGRLSRKLINGIRDKQSGKTILDFLKSDGFANRNFMQLIHDDSLTFKEDIQKAQVSGQGDSLHEHIANLAGSPAIKKGILQTVKVVDELVKVMGRHKPENIVIEMARENQTTQKGQKNSRERMKRIEEGIKELGSQILKEHPVENTQLQNEKLYLYYLQNGRDMYVDQELDINRLSDYDVDHIVPQSFLKDDSIDNKVLTRSDKARGKSDNVPSEEVVKKMKNYWRQLLNAKLITQRKFDNLTKAERGGLSELDKAGFIKRQLVETRQITKHVAQILDSRMNTKYDENDKLIREVKVITLKSKLVSDFRKDFQFYKVREINNYHHAHDAYLNAVVGTALIKKYPKLESEFVYGDYKVYDVRKMIAKSEQEIGKATAKYFFYSNIMNFFKTEITLANGEIRKRPLIETNGETGEIVWDKGRDFATVRKVLSMPQVNIVKKTEVQTGGFSKESILPKRNSDKLIARKKDWDPKKYGGFDSPTVAYSVLVVAKVEKGKSKKLKSVKELLGITIMERSSFEKNPIDFLEAKGYKEVKKDLIIKLPKYSLFELENGRKRMLASAGELQKGNELALPSKYVNFLYLASHYEKLKGSPEDNEQKQLFVEQHKHYLDEIIEQISEFSKRVILADANLDKVLSAYNKHRDKPIREQAENIIHLFTLTNLGAPAAFKYFDTTIDRKRYTSTKEVLDATLIHQSITGLYETRIDLSQLGGDGGPAPGSSGGVLNLEEEYRLHEKPVPSSIDPSWLQLFPTVWAERAGMGLANQVPPVVVELRSGASPVAVRQYPMSKEAREGIRPHIQRFLDLGVLVPCQSPWNTPLLPVKKPGTNDYRPVQDLREINKRVQDIHPTVPNPYNLLSSLPPSHTWYSVLDLKDAFFCLKLHPNSQPLFAFEWRDPEKGNTGQLTWTRLPQGFKNSPTLFNEALHRDLAPFRALNPQVVLLQYVDDLLVAAPTYRDCKEGTQKLLQELSKLGYRVSAKKAQLCQKEVTYLGYLLKEGKRWLTPARKATVMKIPPPTTPRQVREFLGKAGFCRLFIPGFASLAAPLYPLTKPSIPFIWTEEHQKAFDRIKEALLSAPALALPDLTKPFTLYVDERAGVARGVLTQTLGPWRRPVAYLSKKLDPVASGWPTCLKAVAAVALLLKDADKLTLGQNVTVIASHSLESIVRQPPDRWMTNARMTHYQSLLLNERVSFAPPAVLNPATLLPVESEATPVHRCSEILAEETGTRRDLKDQPLPGVPAWYTDGSSFIAEGKRRAGAAIVDGKRTVWASSLPEGTSAQKAELVALTQALRLAEGKDINIYTDSRYAFATAHIHGAIYKQRGWLTSAGKDIKNKEEILALLEAIHLPKRVAIIHCPGHQKGNDPVATGNRRADEAAKQAALSTRVLAETTKPAGKRTADGSEFEKRTADGSEFESPKKKAKVE

SEQ ID NO: 942 - protein, 2091 aa, synthetic construct
MPAAKRVKLDGGDKKYSIGLDIGTNSVGWAVITDEYKVPSKKFKVLGNTDRHSIKKNLIGALLFDSGETAEATRLKRTARRRYTRRKNRICYLQEIFSNEMAKVDDSFFHRLEESFLVEEDKKHERHPIFGNIVDEVAYHEKYPTIYHLRKKLVDSTDKADLRLIYLALAHMIKFRGHFLIEGDLNPDNSDVDKLFIQLVQTYNQLFEENPINASGVDAKAILSARLSKSRRLENLIAQLPGEKKNGLFGNLIALSLGLTPNFKSNFDLAEDAKLQLSKDTYDDDLDNLLAQIGDQYADLFLAAKNLSDAILLSDILRVNTEITKAPLSASMIKRYDEHHQDLTLLKALVRQQLPEKYKEIFFDQSKNGYAGYIDGGASQEEFYKFIKPILEKMDGTEELLVKLNREDLLRKQRTFDNGSIPHQIHLGELHAILRRQEDFYPFLKDNREKIEKILTFRIPYYVGPLARGNSRFAWMTRKSEETITPWNFEEVVDKGASAQSFIERMTNFDKNLPNEKVLPKHSLLYEYFTVYNELTKVKYVTEGMRKPAFLSGEQKKAIVDLLFKTNRKVTVKQLKEDYFKKIECFDSVEISGVEDRFNASLGTYHDLLKIIKDKDFLDNEENEDILEDIVLTLTLFEDREMIEERLKTYAHLFDDKVMKQLKRRRYTGWGRLSRKLINGIRDKQSGKTILDFLKSDGFANRNFMQLIHDDSLTFKEDIQKAQVSGQGDSLHEHIANLAGSPAIKKGILQTVKVVDELVKVMGRHKPENIVIEMARENQTTQKGQKNSRERMKRIEEGIKELGSQILKEHPVENTQLQNEKLYLYYLQNGRDMYVDQELDINRLSDYDVDHIVPQSFLKDDSIDNKVLTRSDKARGKSDNVPSEEVVKKMKNYWRQLLNAKLITQRKFDNLTKAERGGLSELDKAGFIKRQLVETRQITKHVAQILDSRMNTKYDENDKLIREVKVITLKSKLVSDFRKDFQFYKVREINNYHHAHDAYLNAVVGTALIKKYPKLESEFVYGDYKVYDVRKMIAKSEQEIGKATAKYFFYSNIMNFFKTEITLANGEIRKRPLIETNGETGEIVWDKGRDFATVRKVLSMPQVNIVKKTEVQTGGFSKESILPKRNSDKLIARKKDWDPKKYGGFDSPTVAYSVLVVAKVEKGKSKKLKSVKELLGITIMERSSFEKNPIDFLEAKGYKEVKKDLIIKLPKYSLFELENGRKRMLASAGELQKGNELALPSKYVNFLYLASHYEKLKGSPEDNEQKQLFVEQHKHYLDEIIEQISEFSKRVILADANLDKVLSAYNKHRDKPIREQAENIIHLFTLTNLGAPAAFKYFDTTIDRKRYTSTKEVLDATLIHQSITGLYETRIDLSQLGGDGGEAAAKGSSGGVLNLEEEYRLHEKPVPSSIDPSWLQLFPTVWAERAGMGLANQVPPVVVELRSGASPVAVRQYPMSKEAREGIRPHIQRFLDLGVLVPCQSPWNTPLLPVKKPGTNDYRPVQDLREINKRVQDIHPTVPNPYNLLSSLPPSHTWYSVLDLKDAFFCLKLHPNSQPLFAFEWRDPEKGNTGQLTWTRLPQGFKNSPTLFNEALHRDLAPFRALNPQVVLLQYVDDLLVAAPTYRDCKEGTQKLLQELSKLGYRVSAKKAQLCQKEVTYLGYLLKEGKRWLTPARKATVMKIPPPTTPRQVREFLGKAGFCRLFIPGFASLAAPLYPLTKPSIPFIWTEEHQKAFDRIKEALLSAPALALPDLTKPFTLYVDERAGVARGVLTQTLGPWRRPVAYLSKKLDPVASGWPTCLKAVAAVALLLKDADKLTLGQNVTVIASHSLESIVRQPPDRWMTNARMTHYQSLLLNERVSFAPPAVLNPATLLPVESEATPVHRCSEILAEETGTRRDLKDQPLPGVPAWYTDGSSFIAEGKRRAGAAIVDGKRTVWASSLPEGTSAQKAELVALTQALRLAEGKDINIYTDSRYAFATAHIHGAIYKQRGWLTSAGKDIKNKEEILALLEAIHLPKRVAIIHCPGHQKGNDPVATGNRRADEAAKQAALSTRVLAETTKPAGKRTADGSEFEKRTADGSEFESPKKKAKVE

SEQ ID NO: 943 - protein, 2089 aa, synthetic construct
MPAAKRVKLDGGDKKYSIGLDIGTNSVGWAVITDEYKVPSKKFKVLGNTDRHSIKKNLIGALLFDSGETAEATRLKRTARRRYTRRKNRICYLQEIFSNEMAKVDDSFFHRLEESFLVEEDKKHERHPIFGNIVDEVAYHEKYPTIYHLRKKLVDSTDKADLRLIYLALAHMIKFRGHFLIEGDLNPDNSDVDKLFIQLVQTYNQLFEENPINASGVDAKAILSARLSKSRRLENLIAQLPGEKKNGLFGNLIALSLGLTPNFKSNFDLAEDAKLQLSKDTYDDDLDNLLAQIGDQYADLFLAAKNLSDAILLSDILRVNTEITKAPLSASMIKRYDEHHQDLTLLKALVRQQLPEKYKEIFFDQSKNGYAGYIDGGASQEEFYKFIKPILEKMDGTEELLVKLNREDLLRKQRTFDNGSIPHQIHLGELHAILRRQEDFYPFLKDNREKIEKILTFRIPYYVGPLARGNSRFAWMTRKSEETITPWNFEEVVDKGASAQSFIERMTNFDKNLPNEKVLPKHSLLYEYFTVYNELTKVKYVTEGMRKPAFLSGEQKKAIVDLLFKTNRKVTVKQLKEDYFKKIECFDSVEISGVEDRFNASLGTYHDLLKIIKDKDFLDNEENEDILEDIVLTLTLFEDREMIEERLKTYAHLFDDKVMKQLKRRRYTGWGRLSRKLINGIRDKQSGKTILDFLKSDGFANRNFMQLIHDDSLTFKEDIQKAQVSGQGDSLHEHIANLAGSPAIKKGILQTVKVVDELVKVMGRHKPENIVIEMARENQTTQKGQKNSRERMKRIEEGIKELGSQILKEHPVENTQLQNEKLYLYYLQNGRDMYVDQELDINRLSDYDVDHIVPQSFLKDDSIDNKVLTRSDKARGKSDNVPSEEVVKKMKNYWRQLLNAKLITQRKFDNLTKAERGGLSELDKAGFIKRQLVETRQITKHVAQILDSRMNTKYDENDKLIREVKVITLKSKLVSDFRKDFQFYKVREINNYHHAHDAYLNAVVGTALIKKYPKLESEFVYGDYKVYDVRKMIAKSEQEIGKATAKYFFYSNIMNFFKTEITLANGEIRKRPLIETNGETGEIVWDKGRDFATVRKVLSMPQVNIVKKTEVQTGGFSKESILPKRNSDKLIARKKDWDPKKYGGFDSPTVAYSVLVVAKVEKGKSKKLKSVKELLGITIMERSSFEKNPIDFLEAKGYKEVKKDLIIKLPKYSLFELENGRKRMLASAGELQKGNELALPSKYVNFLYLASHYEKLKGSPEDNEQKQLFVEQHKHYLDEIIEQISEFSKRVILADANLDKVLSAYNKHRDKPIREQAENIIHLFTLTNLGAPAAFKYFDTTIDRKRYTSTKEVLDATLIHQSITGLYETRIDLSQLGGDGGPAPGGSGGVLNLEEEYRLHEKPVPSSIDPSWLQLFPTVWAERAGMGLANQVPPVVVELRSGASPVAVRQYPMSKEAREGIRPHIQRFLDLGVLVPCQSPWNTPLLPVKKPGTNDYRPVQDLREINKRVQDIHPTVPNPYNLLSSLPPSHTWYSVLDLKDAFFCLKLHPNSQPLFAFEWRDPEKGNTGQLTWTRLPQGFKNSPTLFNEALHRDLAPFRALNPQVVLLQYVDDLLVAAPTYRDCKEGTQKLLQELSKLGYRVSAKKAQLCQKEVTYLGYLLKEGKRWLTPARKATVMKIPPPTTPRQVREFLGKAGFCRLFIPGFASLAAPLYPLTKPSIPFIWTEEHQKAFDRIKEALLSAPALALPDLTKPFTLYVDERAGVARGVLTQTLGPWRRPVAYLSKKLDPVASGWPTCLKAVAAVALLLKDADKLTLGQNVTVIASHSLESIVRQPPDRWMTNARMTHYQSLLLNERVSFAPPAVLNPATLLPVESEATPVHRCSEILAEETGTRRDLKDQPLPGVPAWYTDGSSFIAEGKRRAGAAIVDGKRTVWASSLPEGTSAQKAELVALTQALRLAEGKDINIYTDSRYAFATAHIHGAIYKQRGWLTSAGKDIKNKEEILALLEAIHLPKRVAIIHCPGHQKGNDPVATGNRRADEAAKQAALSTRVLAETTKPAGKRTADGSEFEKRTADGSEFESPKKKAKVE

SEQ ID NO: 944 - protein, 2094 aa, synthetic construct
MPAAKRVKLDGGDKKYSIGLDIGTNSVGWAVITDEYKVPSKKFKVLGNTDRHSIKKNLIGALLFDSGETAEATRLKRTARRRYTRRKNRICYLQEIFSNEMAKVDDSFFHRLEESFLVEEDKKHERHPIFGNIVDEVAYHEKYPTIYHLRKKLVDSTDKADLRLIYLALAHMIKFRGHFLIEGDLNPDNSDVDKLFIQLVQTYNQLFEENPINASGVDAKAILSARLSKSRRLENLIAQLPGEKKNGLFGNLIALSLGLTPNFKSNFDLAEDAKLQLSKDTYDDDLDNLLAQIGDQYADLFLAAKNLSDAILLSDILRVNTEITKAPLSASMIKRYDEHHQDLTLLKALVRQQLPEKYKEIFFDQSKNGYAGYIDGGASQEEFYKFIKPILEKMDGTEELLVKLNREDLLRKQRTFDNGSIPHQIHLGELHAILRRQEDFYPFLKDNREKIEKILTFRIPYYVGPLARGNSRFAWMTRKSEETITPWNFEEVVDKGASAQSFIERMTNFDKNLPNEKVLPKHSLLYEYFTVYNELTKVKYVTEGMRKPAFLSGEQKKAIVDLLFKTNRKVTVKQLKEDYFKKIECFDSVEISGVEDRFNASLGTYHDLLKIIKDKDFLDNEENEDILEDIVLTLTLFEDREMIEERLKTYAHLFDDKVMKQLKRRRYTGWGRLSRKLINGIRDKQSGKTILDFLKSDGFANRNFMQLIHDDSLTFKEDIQKAQVSGQGDSLHEHIANLAGSPAIKKGILQTVKVVDELVKVMGRHKPENIVIEMARENQTTQKGQKNSRERMKRIEEGIKELGSQILKEHPVENTQLQNEKLYLYYLQNGRDMYVDQELDINRLSDYDVDHIVPQSFLKDDSIDNKVLTRSDKARGKSDNVPSEEVVKKMKNYWRQLLNAKLITQRKFDNLTKAERGGLSELDKAGFIKRQLVETRQITKHVAQILDSRMNTKYDENDKLIREVKVITLKSKLVSDFRKDFQFYKVREINNYHHAHDAYLNAVVGTALIKKYPKLESEFVYGDYKVYDVRKMIAKSEQEIGKATAKYFFYSNIMNFFKTEITLANGEIRKRPLIETNGETGEIVWDKGRDFATVRKVLSMPQVNIVKKTEVQTGGFSKESILPKRNSDKLIARKKDWDPKKYGGFDSPTVAYSVLVVAKVEKGKSKKLKSVKELLGITIMERSSFEKNPIDFLEAKGYKEVKKDLIIKLPKYSLFELENGRKRMLASAGELQKGNELALPSKYVNFLYLASHYEKLKGSPEDNEQKQLFVEQHKHYLDEIIEQISEFSKRVILADANLDKVLSAYNKHRDKPIREQAENIIHLFTLTNLGAPAAFKYFDTTIDRKRYTSTKEVLDATLIHQSITGLYETRIDLSQLGGDGGGSSPAPEAAAKGGVLNLEEEYRLHEKPVPSSIDPSWLQLFPTVWAERAGMGLANQVPPVVVELRSGASPVAVRQYPMSKEAREGIRPHIQRFLDLGVLVPCQSPWNTPLLPVKKPGTNDYRPVQDLREINKRVQDIHPTVPNPYNLLSSLPPSHTWYSVLDLKDAFFCLKLHPNSQPLFAFEWRDPEKGNTGQLTWTRLPQGFKNSPTLFNEALHRDLAPFRALNPQVVLLQYVDDLLVAAPTYRDCKEGTQKLLQELSKLGYRVSAKKAQLCQKEVTYLGYLLKEGKRWLTPARKATVMKIPPPTTPRQVREFLGKAGFCRLFIPGFASLAAPLYPLTKPSIPFIWTEEHQKAFDRIKEALLSAPALALPDLTKPFTLYVDERAGVARGVLTQTLGPWRRPVAYLSKKLDPVASGWPTCLKAVAAVALLLKDADKLTLGQNVTVIASHSLESIVRQPPDRWMTNARMTHYQSLLLNERVSFAPPAVLNPATLLPVESEATPVHRCSEILAEETGTRRDLKDQPLPGVPAWYTDGSSFIAEGKRRAGAAIVDGKRTVWASSLPEGTSAQKAELVALTQALRLAEGKDINIYTDSRYAFATAHIHGAIYKQRGWLTSAGKDIKNKEEILALLEAIHLPKRVAIIHCPGHQKGNDPVATGNRRADEAAKQAALSTRVLAETTKPAGKRTADGSEFEKRTADGSEFESPKKKAKVE

SEQ ID NO: 945 - protein, 2093 aa, synthetic construct
MPAAKRVKLDGGDKKYSIGLDIGTNSVGWAVITDEYKVPSKKFKVLGNTDRHSIKKNLIGALLFDSGETAEATRLKRTARRRYTRRKNRICYLQEIFSNEMAKVDDSFFHRLEESFLVEEDKKHERHPIFGNIVDEVAYHEKYPTIYHLRKKLVDSTDKADLRLIYLALAHMIKFRGHFLIEGDLNPDNSDVDKLFIQLVQTYNQLFEENPINASGVDAKAILSARLSKSRRLENLIAQLPGEKKNGLFGNLIALSLGLTPNFKSNFDLAEDAKLQLSKDTYDDDLDNLLAQIGDQYADLFLAAKNLSDAILLSDILRVNTEITKAPLSASMIKRYDEHHQDLTLLKALVRQQLPEKYKEIFFDQSKNGYAGYIDGGASQEEFYKFIKPILEKMDGTEELLVKLNREDLLRKQRTFDNGSIPHQIHLGELHAILRRQEDFYPFLKDNREKIEKILTFRIPYYVGPLARGNSRFAWMTRKSEETITPWNFEEVVDKGASAQSFIERMTNFDKNLPNEKVLPKHSLLYEYFTVYNELTKVKYVTEGMRKPAFLSGEQKKAIVDLLFKTNRKVTVKQLKEDYFKKIECFDSVEISGVEDRFNASLGTYHDLLKIIKDKDFLDNEENEDILEDIVLTLTLFEDREMIEERLKTYAHLFDDKVMKQLKRRRYTGWGRLSRKLINGIRDKQSGKTILDFLKSDGFANRNFMQLIHDDSLTFKEDIQKAQVSGQGDSLHEHIANLAGSPAIKKGILQTVKVVDELVKVMGRHKPENIVIEMARENQTTQKGQKNSRERMKRIEEGIKELGSQILKEHPVENTQLQNEKLYLYYLQNGRDMYVDQELDINRLSDYDVDHIVPQSFLKDDSIDNKVLTRSDKARGKSDNVPSEEVVKKMKNYWRQLLNAKLITQRKFDNLTKAERGGLSELDKAGFIKRQLVETRQITKHVAQILDSRMNTKYDENDKLIREVKVITLKSKLVSDFRKDFQFYKVREINNYHHAHDAYLNAVVGTALIKKYPKLESEFVYGDYKVYDVRKMIAKSEQEIGKATAKYFFYSNIMNFFKTEITLANGEIRKRPLIETNGETGEIVWDKGRDFATVRKVLSMPQVNIVKKTEVQTGGFSKESILPKRNSDKLIARKKDWDPKKYGGFDSPTVAYSVLVVAKVEKGKSKKLKSVKELLGITIMERSSFEKNPIDFLEAKGYKEVKKDLIIKLPKYSLFELENGRKRMLASAGELQKGNELALPSKYVNFLYLASHYEKLKGSPEDNEQKQLFVEQHKHYLDEIIEQISEFSKRVILADANLDKVLSAYNKHRDKPIREQAENIIHLFTLTNLGAPAAFKYFDTTIDRKRYTSTKEVLDATLIHQSITGLYETRIDLSQLGGDGGGGGGSGGGGSGGVLNLEEEYRLHEKPVPSSIDPSWLQLFPTVWAERAGMGLANQVPPVVVELRSGASPVAVRQYPMSKEAREGIRPHIQRFLDLGVLVPCQSPWNTPLLPVKKPGTNDYRPVQDLREINKRVQDIHPTVPNPYNLLSSLPPSHTWYSVLDLKDAFFCLKLHPNSQPLFAFEWRDPEKGNTGQLTWTRLPQGFKNSPTLFNEALHRDLAPFRALNPQVVLLQYVDDLLVAAPTYRDCKEGTQKLLQELSKLGYRVSAKKAQLCQKEVTYLGYLLKEGKRWLTPARKATVMKIPPPTTPRQVREFLGKAGFCRLFIPGFASLAAPLYPLTKPSIPFIWTEEHQKAFDRIKEALLSAPALALPDLTKPFTLYVDERAGVARGVLTQTLGPWRRPVAYLSKKLDPVASGWPTCLKAVAAVALLLKDADKLTLGQNVTVIASHSLESIVRQPPDRWMTNARMTHYQSLLLNERVSFAPPAVLNPATLLPVESEATPVHRCSEILAEETGTRRDLKDQPLPGVPAWYTDGSSFIAEGKRRAGAAIVDGKRTVWASSLPEGTSAQKAELVALTQALRLAEGKDINIYTDSRYAFATAHIHGAIYKQRGWLTSAGKDIKNKEEILALLEAIHLPKRVAIIHCPGHQKGNDPVATGNRRADEAAKQAALSTRVLAETTKPAGKRTADGSEFEKRTADGSEFESPKKKAKVE

SEQ ID NO: 946 - protein, 2092 aa, synthetic construct
MPAAKRVKLDGGDKKYSIGLDIGTNSVGWAVITDEYKVPSKKFKVLGNTDRHSIKKNLIGALLFDSGETAEATRLKRTARRRYTRRKNRICYLQEIFSNEMAKVDDSFFHRLEESFLVEEDKKHERHPIFGNIVDEVAYHEKYPTIYHLRKKLVDSTDKADLRLIYLALAHMIKFRGHFLIEGDLNPDNSDVDKLFIQLVQTYNQLFEENPINASGVDAKAILSARLSKSRRLENLIAQLPGEKKNGLFGNLIALSLGLTPNFKSNFDLAEDAKLQLSKDTYDDDLDNLLAQIGDQYADLFLAAKNLSDAILLSDILRVNTEITKAPLSASMIKRYDEHHQDLTLLKALVRQQLPEKYKEIFFDQSKNGYAGYIDGGASQEEFYKFIKPILEKMDGTEELLVKLNREDLLRKQRTFDNGSIPHQIHLGELHAILRRQEDFYPFLKDNREKIEKILTFRIPYYVGPLARGNSRFAWMTRKSEETITPWNFEEVVDKGASAQSFIERMTNFDKNLPNEKVLPKHSLLYEYFTVYNELTKVKYVTEGMRKPAFLSGEQKKAIVDLLFKTNRKVTVKQLKEDYFKKIECFDSVEISGVEDRFNASLGTYHDLLKIIKDKDFLDNEENEDILEDIVLTLTLFEDREMIEERLKTYAHLFDDKVMKQLKRRRYTGWGRLSRKLINGIRDKQSGKTILDFLKSDGFANRNFMQLIHDDSLTFKEDIQKAQVSGQGDSLHEHIANLAGSPAIKKGILQTVKVVDELVKVMGRHKPENIVIEMARENQTTQKGQKNSRERMKRIEEGIKELGSQILKEHPVENTQLQNEKLYLYYLQNGRDMYVDQELDINRLSDYDVDHIVPQSFLKDDSIDNKVLTRSDKARGKSDNVPSEEVVKKMKNYWRQLLNAKLITQRKFDNLTKAERGGLSELDKAGFIKRQLVETRQITKHVAQILDSRMNTKYDENDKLIREVKVITLKSKLVSDFRKDFQFYKVREINNYHHAHDAYLNAVVGTALIKKYPKLESEFVYGDYKVYDVRKMIAKSEQEIGKATAKYFFYSNIMNFFKTEITLANGEIRKRPLIETNGETGEIVWDKGRDFATVRKVLSMPQVNIVKKTEVQTGGFSKESILPKRNSDKLIARKKDWDPKKYGGFDSPTVAYSVLVVAKVEKGKSKKLKSVKELLGITIMERSSFEKNPIDFLEAKGYKEVKKDLIIKLPKYSLFELENGRKRMLASAGELQKGNELALPSKYVNFLYLASHYEKLKGSPEDNEQKQLFVEQHKHYLDEIIEQISEFSKRVILADANLDKVLSAYNKHRDKPIREQAENIIHLFTLTNLGAPAAFKYFDTTIDRKRYTSTKEVLDATLIHQSITGLYETRIDLSQLGGDGGGGGGSSGGSGGVLNLEEEYRLHEKPVPSSIDPSWLQLFPTVWAERAGMGLANQVPPVVVELRSGASPVAVRQYPMSKEAREGIRPHIQRFLDLGVLVPCQSPWNTPLLPVKKPGTNDYRPVQDLREINKRVQDIHPTVPNPYNLLSSLPPSHTWYSVLDLKDAFFCLKLHPNSQPLFAFEWRDPEKGNTGQLTWTRLPQGFKNSPTLFNEALHRDLAPFRALNPQVVLLQYVDDLLVAAPTYRDCKEGTQKLLQELSKLGYRVSAKKAQLCQKEVTYLGYLLKEGKRWLTPARKATVMKIPPPTTPRQVREFLGKAGFCRLFIPGFASLAAPLYPLTKPSIPFIWTEEHQKAFDRIKEALLSAPALALPDLTKPFTLYVDERAGVARGVLTQTLGPWRRPVAYLSKKLDPVASGWPTCLKAVAAVALLLKDADKLTLGQNVTVIASHSLESIVRQPPDRWMTNARMTHYQSLLLNERVSFAPPAVLNPATLLPVESEATPVHRCSEILAEETGTRRDLKDQPLPGVPAWYTDGSSFIAEGKRRAGAAIVDGKRTVWASSLPEGTSAQKAELVALTQALRLAEGKDINIYTDSRYAFATAHIHGAIYKQRGWLTSAGKDIKNKEEILALLEAIHLPKRVAIIHCPGHQKGNDPVATGNRRADEAAKQAALSTRVLAETTKPAGKRTADGSEFEKRTADGSEFESPKKKAKVE

SEQ ID NO: 947 - protein, 2091 aa, synthetic construct
MPAAKRVKLDGGDKKYSIGLDIGTNSVGWAVITDEYKVPSKKFKVLGNTDRHSIKKNLIGALLFDSGETAEATRLKRTARRRYTRRKNRICYLQEIFSNEMAKVDDSFFHRLEESFLVEEDKKHERHPIFGNIVDEVAYHEKYPTIYHLRKKLVDSTDKADLRLIYLALAHMIKFRGHFLIEGDLNPDNSDVDKLFIQLVQTYNQLFEENPINASGVDAKAILSARLSKSRRLENLIAQLPGEKKNGLFGNLIALSLGLTPNFKSNFDLAEDAKLQLSKDTYDDDLDNLLAQIGDQYADLFLAAKNLSDAILLSDILRVNTEITKAPLSASMIKRYDEHHQDLTLLKALVRQQLPEKYKEIFFDQSKNGYAGYIDGGASQEEFYKFIKPILEKMDGTEELLVKLNREDLLRKQRTFDNGSIPHQIHLGELHAILRRQEDFYPFLKDNREKIEKILTFRIPYYVGPLARGNSRFAWMTRKSEETITPWNFEEVVDKGASAQSFIERMTNFDKNLPNEKVLPKHSLLYEYFTVYNELTKVKYVTEGMRKPAFLSGEQKKAIVDLLFKTNRKVTVKQLKEDYFKKIECFDSVEISGVEDRFNASLGTYHDLLKIIKDKDFLDNEENEDILEDIVLTLTLFEDREMIEERLKTYAHLFDDKVMKQLKRRRYTGWGRLSRKLINGIRDKQSGKTILDFLKSDGFANRNFMQLIHDDSLTFKEDIQKAQVSGQGDSLHEHIANLAGSPAIKKGILQTVKVVDELVKVMGRHKPENIVIEMARENQTTQKGQKNSRERMKRIEEGIKELGSQILKEHPVENTQLQNEKLYLYYLQNGRDMYVDQELDINRLSDYDVDHIVPQSFLKDDSIDNKVLTRSDKARGKSDNVPSEEVVKKMKNYWRQLLNAKLITQRKFDNLTKAERGGLSELDKAGFIKRQLVETRQITKHVAQILDSRMNTKYDENDKLIREVKVITLKSKLVSDFRKDFQFYKVREINNYHHAHDAYLNAVVGTALIKKYPKLESEFVYGDYKVYDVRKMIAKSEQEIGKATAKYFFYSNIMNFFKTEITLANGEIRKRPLIETNGETGEIVWDKGRDFATVRKVLSMPQVNIVKKTEVQTGGFSKESILPKRNSDKLIARKKDWDPKKYGGFDSPTVAYSVLVVAKVEKGKSKKLKSVKELLGITIMERSSFEKNPIDFLEAKGYKEVKKDLIIKLPKYSLFELENGRKRMLASAGELQKGNELALPSKYVNFLYLASHYEKLKGSPEDNEQKQLFVEQHKHYLDEIIEQISEFSKRVILADANLDKVLSAYNKHRDKPIREQAENIIHLFTLTNLGAPAAFKYFDTTIDRKRYTSTKEVLDATLIHQSITGLYETRIDLSQLGGDGGPAPEAAAKGGVLNLEEEYRLHEKPVPSSIDPSWLQLFPTVWAERAGMGLANQVPPVVVELRSGASPVAVRQYPMSKEAREGIRPHIQRFLDLGVLVPCQSPWNTPLLPVKKPGTNDYRPVQDLREINKRVQDIHPTVPNPYNLLSSLPPSHTWYSVLDLKDAFFCLKLHPNSQPLFAFEWRDPEKGNTGQLTWTRLPQGFKNSPTLFNEALHRDLAPFRALNPQVVLLQYVDDLLVAAPTYRDCKEGTQKLLQELSKLGYRVSAKKAQLCQKEVTYLGYLLKEGKRWLTPARKATVMKIPPPTTPRQVREFLGKAGFCRLFIPGFASLAAPLYPLTKPSIPFIWTEEHQKAFDRIKEALLSAPALALPDLTKPFTLYVDERAGVARGVLTQTLGPWRRPVAYLSKKLDPVASGWPTCLKAVAAVALLLKDADKLTLGQNVTVIASHSLESIVRQPPDRWMTNARMTHYQSLLLNERVSFAPPAVLNPATLLPVESEATPVHRCSEILAEETGTRRDLKDQPLPGVPAWYTDGSSFIAEGKRRAGAAIVDGKRTVWASSLPEGTSAQKAELVALTQALRLAEGKDINIYTDSRYAFATAHIHGAIYKQRGWLTSAGKDIKNKEEILALLEAIHLPKRVAIIHCPGHQKGNDPVATGNRRADEAAKQAALSTRVLAETTKPAGKRTADGSEFEKRTADGSEFESPKKKAKVE

SEQ ID NO: 948 - protein, 2094 aa, synthetic construct
MPAAKRVKLDGGDKKYSIGLDIGTNSVGWAVITDEYKVPSKKFKVLGNTDRHSIKKNLIGALLFDSGETAEATRLKRTARRRYTRRKNRICYLQEIFSNEMAKVDDSFFHRLEESFLVEEDKKHERHPIFGNIVDEVAYHEKYPTIYHLRKKLVDSTDKADLRLIYLALAHMIKFRGHFLIEGDLNPDNSDVDKLFIQLVQTYNQLFEENPINASGVDAKAILSARLSKSRRLENLIAQLPGEKKNGLFGNLIALSLGLTPNFKSNFDLAEDAKLQLSKDTYDDDLDNLLAQIGDQYADLFLAAKNLSDAILLSDILRVNTEITKAPLSASMIKRYDEHHQDLTLLKALVRQQLPEKYKEIFFDQSKNGYAGYIDGGASQEEFYKFIKPILEKMDGTEELLVKLNREDLLRKQRTFDNGSIPHQIHLGELHAILRRQEDFYPFLKDNREKIEKILTFRIPYYVGPLARGNSRFAWMTRKSEETITPWNFEEVVDKGASAQSFIERMTNFDKNLPNEKVLPKHSLLYEYFTVYNELTKVKYVTEGMRKPAFLSGEQKKAIVDLLFKTNRKVTVKQLKEDYFKKIECFDSVEISGVEDRFNASLGTYHDLLKIIKDKDFLDNEENEDILEDIVLTLTLFEDREMIEERLKTYAHLFDDKVMKQLKRRRYTGWGRLSRKLINGIRDKQSGKTILDFLKSDGFANRNFMQLIHDDSLTFKEDIQKAQVSGQGDSLHEHIANLAGSPAIKKGILQTVKVVDELVKVMGRHKPENIVIEMARENQTTQKGQKNSRERMKRIEEGIKELGSQILKEHPVENTQLQNEKLYLYYLQNGRDMYVDQELDINRLSDYDVDHIVPQSFLKDDSIDNKVLTRSDKARGKSDNVPSEEVVKKMKNYWRQLLNAKLITQRKFDNLTKAERGGLSELDKAGFIKRQLVETRQITKHVAQILDSRMNTKYDENDKLIREVKVITLKSKLVSDFRKDFQFYKVREINNYHHAHDAYLNAVVGTALIKKYPKLESEFVYGDYKVYDVRKMIAKSEQEIGKATAKYFFYSNIMNFFKTEITLANGEIRKRPLIETNGETGEIVWDKGRDFATVRKVLSMPQVNIVKKTEVQTGGFSKESILPKRNSDKLIARKKDWDPKKYGGFDSPTVAYSVLVVAKVEKGKSKKLKSVKELLGITIMERSSFEKNPIDFLEAKGYKEVKKDLIIKLPKYSLFELENGRKRMLASAGELQKGNELALPSKYVNFLYLASHYEKLKGSPEDNEQKQLFVEQHKHYLDEIIEQISEFSKRVILADANLDKVLSAYNKHRDKPIREQAENIIHLFTLTNLGAPAAFKYFDTTIDRKRYTSTKEVLDATLIHQSITGLYETRIDLSQLGGDGGEAAAKGSSGGSGGVLNLEEEYRLHEKPVPSSIDPSWLQLFPTVWAERAGMGLANQVPPVVVELRSGASPVAVRQYPMSKEAREGIRPHIQRFLDLGVLVPCQSPWNTPLLPVKKPGTNDYRPVQDLREINKRVQDIHPTVPNPYNLLSSLPPSHTWYSVLDLKDAFFCLKLHPNSQPLFAFEWRDPEKGNTGQLTWTRLPQGFKNSPTLFNEALHRDLAPFRALNPQVVLLQYVDDLLVAAPTYRDCKEGTQKLLQELSKLGYRVSAKKAQLCQKEVTYLGYLLKEGKRWLTPARKATVMKIPPPTTPRQVREFLGKAGFCRLFIPGFASLAAPLYPLTKPSIPFIWTEEHQKAFDRIKEALLSAPALALPDLTKPFTLYVDERAGVARGVLTQTLGPWRRPVAYLSKKLDPVASGWPTCLKAVAAVALLLKDADKLTLGQNVTVIASHSLESIVRQPPDRWMTNARMTHYQSLLLNERVSFAPPAVLNPATLLPVESEATPVHRCSEILAEETGTRRDLKDQPLPGVPAWYTDGSSFIAEGKRRAGAAIVDGKRTVWASSLPEGTSAQKAELVALTQALRLAEGKDINIYTDSRYAFATAHIHGAIYKQRGWLTSAGKDIKNKEEILALLEAIHLPKRVAIIHCPGHQKGNDPVATGNRRADEAAKQAALSTRVLAETTKPAGKRTADGSEFEKRTADGSEFESPKKKAKVE

SEQ ID NO: 949 - protein, 2090 aa, synthetic construct
MPAAKRVKLDGGDKKYSIGLDIGTNSVGWAVITDEYKVPSKKFKVLGNTDRHSIKKNLIGALLFDSGETAEATRLKRTARRRYTRRKNRICYLQEIFSNEMAKVDDSFFHRLEESFLVEEDKKHERHPIFGNIVDEVAYHEKYPTIYHLRKKLVDSTDKADLRLIYLALAHMIKFRGHFLIEGDLNPDNSDVDKLFIQLVQTYNQLFEENPINASGVDAKAILSARLSKSRRLENLIAQLPGEKKNGLFGNLIALSLGLTPNFKSNFDLAEDAKLQLSKDTYDDDLDNLLAQIGDQYADLFLAAKNLSDAILLSDILRVNTEITKAPLSASMIKRYDEHHQDLTLLKALVRQQLPEKYKEIFFDQSKNGYAGYIDGGASQEEFYKFIKPILEKMDGTEELLVKLNREDLLRKQRTFDNGSIPHQIHLGELHAILRRQEDFYPFLKDNREKIEKILTFRIPYYVGPLARGNSRFAWMTRKSEETITPWNFEEVVDKGASAQSFIERMTNFDKNLPNEKVLPKHSLLYEYFTVYNELTKVKYVTEGMRKPAFLSGEQKKAIVDLLFKTNRKVTVKQLKEDYFKKIECFDSVEISGVEDRFNASLGTYHDLLKIIKDKDFLDNEENEDILEDIVLTLTLFEDREMIEERLKTYAHLFDDKVMKQLKRRRYTGWGRLSRKLINGIRDKQSGKTILDFLKSDGFANRNFMQLIHDDSLTFKEDIQKAQVSGQGDSLHEHIANLAGSPAIKKGILQTVKVVDELVKVMGRHKPENIVIEMARENQTTQKGQKNSRERMKRIEEGIKELGSQILKEHPVENTQLQNEKLYLYYLQNGRDMYVDQELDINRLSDYDVDHIVPQSFLKDDSIDNKVLTRSDKARGKSDNVPSEEVVKKMKNYWRQLLNAKLITQRKFDNLTKAERGGLSELDKAGFIKRQLVETRQITKHVAQILDSRMNTKYDENDKLIREVKVITLKSKLVSDFRKDFQFYKVREINNYHHAHDAYLNAVVGTALIKKYPKLESEFVYGDYKVYDVRKMIAKSEQEIGKATAKYFFYSNIMNFFKTEITLANGEIRKRPLIETNGETGEIVWDKGRDFATVRKVLSMPQVNIVKKTEVQTGGFSKESILPKRNSDKLIARKKDWDPKKYGGFDSPTVAYSVLVVAKVEKGKSKKLKSVKELLGITIMERSSFEKNPIDFLEAKGYKEVKKDLIIKLPKYSLFELENGRKRMLASAGELQKGNELALPSKYVNFLYLASHYEKLKGSPEDNEQKQLFVEQHKHYLDEIIEQISEFSKRVILADANLDKVLSAYNKHRDKPIREQAENIIHLFTLTNLGAPAAFKYFDTTIDRKRYTSTKEVLDATLIHQSITGLYETRIDLSQLGGDGGPAPAPAPGGVLNLEEEYRLHEKPVPSSIDPSWLQLFPTVWAERAGMGLANQVPPVVVELRSGASPVAVRQYPMSKEAREGIRPHIQRFLDLGVLVPCQSPWNTPLLPVKKPGTNDYRPVQDLREINKRVQDIHPTVPNPYNLLSSLPPSHTWYSVLDLKDAFFCLKLHPNSQPLFAFEWRDPEKGNTGQLTWTRLPQGFKNSPTLFNEALHRDLAPFRALNPQVVLLQYVDDLLVAAPTYRDCKEGTQKLLQELSKLGYRVSAKKAQLCQKEVTYLGYLLKEGKRWLTPARKATVMKIPPPTTPRQVREFLGKAGFCRLFIPGFASLAAPLYPLTKPSIPFIWTEEHQKAFDRIKEALLSAPALALPDLTKPFTLYVDERAGVARGVLTQTLGPWRRPVAYLSKKLDPVASGWPTCLKAVAAVALLLKDADKLTLGQNVTVIASHSLESIVRQPPDRWMTNARMTHYQSLLLNERVSFAPPAVLNPATLLPVESEATPVHRCSEILAEETGTRRDLKDQPLPGVPAWYTDGSSFIAEGKRRAGAAIVDGKRTVWASSLPEGTSAQKAELVALTQALRLAEGKDINIYTDSRYAFATAHIHGAIYKQRGWLTSAGKDIKNKEEILALLEAIHLPKRVAIIHCPGHQKGNDPVATGNRRADEAAKQAALSTRVLAETTKPAGKRTADGSEFEKRTADGSEFESPKKKAKVE

SEQ ID NO: 950 - protein, 2089 aa, synthetic construct
MPAAKRVKLDGGDKKYSIGLDIGTNSVGWAVITDEYKVPSKKFKVLGNTDRHSIKKNLIGALLFDSGETAEATRLKRTARRRYTRRKNRICYLQEIFSNEMAKVDDSFFHRLEESFLVEEDKKHERHPIFGNIVDEVAYHEKYPTIYHLRKKLVDSTDKADLRLIYLALAHMIKFRGHFLIEGDLNPDNSDVDKLFIQLVQTYNQLFEENPINASGVDAKAILSARLSKSRRLENLIAQLPGEKKNGLFGNLIALSLGLTPNFKSNFDLAEDAKLQLSKDTYDDDLDNLLAQIGDQYADLFLAAKNLSDAILLSDILRVNTEITKAPLSASMIKRYDEHHQDLTLLKALVRQQLPEKYKEIFFDQSKNGYAGYIDGGASQEEFYKFIKPILEKMDGTEELLVKLNREDLLRKQRTFDNGSIPHQIHLGELHAILRRQEDFYPFLKDNREKIEKILTFRIPYYVGPLARGNSRFAWMTRKSEETITPWNFEEVVDKGASAQSFIERMTNFDKNLPNEKVLPKHSLLYEYFTVYNELTKVKYVTEGMRKPAFLSGEQKKAIVDLLFKTNRKVTVKQLKEDYFKKIECFDSVEISGVEDRFNASLGTYHDLLKIIKDKDFLDNEENEDILEDIVLTLTLFEDREMIEERLKTYAHLFDDKVMKQLKRRRYTGWGRLSRKLINGIRDKQSGKTILDFLKSDGFANRNFMQLIHDDSLTFKEDIQKAQVSGQGDSLHEHIANLAGSPAIKKGILQTVKVVDELVKVMGRHKPENIVIEMARENQTTQKGQKNSRERMKRIEEGIKELGSQILKEHPVENTQLQNEKLYLYYLQNGRDMYVDQELDINRLSDYDVDHIVPQSFLKDDSIDNKVLTRSDKARGKSDNVPSEEVVKKMKNYWRQLLNAKLITQRKFDNLTKAERGGLSELDKAGFIKRQLVETRQITKHVAQILDSRMNTKYDENDKLIREVKVITLKSKLVSDFRKDFQFYKVREINNYHHAHDAYLNAVVGTALIKKYPKLESEFVYGDYKVYDVRKMIAKSEQEIGKATAKYFFYSNIMNFFKTEITLANGEIRKRPLIETNGETGEIVWDKGRDFATVRKVLSMPQVNIVKKTEVQTGGFSKESILPKRNSDKLIARKKDWDPKKYGGFDSPTVAYSVLVVAKVEKGKSKKLKSVKELLGITIMERSSFEKNPIDFLEAKGYKEVKKDLIIKLPKYSLFELENGRKRMLASAGELQKGNELALPSKYVNFLYLASHYEKLKGSPEDNEQKQLFVEQHKHYLDEIIEQISEFSKRVILADANLDKVLSAYNKHRDKPIREQAENIIHLFTLTNLGAPAAFKYFDTTIDRKRYTSTKEVLDATLIHQSITGLYETRIDLSQLGGDGGGSSGGSGGVLNLEEEYRLHEKPVPSSIDPSWLQLFPTVWAERAGMGLANQVPPVVVELRSGASPVAVRQYPMSKEAREGIRPHIQRFLDLGVLVPCQSPWNTPLLPVKKPGTNDYRPVQDLREINKRVQDIHPTVPNPYNLLSSLPPSHTWYSVLDLKDAFFCLKLHPNSQPLFAFEWRDPEKGNTGQLTWTRLPQGFKNSPTLFNEALHRDLAPFRALNPQVVLLQYVDDLLVAAPTYRDCKEGTQKLLQELSKLGYRVSAKKAQLCQKEVTYLGYLLKEGKRWLTPARKATVMKIPPPTTPRQVREFLGKAGFCRLFIPGFASLAAPLYPLTKPSIPFIWTEEHQKAFDRIKEALLSAPALALPDLTKPFTLYVDERAGVARGVLTQTLGPWRRPVAYLSKKLDPVASGWPTCLKAVAAVALLLKDADKLTLGQNVTVIASHSLESIVRQPPDRWMTNARMTHYQSLLLNERVSFAPPAVLNPATLLPVESEATPVHRCSEILAEETGTRRDLKDQPLPGVPAWYTDGSSFIAEGKRRAGAAIVDGKRTVWASSLPEGTSAQKAELVALTQALRLAEGKDINIYTDSRYAFATAHIHGAIYKQRGWLTSAGKDIKNKEEILALLEAIHLPKRVAIIHCPGHQKGNDPVATGNRRADEAAKQAALSTRVLAETTKPAGKRTADGSEFEKRTADGSEFESPKKKAKVE

SEQ ID NO: 951 - protein, 2131 aa, synthetic construct
MPAAKRVKLDGGDKKYSIGLDIGTNSVGWAVITDEYKVPSKKFKVLGNTDRHSIKKNLIGALLFDSGETAEATRLKRTARRRYTRRKNRICYLQEIFSNEMAKVDDSFFHRLEESFLVEEDKKHERHPIFGNIVDEVAYHEKYPTIYHLRKKLVDSTDKADLRLIYLALAHMIKFRGHFLIEGDLNPDNSDVDKLFIQLVQTYNQLFEENPINASGVDAKAILSARLSKSRRLENLIAQLPGEKKNGLFGNLIALSLGLTPNFKSNFDLAEDAKLQLSKDTYDDDLDNLLAQIGDQYADLFLAAKNLSDAILLSDILRVNTEITKAPLSASMIKRYDEHHQDLTLLKALVRQQLPEKYKEIFFDQSKNGYAGYIDGGASQEEFYKFIKPILEKMDGTEELLVKLNREDLLRKQRTFDNGSIPHQIHLGELHAILRRQEDFYPFLKDNREKIEKILTFRIPYYVGPLARGNSRFAWMTRKSEETITPWNFEEVVDKGASAQSFIERMTNFDKNLPNEKVLPKHSLLYEYFTVYNELTKVKYVTEGMRKPAFLSGEQKKAIVDLLFKTNRKVTVKQLKEDYFKKIECFDSVEISGVEDRFNASLGTYHDLLKIIKDKDFLDNEENEDILEDIVLTLTLFEDREMIEERLKTYAHLFDDKVMKQLKRRRYTGWGRLSRKLINGIRDKQSGKTILDFLKSDGFANRNFMQLIHDDSLTFKEDIQKAQVSGQGDSLHEHIANLAGSPAIKKGILQTVKVVDELVKVMGRHKPENIVIEMARENQTTQKGQKNSRERMKRIEEGIKELGSQILKEHPVENTQLQNEKLYLYYLQNGRDMYVDQELDINRLSDYDVDHIVPQSFLKDDSIDNKVLTRSDKARGKSDNVPSEEVVKKMKNYWRQLLNAKLITQRKFDNLTKAERGGLSELDKAGFIKRQLVETRQITKHVAQILDSRMNTKYDENDKLIREVKVITLKSKLVSDFRKDFQFYKVREINNYHHAHDAYLNAVVGTALIKKYPKLESEFVYGDYKVYDVRKMIAKSEQEIGKATAKYFFYSNIMNFFKTEITLANGEIRKRPLIETNGETGEIVWDKGRDFATVRKVLSMPQVNIVKKTEVQTGGFSKESILPKRNSDKLIARKKDWDPKKYGGFDSPTVAYSVLVVAKVEKGKSKKLKSVKELLGITIMERSSFEKNPIDFLEAKGYKEVKKDLIIKLPKYSLFELENGRKRMLASAGELQKGNELALPSKYVNFLYLASHYEKLKGSPEDNEQKQLFVEQHKHYLDEIIEQISEFSKRVILADANLDKVLSAYNKHRDKPIREQAENIIHLFTLTNLGAPAAFKYFDTTIDRKRYTSTKEVLDATLIHQSITGLYETRIDLSQLGGDGGAEAAAKEAAAKEAAAKEAAAKALEAEAAAKEAAAKEAAAKEAAAKAGGTLNIEDEYRLHETSKEPDVPLGSTWLSDFPQAWAETGGMGLAVRQAPLIIPLKATSTPVSIKQYPMSQEARLGIKPHIQRLLDQGILVPCQSPWNTPLLPVKKPGTNDYRPVQDLREVNKRVEDIHPTVPNPYNLLSGLPPSHQWYTVLDLKDAFFCLRLHPTSQPLFAFEWRDPEMGISGQLTWTRLPQGFKNSPTLFDEALHRDLADFRIQHPDLILLQYVDDLLLAATSEQDCQRGTRALLQTLGNLGYRASAKKAQICQKQVKYLGYLLKEGQRWLTEARKETVMGQPTPKTPRQLREFLGTAGFCRLWIPGFAEMAAPLYPLTKTGTLFNWGPDQQKAYQEIKQALLTAPALGLPDLTKPFELFVDEKQGYAKGVLTQKLGPWRRPVAYLSKKLDPVAAGWPPCLRMVAAIAVLTKDAGKLTMGQPLVILAPHAVEALVKQPPDRWLSNARMTHYQAMLLDTDRVQFGPVVALNPATLLPLPEKEAPHDCLEILAETHGTRPDLTDQPIPDADYTWYTDGSSFLQEGQRRAGAAVTTETEVIWARALPAGTSAQRAELIALTQALKMAEGKKLNVYTDSRYAFATAHVHGEIYRRRGLLTSEGREIKNKNEILALLKALFLPKRLSIIHCPGHQKGNSAEARGNRMADQAAREAAMKAVLETSTLLAGKRTADGSEFEKRTADGSEFESPKKKAKVE

SEQ ID NO: 952 - protein, 2118 aa, synthetic construct
MPAAKRVKLDGGDKKYSIGLDIGTNSVGWAVITDEYKVPSKKFKVLGNTDRHSIKKNLIGALLFDSGETAEATRLKRTARRRYTRRKNRICYLQEIFSNEMAKVDDSFFHRLEESFLVEEDKKHERHPIFGNIVDEVAYHEKYPTIYHLRKKLVDSTDKADLRLIYLALAHMIKFRGHFLIEGDLNPDNSDVDKLFIQLVQTYNQLFEENPINASGVDAKAILSARLSKSRRLENLIAQLPGEKKNGLFGNLIALSLGLTPNFKSNFDLAEDAKLQLSKDTYDDDLDNLLAQIGDQYADLFLAAKNLSDAILLSDILRVNTEITKAPLSASMIKRYDEHHQDLTLLKALVRQQLPEKYKEIFFDQSKNGYAGYIDGGASQEEFYKFIKPILEKMDGTEELLVKLNREDLLRKQRTFDNGSIPHQIHLGELHAILRRQEDFYPFLKDNREKIEKILTFRIPYYVGPLARGNSRFAWMTRKSEETITPWNFEEVVDKGASAQSFIERMTNFDKNLPNEKVLPKHSLLYEYFTVYNELTKVKYVTEGMRKPAFLSGEQKKAIVDLLFKTNRKVTVKQLKEDYFKKIECFDSVEISGVEDRFNASLGTYHDLLKIIKDKDFLDNEENEDILEDIVLTLTLFEDREMIEERLKTYAHLFDDKVMKQLKRRRYTGWGRLSRKLINGIRDKQSGKTILDFLKSDGFANRNFMQLIHDDSLTFKEDIQKAQVSGQGDSLHEHIANLAGSPAIKKGILQTVKVVDELVKVMGRHKPENIVIEMARENQTTQKGQKNSRERMKRIEEGIKELGSQILKEHPVENTQLQNEKLYLYYLQNGRDMYVDQELDINRLSDYDVDHIVPQSFLKDDSIDNKVLTRSDKARGKSDNVPSEEVVKKMKNYWRQLLNAKLITQRKFDNLTKAERGGLSELDKAGFIKRQLVETRQITKHVAQILDSRMNTKYDENDKLIREVKVITLKSKLVSDFRKDFQFYKVREINNYHHAHDAYLNAVVGTALIKKYPKLESEFVYGDYKVYDVRKMIAKSEQEIGKATAKYFFYSNIMNFFKTEITLANGEIRKRPLIETNGETGEIVWDKGRDFATVRKVLSMPQVNIVKKTEVQTGGFSKESILPKRNSDKLIARKKDWDPKKYGGFDSPTVAYSVLVVAKVEKGKSKKLKSVKELLGITIMERSSFEKNPIDFLEAKGYKEVKKDLIIKLPKYSLFELENGRKRMLASAGELQKGNELALPSKYVNFLYLASHYEKLKGSPEDNEQKQLFVEQHKHYLDEIIEQISEFSKRVILADANLDKVLSAYNKHRDKPIREQAENIIHLFTLTNLGAPAAFKYFDTTIDRKRYTSTKEVLDATLIHQSITGLYETRIDLSQLGGDGGSGGSSGGSSGSETPGTSESATPESSGGSSGGSSGGTLNIEDEYRLHETSKEPDVPLGSTWLSDFPQAWAETGGMGLAVRQAPLIIPLKATSTPVSIKQYPMSQEARLGIKPHIQRLLDQGILVPCQSPWNTPLLPVKKPGTNDYRPVQDLREVNKRVEDIHPTVPNPYNLLSGLPPSHQWYTVLDLKDAFFCLRLHPTSQPLFAFEWRDPEMGISGQLTWTRLPQGFKNSPTLFDEALHRDLADFRIQHPDLILLQYVDDLLLAATSEQDCQRGTRALLQTLGNLGYRASAKKAQICQKQVKYLGYLLKEGQRWLTEARKETVMGQPTPKTPRQLREFLGTAGFCRLWIPGFAEMAAPLYPLTKTGTLFNWGPDQQKAYQEIKQALLTAPALGLPDLTKPFELFVDEKQGYAKGVLTQKLGPWRRPVAYLSKKLDPVAAGWPPCLRMVAAIAVLTKDAGKLTMGQPLVILAPHAVEALVKQPPDRWLSNARMTHYQAMLLDTDRVQFGPVVALNPATLLPLPEKEAPHDCLEILAETHGTRPDLTDQPIPDADYTWYTDGSSFLQEGQRRAGAAVTTETEVIWARALPAGTSAQRAELIALTQALKMAEGKKLNVYTDSRYAFATAHVHGEIYRRRGLLTSEGREIKNKNEILALLKALFLPKRLSIIHCPGHQKGNSAEARGNRMADQAAREAAMKAVLETSTLLAGKRTADGSEFEKRTADGSEFESPKKKAKVE

SEQ ID NO: 953 - protein, 2105 aa, synthetic construct
MPAAKRVKLDGGDKKYSIGLDIGTNSVGWAVITDEYKVPSKKFKVLGNTDRHSIKKNLIGALLFDSGETAEATRLKRTARRRYTRRKNRICYLQEIFSNEMAKVDDSFFHRLEESFLVEEDKKHERHPIFGNIVDEVAYHEKYPTIYHLRKKLVDSTDKADLRLIYLALAHMIKFRGHFLIEGDLNPDNSDVDKLFIQLVQTYNQLFEENPINASGVDAKAILSARLSKSRRLENLIAQLPGEKKNGLFGNLIALSLGLTPNFKSNFDLAEDAKLQLSKDTYDDDLDNLLAQIGDQYADLFLAAKNLSDAILLSDILRVNTEITKAPLSASMIKRYDEHHQDLTLLKALVRQQLPEKYKEIFFDQSKNGYAGYIDGGASQEEFYKFIKPILEKMDGTEELLVKLNREDLLRKQRTFDNGSIPHQIHLGELHAILRRQEDFYPFLKDNREKIEKILTFRIPYYVGPLARGNSRFAWMTRKSEETITPWNFEEVVDKGASAQSFIERMTNFDKNLPNEKVLPKHSLLYEYFTVYNELTKVKYVTEGMRKPAFLSGEQKKAIVDLLFKTNRKVTVKQLKEDYFKKIECFDSVEISGVEDRFNASLGTYHDLLKIIKDKDFLDNEENEDILEDIVLTLTLFEDREMIEERLKTYAHLFDDKVMKQLKRRRYTGWGRLSRKLINGIRDKQSGKTILDFLKSDGFANRNFMQLIHDDSLTFKEDIQKAQVSGQGDSLHEHIANLAGSPAIKKGILQTVKVVDELVKVMGRHKPENIVIEMARENQTTQKGQKNSRERMKRIEEGIKELGSQILKEHPVENTQLQNEKLYLYYLQNGRDMYVDQELDINRLSDYDVDHIVPQSFLKDDSIDNKVLTRSDKARGKSDNVPSEEVVKKMKNYWRQLLNAKLITQRKFDNLTKAERGGLSELDKAGFIKRQLVETRQITKHVAQILDSRMNTKYDENDKLIREVKVITLKSKLVSDFRKDFQFYKVREINNYHHAHDAYLNAVVGTALIKKYPKLESEFVYGDYKVYDVRKMIAKSEQEIGKATAKYFFYSNIMNFFKTEITLANGEIRKRPLIETNGETGEIVWDKGRDFATVRKVLSMPQVNIVKKTEVQTGGFSKESILPKRNSDKLIARKKDWDPKKYGGFDSPTVAYSVLVVAKVEKGKSKKLKSVKELLGITIMERSSFEKNPIDFLEAKGYKEVKKDLIIKLPKYSLFELENGRKRMLASAGELQKGNELALPSKYVNFLYLASHYEKLKGSPEDNEQKQLFVEQHKHYLDEIIEQISEFSKRVILADANLDKVLSAYNKHRDKPIREQAENIIHLFTLTNLGAPAAFKYFDTTIDRKRYTSTKEVLDATLIHQSITGLYETRIDLSQLGGDGGGGGGSGGGGSGGGGSGGGGSGGTLNIEDEYRLHETSKEPDVPLGSTWLSDFPQAWAETGGMGLAVRQAPLIIPLKATSTPVSIKQYPMSQEARLGIKPHIQRLLDQGILVPCQSPWNTPLLPVKKPGTNDYRPVQDLREVNKRVEDIHPTVPNPYNLLSGLPPSHQWYTVLDLKDAFFCLRLHPTSQPLFAFEWRDPEMGISGQLTWTRLPQGFKNSPTLFDEALHRDLADFRIQHPDLILLQYVDDLLLAATSEQDCQRGTRALLQTLGNLGYRASAKKAQICQKQVKYLGYLLKEGQRWLTEARKETVMGQPTPKTPRQLREFLGTAGFCRLWIPGFAEMAAPLYPLTKTGTLFNWGPDQQKAYQEIKQALLTAPALGLPDLTKPFELFVDEKQGYAKGVLTQKLGPWRRPVAYLSKKLDPVAAGWPPCLRMVAAIAVLTKDAGKLTMGQPLVILAPHAVEALVKQPPDRWLSNARMTHYQAMLLDTDRVQFGPVVALNPATLLPLPEKEAPHDCLEILAETHGTRPDLTDQPIPDADYTWYTDGSSFLQEGQRRAGAAVTTETEVIWARALPAGTSAQRAELIALTQALKMAEGKKLNVYTDSRYAFATAHVHGEIYRRRGLLTSEGREIKNKNEILALLKALFLPKRLSIIHCPGHQKGNSAEARGNRMADQAAREAAMKAVLETSTLLAGKRTADGSEFEKRTADGSEFESPKKKAKVE

SEQ ID NO: 954 - protein, 2093 aa, synthetic construct
MPAAKRVKLDGGDKKYSIGLDIGTNSVGWAVITDEYKVPSKKFKVLGNTDRHSIKKNLIGALLFDSGETAEATRLKRTARRRYTRRKNRICYLQEIFSNEMAKVDDSFFHRLEESFLVEEDKKHERHPIFGNIVDEVAYHEKYPTIYHLRKKLVDSTDKADLRLIYLALAHMIKFRGHFLIEGDLNPDNSDVDKLFIQLVQTYNQLFEENPINASGVDAKAILSARLSKSRRLENLIAQLPGEKKNGLFGNLIALSLGLTPNFKSNFDLAEDAKLQLSKDTYDDDLDNLLAQIGDQYADLFLAAKNLSDAILLSDILRVNTEITKAPLSASMIKRYDEHHQDLTLLKALVRQQLPEKYKEIFFDQSKNGYAGYIDGGASQEEFYKFIKPILEKMDGTEELLVKLNREDLLRKQRTFDNGSIPHQIHLGELHAILRRQEDFYPFLKDNREKIEKILTFRIPYYVGPLARGNSRFAWMTRKSEETITPWNFEEVVDKGASAQSFIERMTNFDKNLPNEKVLPKHSLLYEYFTVYNELTKVKYVTEGMRKPAFLSGEQKKAIVDLLFKTNRKVTVKQLKEDYFKKIECFDSVEISGVEDRFNASLGTYHDLLKIIKDKDFLDNEENEDILEDIVLTLTLFEDREMIEERLKTYAHLFDDKVMKQLKRRRYTGWGRLSRKLINGIRDKQSGKTILDFLKSDGFANRNFMQLIHDDSLTFKEDIQKAQVSGQGDSLHEHIANLAGSPAIKKGILQTVKVVDELVKVMGRHKPENIVIEMARENQTTQKGQKNSRERMKRIEEGIKELGSQILKEHPVENTQLQNEKLYLYYLQNGRDMYVDQELDINRLSDYDVDHIVPQSFLKDDSIDNKVLTRSDKARGKSDNVPSEEVVKKMKNYWRQLLNAKLITQRKFDNLTKAERGGLSELDKAGFIKRQLVETRQITKHVAQILDSRMNTKYDENDKLIREVKVITLKSKLVSDFRKDFQFYKVREINNYHHAHDAYLNAVVGTALIKKYPKLESEFVYGDYKVYDVRKMIAKSEQEIGKATAKYFFYSNIMNFFKTEITLANGEIRKRPLIETNGETGEIVWDKGRDFATVRKVLSMPQVNIVKKTEVQTGGFSKESILPKRNSDKLIARKKDWDPKKYGGFDSPTVAYSVLVVAKVEKGKSKKLKSVKELLGITIMERSSFEKNPIDFLEAKGYKEVKKDLIIKLPKYSLFELENGRKRMLASAGELQKGNELALPSKYVNFLYLASHYEKLKGSPEDNEQKQLFVEQHKHYLDEIIEQISEFSKRVILADANLDKVLSAYNKHRDKPIREQAENIIHLFTLTNLGAPAAFKYFDTTIDRKRYTSTKEVLDATLIHQSITGLYETRIDLSQLGGDGGGSSEAAAKGGTLNIEDEYRLHETSKEPDVPLGSTWLSDFPQAWAETGGMGLAVRQAPLIIPLKATSTPVSIKQYPMSQEARLGIKPHIQRLLDQGILVPCQSPWNTPLLPVKKPGTNDYRPVQDLREVNKRVEDIHPTVPNPYNLLSGLPPSHQWYTVLDLKDAFFCLRLHPTSQPLFAFEWRDPEMGISGQLTWTRLPQGFKNSPTLFDEALHRDLADFRIQHPDLILLQYVDDLLLAATSEQDCQRGTRALLQTLGNLGYRASAKKAQICQKQVKYLGYLLKEGQRWLTEARKETVMGQPTPKTPRQLREFLGTAGFCRLWIPGFAEMAAPLYPLTKTGTLFNWGPDQQKAYQEIKQALLTAPALGLPDLTKPFELFVDEKQGYAKGVLTQKLGPWRRPVAYLSKKLDPVAAGWPPCLRMVAAIAVLTKDAGKLTMGQPLVILAPHAVEALVKQPPDRWLSNARMTHYQAMLLDTDRVQFGPVVALNPATLLPLPEKEAPHDCLEILAETHGTRPDLTDQPIPDADYTWYTDGSSFLQEGQRRAGAAVTTETEVIWARALPAGTSAQRAELIALTQALKMAEGKKLNVYTDSRYAFATAHVHGEIYRRRGLLTSEGREIKNKNEILALLKALFLPKRLSIIHCPGHQKGNSAEARGNRMADQAAREAAMKAVLETSTLLAGKRTADGSEFEKRTADGSEFESPKKKAKVE

SEQ ID NO: 955 - protein, 2096 aa, synthetic construct
MPAAKRVKLDGGDKKYSIGLDIGTNSVGWAVITDEYKVPSKKFKVLGNTDRHSIKKNLIGALLFDSGETAEATRLKRTARRRYTRRKNRICYLQEIFSNEMAKVDDSFFHRLEESFLVEEDKKHERHPIFGNIVDEVAYHEKYPTIYHLRKKLVDSTDKADLRLIYLALAHMIKFRGHFLIEGDLNPDNSDVDKLFIQLVQTYNQLFEENPINASGVDAKAILSARLSKSRRLENLIAQLPGEKKNGLFGNLIALSLGLTPNFKSNFDLAEDAKLQLSKDTYDDDLDNLLAQIGDQYADLFLAAKNLSDAILLSDILRVNTEITKAPLSASMIKRYDEHHQDLTLLKALVRQQLPEKYKEIFFDQSKNGYAGYIDGGASQEEFYKFIKPILEKMDGTEELLVKLNREDLLRKQRTFDNGSIPHQIHLGELHAILRRQEDFYPFLKDNREKIEKILTFRIPYYVGPLARGNSRFAWMTRKSEETITPWNFEEVVDKGASAQSFIERMTNFDKNLPNEKVLPKHSLLYEYFTVYNELTKVKYVTEGMRKPAFLSGEQKKAIVDLLFKTNRKVTVKQLKEDYFKKIECFDSVEISGVEDRFNASLGTYHDLLKIIKDKDFLDNEENEDILEDIVLTLTLFEDREMIEERLKTYAHLFDDKVMKQLKRRRYTGWGRLSRKLINGIRDKQSGKTILDFLKSDGFANRNFMQLIHDDSLTFKEDIQKAQVSGQGDSLHEHIANLAGSPAIKKGILQTVKVVDELVKVMGRHKPENIVIEMARENQTTQKGQKNSRERMKRIEEGIKELGSQILKEHPVENTQLQNEKLYLYYLQNGRDMYVDQELDINRLSDYDVDHIVPQSFLKDDSIDNKVLTRSDKARGKSDNVPSEEVVKKMKNYWRQLLNAKLITQRKFDNLTKAERGGLSELDKAGFIKRQLVETRQITKHVAQILDSRMNTKYDENDKLIREVKVITLKSKLVSDFRKDFQFYKVREINNYHHAHDAYLNAVVGTALIKKYPKLESEFVYGDYKVYDVRKMIAKSEQEIGKATAKYFFYSNIMNFFKTEITLANGEIRKRPLIETNGETGEIVWDKGRDFATVRKVLSMPQVNIVKKTEVQTGGFSKESILPKRNSDKLIARKKDWDPKKYGGFDSPTVAYSVLVVAKVEKGKSKKLKSVKELLGITIMERSSFEKNPIDFLEAKGYKEVKKDLIIKLPKYSLFELENGRKRMLASAGELQKGNELALPSKYVNFLYLASHYEKLKGSPEDNEQKQLFVEQHKHYLDEIIEQISEFSKRVILADANLDKVLSAYNKHRDKPIREQAENIIHLFTLTNLGAPAAFKYFDTTIDRKRYTSTKEVLDATLIHQSITGLYETRIDLSQLGGDGGEAAAKGGGGSSGGTLNIEDEYRLHETSKEPDVPLGSTWLSDFPQAWAETGGMGLAVRQAPLIIPLKATSTPVSIKQYPMSQEARLGIKPHIQRLLDQGILVPCQSPWNTPLLPVKKPGTNDYRPVQDLREVNKRVEDIHPTVPNPYNLLSGLPPSHQWYTVLDLKDAFFCLRLHPTSQPLFAFEWRDPEMGISGQLTWTRLPQGFKNSPTLFDEALHRDLADFRIQHPDLILLQYVDDLLLAATSEQDCQRGTRALLQTLGNLGYRASAKKAQICQKQVKYLGYLLKEGQRWLTEARKETVMGQPTPKTPRQLREFLGTAGFCRLWIPGFAEMAAPLYPLTKTGTLFNWGPDQQKAYQEIKQALLTAPALGLPDLTKPFELFVDEKQGYAKGVLTQKLGPWRRPVAYLSKKLDPVAAGWPPCLRMVAAIAVLTKDAGKLTMGQPLVILAPHAVEALVKQPPDRWLSNARMTHYQAMLLDTDRVQFGPVVALNPATLLPLPEKEAPHDCLEILAETHGTRPDLTDQPIPDADYTWYTDGSSFLQEGQRRAGAAVTTETEVIWARALPAGTSAQRAELIALTQALKMAEGKKLNVYTDSRYAFATAHVHGEIYRRRGLLTSEGREIKNKNEILALLKALFLPKRLSIIHCPGHQKGNSAEARGNRMADQAAREAAMKAVLETSTLLAGKRTADGSEFEKRTADGSEFESPKKKAKVE

SEQ ID NO: 956 - protein, 2092 aa, synthetic construct
MPAAKRVKLDGGDKKYSIGLDIGTNSVGWAVITDEYKVPSKKFKVLGNTDRHSIKKNLIGALLFDSGETAEATRLKRTARRRYTRRKNRICYLQEIFSNEMAKVDDSFFHRLEESFLVEEDKKHERHPIFGNIVDEVAYHEKYPTIYHLRKKLVDSTDKADLRLIYLALAHMIKFRGHFLIEGDLNPDNSDVDKLFIQLVQTYNQLFEENPINASGVDAKAILSARLSKSRRLENLIAQLPGEKKNGLFGNLIALSLGLTPNFKSNFDLAEDAKLQLSKDTYDDDLDNLLAQIGDQYADLFLAAKNLSDAILLSDILRVNTEITKAPLSASMIKRYDEHHQDLTLLKALVRQQLPEKYKEIFFDQSKNGYAGYIDGGASQEEFYKFIKPILEKMDGTEELLVKLNREDLLRKQRTFDNGSIPHQIHLGELHAILRRQEDFYPFLKDNREKIEKILTFRIPYYVGPLARGNSRFAWMTRKSEETITPWNFEEVVDKGASAQSFIERMTNFDKNLPNEKVLPKHSLLYEYFTVYNELTKVKYVTEGMRKPAFLSGEQKKAIVDLLFKTNRKVTVKQLKEDYFKKIECFDSVEISGVEDRFNASLGTYHDLLKIIKDKDFLDNEENEDILEDIVLTLTLFEDREMIEERLKTYAHLFDDKVMKQLKRRRYTGWGRLSRKLINGIRDKQSGKTILDFLKSDGFANRNFMQLIHDDSLTFKEDIQKAQVSGQGDSLHEHIANLAGSPAIKKGILQTVKVVDELVKVMGRHKPENIVIEMARENQTTQKGQKNSRERMKRIEEGIKELGSQILKEHPVENTQLQNEKLYLYYLQNGRDMYVDQELDINRLSDYDVDHIVPQSFLKDDSIDNKVLTRSDKARGKSDNVPSEEVVKKMKNYWRQLLNAKLITQRKFDNLTKAERGGLSELDKAGFIKRQLVETRQITKHVAQILDSRMNTKYDENDKLIREVKVITLKSKLVSDFRKDFQFYKVREINNYHHAHDAYLNAVVGTALIKKYPKLESEFVYGDYKVYDVRKMIAKSEQEIGKATAKYFFYSNIMNFFKTEITLANGEIRKRPLIETNGETGEIVWDKGRDFATVRKVLSMPQVNIVKKTEVQTGGFSKESILPKRNSDKLIARKKDWDPKKYGGFDSPTVAYSVLVVAKVEKGKSKKLKSVKELLGITIMERSSFEKNPIDFLEAKGYKEVKKDLIIKLPKYSLFELENGRKRMLASAGELQKGNELALPSKYVNFLYLASHYEKLKGSPEDNEQKQLFVEQHKHYLDEIIEQISEFSKRVILADANLDKVLSAYNKHRDKPIREQAENIIHLFTLTNLGAPAAFKYFDTTIDRKRYTSTKEVLDATLIHQSITGLYETRIDLSQLGGDGGGGGGGGGGGTLNIEDEYRLHETSKEPDVPLGSTWLSDFPQAWAETGGMGLAVRQAPLIIPLKATSTPVSIKQYPMSQEARLGIKPHIQRLLDQGILVPCQSPWNTPLLPVKKPGTNDYRPVQDLREVNKRVEDIHPTVPNPYNLLSGLPPSHQWYTVLDLKDAFFCLRLHPTSQPLFAFEWRDPEMGISGQLTWTRLPQGFKNSPTLFDEALHRDLADFRIQHPDLILLQYVDDLLLAATSEQDCQRGTRALLQTLGNLGYRASAKKAQICQKQVKYLGYLLKEGQRWLTEARKETVMGQPTPKTPRQLREFLGTAGFCRLWIPGFAEMAAPLYPLTKTGTLFNWGPDQQKAYQEIKQALLTAPALGLPDLTKPFELFVDEKQGYAKGVLTQKLGPWRRPVAYLSKKLDPVAAGWPPCLRMVAAIAVLTKDAGKLTMGQPLVILAPHAVEALVKQPPDRWLSNARMTHYQAMLLDTDRVQFGPVVALNPATLLPLPEKEAPHDCLEILAETHGTRPDLTDQPIPDADYTWYTDGSSFLQEGQRRAGAAVTTETEVIWARALPAGTSAQRAELIALTQALKMAEGKKLNVYTDSRYAFATAHVHGEIYRRRGLLTSEGREIKNKNEILALLKALFLPKRLSIIHCPGHQKGNSAEARGNRMADQAAREAAMKAVLETSTLLAGKRTADGSEFEKRTADGSEFESPKKKAKVE

SEQ ID NO: 957 - protein, 2094 aa, synthetic construct
MPAAKRVKLDGGDKKYSIGLDIGTNSVGWAVITDEYKVPSKKFKVLGNTDRHSIKKNLIGALLFDSGETAEATRLKRTARRRYTRRKNRICYLQEIFSNEMAKVDDSFFHRLEESFLVEEDKKHERHPIFGNIVDEVAYHEKYPTIYHLRKKLVDSTDKADLRLIYLALAHMIKFRGHFLIEGDLNPDNSDVDKLFIQLVQTYNQLFEENPINASGVDAKAILSARLSKSRRLENLIAQLPGEKKNGLFGNLIALSLGLTPNFKSNFDLAEDAKLQLSKDTYDDDLDNLLAQIGDQYADLFLAAKNLSDAILLSDILRVNTEITKAPLSASMIKRYDEHHQDLTLLKALVRQQLPEKYKEIFFDQSKNGYAGYIDGGASQEEFYKFIKPILEKMDGTEELLVKLNREDLLRKQRTFDNGSIPHQIHLGELHAILRRQEDFYPFLKDNREKIEKILTFRIPYYVGPLARGNSRFAWMTRKSEETITPWNFEEVVDKGASAQSFIERMTNFDKNLPNEKVLPKHSLLYEYFTVYNELTKVKYVTEGMRKPAFLSGEQKKAIVDLLFKTNRKVTVKQLKEDYFKKIECFDSVEISGVEDRFNASLGTYHDLLKIIKDKDFLDNEENEDILEDIVLTLTLFEDREMIEERLKTYAHLFDDKVMKQLKRRRYTGWGRLSRKLINGIRDKQSGKTILDFLKSDGFANRNFMQLIHDDSLTFKEDIQKAQVSGQGDSLHEHIANLAGSPAIKKGILQTVKVVDELVKVMGRHKPENIVIEMARENQTTQKGQKNSRERMKRIEEGIKELGSQILKEHPVENTQLQNEKLYLYYLQNGRDMYVDQELDINRLSDYDVDHIVPQSFLKDDSIDNKVLTRSDKARGKSDNVPSEEVVKKMKNYWRQLLNAKLITQRKFDNLTKAERGGLSELDKAGFIKRQLVETRQITKHVAQILDSRMNTKYDENDKLIREVKVITLKSKLVSDFRKDFQFYKVREINNYHHAHDAYLNAVVGTALIKKYPKLESEFVYGDYKVYDVRKMIAKSEQEIGKATAKYFFYSNIMNFFKTEITLANGEIRKRPLIETNGETGEIVWDKGRDFATVRKVLSMPQVNIVKKTEVQTGGFSKESILPKRNSDKLIARKKDWDPKKYGGFDSPTVAYSVLVVAKVEKGKSKKLKSVKELLGITIMERSSFEKNPIDFLEAKGYKEVKKDLIIKLPKYSLFELENGRKRMLASAGELQKGNELALPSKYVNFLYLASHYEKLKGSPEDNEQKQLFVEQHKHYLDEIIEQISEFSKRVILADANLDKVLSAYNKHRDKPIREQAENIIHLFTLTNLGAPAAFKYFDTTIDRKRYTSTKEVLDATLIHQSITGLYETRIDLSQLGGDGGGSSGGSGGGGGTLNIEDEYRLHETSKEPDVPLGSTWLSDFPQAWAETGGMGLAVRQAPLIIPLKATSTPVSIKQYPMSQEARLGIKPHIQRLLDQGILVPCQSPWNTPLLPVKKPGTNDYRPVQDLREVNKRVEDIHPTVPNPYNLLSGLPPSHQWYTVLDLKDAFFCLRLHPTSQPLFAFEWRDPEMGISGQLTWTRLPQGFKNSPTLFDEALHRDLADFRIQHPDLILLQYVDDLLLAATSEQDCQRGTRALLQTLGNLGYRASAKKAQICQKQVKYLGYLLKEGQRWLTEARKETVMGQPTPKTPRQLREFLGTAGFCRLWIPGFAEMAAPLYPLTKTGTLFNWGPDQQKAYQEIKQALLTAPALGLPDLTKPFELFVDEKQGYAKGVLTQKLGPWRRPVAYLSKKLDPVAAGWPPCLRMVAAIAVLTKDAGKLTMGQPLVILAPHAVEALVKQPPDRWLSNARMTHYQAMLLDTDRVQFGPVVALNPATLLPLPEKEAPHDCLEILAETHGTRPDLTDQPIPDADYTWYTDGSSFLQEGQRRAGAAVTTETEVIWARALPAGTSAQRAELIALTQALKMAEGKKLNVYTDSRYAFATAHVHGEIYRRRGLLTSEGREIKNKNEILALLKALFLPKRLSIIHCPGHQKGNSAEARGNRMADQAAREAAMKAVLETSTLLAGKRTADGSEFEKRTADGSEFESPKKKAKVE

SEQ ID NO: 958 - protein, 2103 aa, synthetic construct
MPAAKRVKLDGGDKKYSIGLDIGTNSVGWAVITDEYKVPSKKFKVLGNTDRHSIKKNLIGALLFDSGETAEATRLKRTARRRYTRRKNRICYLQEIFSNEMAKVDDSFFHRLEESFLVEEDKKHERHPIFGNIVDEVAYHEKYPTIYHLRKKLVDSTDKADLRLIYLALAHMIKFRGHFLIEGDLNPDNSDVDKLFIQLVQTYNQLFEENPINASGVDAKAILSARLSKSRRLENLIAQLPGEKKNGLFGNLIALSLGLTPNFKSNFDLAEDAKLQLSKDTYDDDLDNLLAQIGDQYADLFLAAKNLSDAILLSDILRVNTEITKAPLSASMIKRYDEHHQDLTLLKALVRQQLPEKYKEIFFDQSKNGYAGYIDGGASQEEFYKFIKPILEKMDGTEELLVKLNREDLLRKQRTFDNGSIPHQIHLGELHAILRRQEDFYPFLKDNREKIEKILTFRIPYYVGPLARGNSRFAWMTRKSEETITPWNFEEVVDKGASAQSFIERMTNFDKNLPNEKVLPKHSLLYEYFTVYNELTKVKYVTEGMRKPAFLSGEQKKAIVDLLFKTNRKVTVKQLKEDYFKKIECFDSVEISGVEDRFNASLGTYHDLLKIIKDKDFLDNEENEDILEDIVLTLTLFEDREMIEERLKTYAHLFDDKVMKQLKRRRYTGWGRLSRKLINGIRDKQSGKTILDFLKSDGFANRNFMQLIHDDSLTFKEDIQKAQVSGQGDSLHEHIANLAGSPAIKKGILQTVKVVDELVKVMGRHKPENIVIEMARENQTTQKGQKNSRERMKRIEEGIKELGSQILKEHPVENTQLQNEKLYLYYLQNGRDMYVDQELDINRLSDYDVDHIVPQSFLKDDSIDNKVLTRSDKARGKSDNVPSEEVVKKMKNYWRQLLNAKLITQRKFDNLTKAERGGLSELDKAGFIKRQLVETRQITKHVAQILDSRMNTKYDENDKLIREVKVITLKSKLVSDFRKDFQFYKVREINNYHHAHDAYLNAVVGTALIKKYPKLESEFVYGDYKVYDVRKMIAKSEQEIGKATAKYFFYSNIMNFFKTEITLANGEIRKRPLIETNGETGEIVWDKGRDFATVRKVLSMPQVNIVKKTEVQTGGFSKESILPKRNSDKLIARKKDWDPKKYGGFDSPTVAYSVLVVAKVEKGKSKKLKSVKELLGITIMERSSFEKNPIDFLEAKGYKEVKKDLIIKLPKYSLFELENGRKRMLASAGELQKGNELALPSKYVNFLYLASHYEKLKGSPEDNEQKQLFVEQHKHYLDEIIEQISEFSKRVILADANLDKVLSAYNKHRDKPIREQAENIIHLFTLTNLGAPAAFKYFDTTIDRKRYTSTKEVLDATLIHQSITGLYETRIDLSQLGGDGGGGSGGSGGSGGSGGSGGSGGTLNIEDEYRLHETSKEPDVPLGSTWLSDFPQAWAETGGMGLAVRQAPLIIPLKATSTPVSIKQYPMSQEARLGIKPHIQRLLDQGILVPCQSPWNTPLLPVKKPGTNDYRPVQDLREVNKRVEDIHPTVPNPYNLLSGLPPSHQWYTVLDLKDAFFCLRLHPTSQPLFAFEWRDPEMGISGQLTWTRLPQGFKNSPTLFNEALHRDLADFRIQHPDLILLQYVDDLLLAATSEQDCQRGTRALLQTLGNLGYRASAKKAQICQKQVKYLGYLLKEGQRWLTEARKETVMGQPTPKTPRQLREFLGTAGFCRLWIPGFAEMAAPLYPLTKPGTLFNWGPDQQKAYQEIKQALLTAPALGLPDLTKPFELFVDEKQGYAKGVLTQKLGPWRRPVAYLSKKLDPVAAGWPPCLRMVAAIAVLTKDAGKLTMGQPLVILAPHAVEALVKQPPDRWLSNARMTHYQAMLLDTDRVQFGPVVALNPATLLPLPEKEAPHDCLEILAETHGTRPDLTDQPIPDADYTWYTDGSSFLQEGQRRAGAAVTTETEVIWARALPAGTSAQRAELIALTQALKMAEGKKLNVYTDSRYAFATAHVHGEIYRRRGWLTSEGREIKNKNEILALLKALFLPKRLSIIHCPGHQKGNSAEARGNRMADQAAREAAMKAVLETSTLLAGKRTADGSEFEKRTADGSEFESPKKKAKVE

SEQ ID NO: 959 - protein, 2094 aa, synthetic construct
MPAAKRVKLDGGDKKYSIGLDIGTNSVGWAVITDEYKVPSKKFKVLGNTDRHSIKKNLIGALLFDSGETAEATRLKRTARRRYTRRKNRICYLQEIFSNEMAKVDDSFFHRLEESFLVEEDKKHERHPIFGNIVDEVAYHEKYPTIYHLRKKLVDSTDKADLRLIYLALAHMIKFRGHFLIEGDLNPDNSDVDKLFIQLVQTYNQLFEENPINASGVDAKAILSARLSKSRRLENLIAQLPGEKKNGLFGNLIALSLGLTPNFKSNFDLAEDAKLQLSKDTYDDDLDNLLAQIGDQYADLFLAAKNLSDAILLSDILRVNTEITKAPLSASMIKRYDEHHQDLTLLKALVRQQLPEKYKEIFFDQSKNGYAGYIDGGASQEEFYKFIKPILEKMDGTEELLVKLNREDLLRKQRTFDNGSIPHQIHLGELHAILRRQEDFYPFLKDNREKIEKILTFRIPYYVGPLARGNSRFAWMTRKSEETITPWNFEEVVDKGASAQSFIERMTNFDKNLPNEKVLPKHSLLYEYFTVYNELTKVKYVTEGMRKPAFLSGEQKKAIVDLLFKTNRKVTVKQLKEDYFKKIECFDSVEISGVEDRFNASLGTYHDLLKIIKDKDFLDNEENEDILEDIVLTLTLFEDREMIEERLKTYAHLFDDKVMKQLKRRRYTGWGRLSRKLINGIRDKQSGKTILDFLKSDGFANRNFMQLIHDDSLTFKEDIQKAQVSGQGDSLHEHIANLAGSPAIKKGILQTVKVVDELVKVMGRHKPENIVIEMARENQTTQKGQKNSRERMKRIEEGIKELGSQILKEHPVENTQLQNEKLYLYYLQNGRDMYVDQELDINRLSDYDVDHIVPQSFLKDDSIDNKVLTRSDKARGKSDNVPSEEVVKKMKNYWRQLLNAKLITQRKFDNLTKAERGGLSELDKAGFIKRQLVETRQITKHVAQILDSRMNTKYDENDKLIREVKVITLKSKLVSDFRKDFQFYKVREINNYHHAHDAYLNAVVGTALIKKYPKLESEFVYGDYKVYDVRKMIAKSEQEIGKATAKYFFYSNIMNFFKTEITLANGEIRKRPLIETNGETGEIVWDKGRDFATVRKVLSMPQVNIVKKTEVQTGGFSKESILPKRNSDKLIARKKDWDPKKYGGFDSPTVAYSVLVVAKVEKGKSKKLKSVKELLGITIMERSSFEKNPIDFLEAKGYKEVKKDLIIKLPKYSLFELENGRKRMLASAGELQKGNELALPSKYVNFLYLASHYEKLKGSPEDNEQKQLFVEQHKHYLDEIIEQISEFSKRVILADANLDKVLSAYNKHRDKPIREQAENIIHLFTLTNLGAPAAFKYFDTTIDRKRYTSTKEVLDATLIHQSITGLYETRIDLSQLGGDGGGSSGSSGSSGGTLNIEDEYRLHETSKEPDVPLGSTWLSDFPQAWAETGGMGLAVRQAPLIIPLKATSTPVSIKQYPMSQEARLGIKPHIQRLLDQGILVPCQSPWNTPLLPVKKPGTNDYRPVQDLREVNKRVEDIHPTVPNPYNLLSGLPPSHQWYTVLDLKDAFFCLRLHPTSQPLFAFEWRDPEMGISGQLTWTRLPQGFKNSPTLFNEALHRDLADFRIQHPDLILLQYVDDLLLAATSEQDCQRGTRALLQTLGNLGYRASAKKAQICQKQVKYLGYLLKEGQRWLTEARKETVMGQPTPKTPRQLREFLGTAGFCRLWIPGFAEMAAPLYPLTKPGTLFNWGPDQQKAYQEIKQALLTAPALGLPDLTKPFELFVDEKQGYAKGVLTQKLGPWRRPVAYLSKKLDPVAAGWPPCLRMVAAIAVLTKDAGKLTMGQPLVILAPHAVEALVKQPPDRWLSNARMTHYQAMLLDTDRVQFGPVVALNPATLLPLPEKEAPHDCLEILAETHGTRPDLTDQPIPDADYTWYTDGSSFLQEGQRRAGAAVTTETEVIWARALPAGTSAQRAELIALTQALKMAEGKKLNVYTDSRYAFATAHVHGEIYRRRGWLTSEGREIKNKNEILALLKALFLPKRLSIIHCPGHQKGNSAEARGNRMADQAAREAAMKAVLETSTLLAGKRTADGSEFEKRTADGSEFESPKKKAKVE

SEQ ID NO: 960 - protein, 2096 aa, synthetic construct
MPAAKRVKLDGGDKKYSIGLDIGTNSVGWAVITDEYKVPSKKFKVLGNTDRHSIKKNLIGALLFDSGETAEATRLKRTARRRYTRRKNRICYLQEIFSNEMAKVDDSFFHRLEESFLVEEDKKHERHPIFGNIVDEVAYHEKYPTIYHLRKKLVDSTDKADLRLIYLALAHMIKFRGHFLIEGDLNPDNSDVDKLFIQLVQTYNQLFEENPINASGVDAKAILSARLSKSRRLENLIAQLPGEKKNGLFGNLIALSLGLTPNFKSNFDLAEDAKLQLSKDTYDDDLDNLLAQIGDQYADLFLAAKNLSDAILLSDILRVNTEITKAPLSASMIKRYDEHHQDLTLLKALVRQQLPEKYKEIFFDQSKNGYAGYIDGGASQEEFYKFIKPILEKMDGTEELLVKLNREDLLRKQRTFDNGSIPHQIHLGELHAILRRQEDFYPFLKDNREKIEKILTFRIPYYVGPLARGNSRFAWMTRKSEETITPWNFEEVVDKGASAQSFIERMTNFDKNLPNEKVLPKHSLLYEYFTVYNELTKVKYVTEGMRKPAFLSGEQKKAIVDLLFKTNRKVTVKQLKEDYFKKIECFDSVEISGVEDRFNASLGTYHDLLKIIKDKDFLDNEENEDILEDIVLTLTLFEDREMIEERLKTYAHLFDDKVMKQLKRRRYTGWGRLSRKLINGIRDKQSGKTILDFLKSDGFANRNFMQLIHDDSLTFKEDIQKAQVSGQGDSLHEHIANLAGSPAIKKGILQTVKVVDELVKVMGRHKPENIVIEMARENQTTQKGQKNSRERMKRIEEGIKELGSQILKEHPVENTQLQNEKLYLYYLQNGRDMYVDQELDINRLSDYDVDHIVPQSFLKDDSIDNKVLTRSDKARGKSDNVPSEEVVKKMKNYWRQLLNAKLITQRKFDNLTKAERGGLSELDKAGFIKRQLVETRQITKHVAQILDSRMNTKYDENDKLIREVKVITLKSKLVSDFRKDFQFYKVREINNYHHAHDAYLNAVVGTALIKKYPKLESEFVYGDYKVYDVRKMIAKSEQEIGKATAKYFFYSNIMNFFKTEITLANGEIRKRPLIETNGETGEIVWDKGRDFATVRKVLSMPQVNIVKKTEVQTGGFSKESILPKRNSDKLIARKKDWDPKKYGGFDSPTVAYSVLVVAKVEKGKSKKLKSVKELLGITIMERSSFEKNPIDFLEAKGYKEVKKDLIIKLPKYSLFELENGRKRMLASAGELQKGNELALPSKYVNFLYLASHYEKLKGSPEDNEQKQLFVEQHKHYLDEIIEQISEFSKRVILADANLDKVLSAYNKHRDKPIREQAENIIHLFTLTNLGAPAAFKYFDTTIDRKRYTSTKEVLDATLIHQSITGLYETRIDLSQLGGDGGEAAAKGSSPAPGGTLNIEDEYRLHETSKEPDVPLGSTWLSDFPQAWAETGGMGLAVRQAPLIIPLKATSTPVSIKQYPMSQEARLGIKPHIQRLLDQGILVPCQSPWNTPLLPVKKPGTNDYRPVQDLREVNKRVEDIHPTVPNPYNLLSGLPPSHQWYTVLDLKDAFFCLRLHPTSQPLFAFEWRDPEMGISGQLTWTRLPQGFKNSPTLFNEALHRDLADFRIQHPDLILLQYVDDLLLAATSEQDCQRGTRALLQTLGNLGYRASAKKAQICQKQVKYLGYLLKEGQRWLTEARKETVMGQPTPKTPRQLREFLGTAGFCRLWIPGFAEMAAPLYPLTKPGTLFNWGPDQQKAYQEIKQALLTAPALGLPDLTKPFELFVDEKQGYAKGVLTQKLGPWRRPVAYLSKKLDPVAAGWPPCLRMVAAIAVLTKDAGKLTMGQPLVILAPHAVEALVKQPPDRWLSNARMTHYQAMLLDTDRVQFGPVVALNPATLLPLPEKEAPHDCLEILAETHGTRPDLTDQPIPDADYTWYTDGSSFLQEGQRRAGAAVTTETEVIWARALPAGTSAQRAELIALTQALKMAEGKKLNVYTDSRYAFATAHVHGEIYRRRGWLTSEGREIKNKNEILALLKALFLPKRLSIIHCPGHQKGNSAEARGNRMADQAAREAAMKAVLETSTLLAGKRTADGSEFEKRTADGSEFESPKKKAKVE

SEQ ID NO: 961 - protein, 2096 aa, synthetic construct
MPAAKRVKLDGGDKKYSIGLDIGTNSVGWAVITDEYKVPSKKFKVLGNTDRHSIKKNLIGALLFDSGETAEATRLKRTARRRYTRRKNRICYLQEIFSNEMAKVDDSFFHRLEESFLVEEDKKHERHPIFGNIVDEVAYHEKYPTIYHLRKKLVDSTDKADLRLIYLALAHMIKFRGHFLIEGDLNPDNSDVDKLFIQLVQTYNQLFEENPINASGVDAKAILSARLSKSRRLENLIAQLPGEKKNGLFGNLIALSLGLTPNFKSNFDLAEDAKLQLSKDTYDDDLDNLLAQIGDQYADLFLAAKNLSDAILLSDILRVNTEITKAPLSASMIKRYDEHHQDLTLLKALVRQQLPEKYKEIFFDQSKNGYAGYIDGGASQEEFYKFIKPILEKMDGTEELLVKLNREDLLRKQRTFDNGSIPHQIHLGELHAILRRQEDFYPFLKDNREKIEKILTFRIPYYVGPLARGNSRFAWMTRKSEETITPWNFEEVVDKGASAQSFIERMTNFDKNLPNEKVLPKHSLLYEYFTVYNELTKVKYVTEGMRKPAFLSGEQKKAIVDLLFKTNRKVTVKQLKEDYFKKIECFDSVEISGVEDRFNASLGTYHDLLKIIKDKDFLDNEENEDILEDIVLTLTLFEDREMIEERLKTYAHLFDDKVMKQLKRRRYTGWGRLSRKLINGIRDKQSGKTILDFLKSDGFANRNFMQLIHDDSLTFKEDIQKAQVSGQGDSLHEHIANLAGSPAIKKGILQTVKVVDELVKVMGRHKPENIVIEMARENQTTQKGQKNSRERMKRIEEGIKELGSQILKEHPVENTQLQNEKLYLYYLQNGRDMYVDQELDINRLSDYDVDHIVPQSFLKDDSIDNKVLTRSDKARGKSDNVPSEEVVKKMKNYWRQLLNAKLITQRKFDNLTKAERGGLSELDKAGFIKRQLVETRQITKHVAQILDSRMNTKYDENDKLIREVKVITLKSKLVSDFRKDFQFYKVREINNYHHAHDAYLNAVVGTALIKKYPKLESEFVYGDYKVYDVRKMIAKSEQEIGKATAKYFFYSNIMNFFKTEITLANGEIRKRPLIETNGETGEIVWDKGRDFATVRKVLSMPQVNIVKKTEVQTGGFSKESILPKRNSDKLIARKKDWDPKKYGGFDSPTVAYSVLVVAKVEKGKSKKLKSVKELLGITIMERSSFEKNPIDFLEAKGYKEVKKDLIIKLPKYSLFELENGRKRMLASAGELQKGNELALPSKYVNFLYLASHYEKLKGSPEDNEQKQLFVEQHKHYLDEIIEQISEFSKRVILADANLDKVLSAYNKHRDKPIREQAENIIHLFTLTNLGAPAAFKYFDTTIDRKRYTSTKEVLDATLIHQSITGLYETRIDLSQLGGDGGEAAAKPAPGGSGGTLNIEDEYRLHETSKEPDVPLGSTWLSDFPQAWAETGGMGLAVRQAPLIIPLKATSTPVSIKQYPMSQEARLGIKPHIQRLLDQGILVPCQSPWNTPLLPVKKPGTNDYRPVQDLREVNKRVEDIHPTVPNPYNLLSGLPPSHQWYTVLDLKDAFFCLRLHPTSQPLFAFEWRDPEMGISGQLTWTRLPQGFKNSPTLFNEALHRDLADFRIQHPDLILLQYVDDLLLAATSEQDCQRGTRALLQTLGNLGYRASAKKAQICQKQVKYLGYLLKEGQRWLTEARKETVMGQPTPKTPRQLREFLGTAGFCRLWIPGFAEMAAPLYPLTKPGTLFNWGPDQQKAYQEIKQALLTAPALGLPDLTKPFELFVDEKQGYAKGVLTQKLGPWRRPVAYLSKKLDPVAAGWPPCLRMVAAIAVLTKDAGKLTMGQPLVILAPHAVEALVKQPPDRWLSNARMTHYQAMLLDTDRVQFGPVVALNPATLLPLPEKEAPHDCLEILAETHGTRPDLTDQPIPDADYTWYTDGSSFLQEGQRRAGAAVTTETEVIWARALPAGTSAQRAELIALTQALKMAEGKKLNVYTDSRYAFATAHVHGEIYRRRGWLTSEGREIKNKNEILALLKALFLPKRLSIIHCPGHQKGNSAEARGNRMADQAAREAAMKAVLETSTLLAGKRTADGSEFEKRTADGSEFESPKKKAKVE

SEQ ID NO: 962 - protein, 2131 aa, synthetic construct
MPAAKRVKLDGGDKKYSIGLDIGTNSVGWAVITDEYKVPSKKFKVLGNTDRHSIKKNLIGALLFDSGETAEATRLKRTARRRYTRRKNRICYLQEIFSNEMAKVDDSFFHRLEESFLVEEDKKHERHPIFGNIVDEVAYHEKYPTIYHLRKKLVDSTDKADLRLIYLALAHMIKFRGHFLIEGDLNPDNSDVDKLFIQLVQTYNQLFEENPINASGVDAKAILSARLSKSRRLENLIAQLPGEKKNGLFGNLIALSLGLTPNFKSNFDLAEDAKLQLSKDTYDDDLDNLLAQIGDQYADLFLAAKNLSDAILLSDILRVNTEITKAPLSASMIKRYDEHHQDLTLLKALVRQQLPEKYKEIFFDQSKNGYAGYIDGGASQEEFYKFIKPILEKMDGTEELLVKLNREDLLRKQRTFDNGSIPHQIHLGELHAILRRQEDFYPFLKDNREKIEKILTFRIPYYVGPLARGNSRFAWMTRKSEETITPWNFEEVVDKGASAQSFIERMTNFDKNLPNEKVLPKHSLLYEYFTVYNELTKVKYVTEGMRKPAFLSGEQKKAIVDLLFKTNRKVTVKQLKEDYFKKIECFDSVEISGVEDRFNASLGTYHDLLKIIKDKDFLDNEENEDILEDIVLTLTLFEDREMIEERLKTYAHLFDDKVMKQLKRRRYTGWGRLSRKLINGIRDKQSGKTILDFLKSDGFANRNFMQLIHDDSLTFKEDIQKAQVSGQGDSLHEHIANLAGSPAIKKGILQTVKVVDELVKVMGRHKPENIVIEMARENQTTQKGQKNSRERMKRIEEGIKELGSQILKEHPVENTQLQNEKLYLYYLQNGRDMYVDQELDINRLSDYDVDHIVPQSFLKDDSIDNKVLTRSDKARGKSDNVPSEEVVKKMKNYWRQLLNAKLITQRKFDNLTKAERGGLSELDKAGFIKRQLVETRQITKHVAQILDSRMNTKYDENDKLIREVKVITLKSKLVSDFRKDFQFYKVREINNYHHAHDAYLNAVVGTALIKKYPKLESEFVYGDYKVYDVRKMIAKSEQEIGKATAKYFFYSNIMNFFKTEITLANGEIRKRPLIETNGETGEIVWDKGRDFATVRKVLSMPQVNIVKKTEVQTGGFSKESILPKRNSDKLIARKKDWDPKKYGGFDSPTVAYSVLVVAKVEKGKSKKLKSVKELLGITIMERSSFEKNPIDFLEAKGYKEVKKDLIIKLPKYSLFELENGRKRMLASAGELQKGNELALPSKYVNFLYLASHYEKLKGSPEDNEQKQLFVEQHKHYLDEIIEQISEFSKRVILADANLDKVLSAYNKHRDKPIREQAENIIHLFTLTNLGAPAAFKYFDTTIDRKRYTSTKEVLDATLIHQSITGLYETRIDLSQLGGDGGAEAAAKEAAAKEAAAKEAAAKALEAEAAAKEAAAKEAAAKEAAAKAGGTLNIEDEYRLHETSKEPDVPLGSTWLSDFPQAWAETGGMGLAVRQAPLIIPLKATSTPVSIKQYPMSQEARLGIKPHIQRLLDQGILVPCQSPWNTPLLPVKKPGTNDYRPVQDLREVNKRVEDIHPTVPNPYNLLSGLPPSHQWYTVLDLKDAFFCLRLHPTSQPLFAFEWRDPEMGISGQLTWTRLPQGFKNSPTLFNEALHRDLADFRIQHPDLILLQYVDDLLLAATSEQDCQRGTRALLQTLGNLGYRASAKKAQICQKQVKYLGYLLKEGQRWLTEARKETVMGQPTPKTPRQLREFLGTAGFCRLWIPGFAEMAAPLYPLTKPGTLFNWGPDQQKAYQEIKQALLTAPALGLPDLTKPFELFVDEKQGYAKGVLTQKLGPWRRPVAYLSKKLDPVAAGWPPCLRMVAAIAVLTKDAGKLTMGQPLVILAPHAVEALVKQPPDRWLSNARMTHYQAMLLDTDRVQFGPVVALNPATLLPLPEKEAPHDCLEILAETHGTRPDLTDQPIPDADYTWYTDGSSFLQEGQRRAGAAVTTETEVIWARALPAGTSAQRAELIALTQALKMAEGKKLNVYTDSRYAFATAHVHGEIYRRRGWLTSEGREIKNKNEILALLKALFLPKRLSIIHCPGHQKGNSAEARGNRMADQAAREAAMKAVLETSTLLAGKRTADGSEFEKRTADGSEFESPKKKAKVE

SEQ ID NO: 963 - protein, 2096 aa, synthetic construct
MPAAKRVKLDGGDKKYSIGLDIGTNSVGWAVITDEYKVPSKKFKVLGNTDRHSIKKNLIGALLFDSGETAEATRLKRTARRRYTRRKNRICYLQEIFSNEMAKVDDSFFHRLEESFLVEEDKKHERHPIFGNIVDEVAYHEKYPTIYHLRKKLVDSTDKADLRLIYLALAHMIKFRGHFLIEGDLNPDNSDVDKLFIQLVQTYNQLFEENPINASGVDAKAILSARLSKSRRLENLIAQLPGEKKNGLFGNLIALSLGLTPNFKSNFDLAEDAKLQLSKDTYDDDLDNLLAQIGDQYADLFLAAKNLSDAILLSDILRVNTEITKAPLSASMIKRYDEHHQDLTLLKALVRQQLPEKYKEIFFDQSKNGYAGYIDGGASQEEFYKFIKPILEKMDGTEELLVKLNREDLLRKQRTFDNGSIPHQIHLGELHAILRRQEDFYPFLKDNREKIEKILTFRIPYYVGPLARGNSRFAWMTRKSEETITPWNFEEVVDKGASAQSFIERMTNFDKNLPNEKVLPKHSLLYEYFTVYNELTKVKYVTEGMRKPAFLSGEQKKAIVDLLFKTNRKVTVKQLKEDYFKKIECFDSVEISGVEDRFNASLGTYHDLLKIIKDKDFLDNEENEDILEDIVLTLTLFEDREMIEERLKTYAHLFDDKVMKQLKRRRYTGWGRLSRKLINGIRDKQSGKTILDFLKSDGFANRNFMQLIHDDSLTFKEDIQKAQVSGQGDSLHEHIANLAGSPAIKKGILQTVKVVDELVKVMGRHKPENIVIEMARENQTTQKGQKNSRERMKRIEEGIKELGSQILKEHPVENTQLQNEKLYLYYLQNGRDMYVDQELDINRLSDYDVDHIVPQSFLKDDSIDNKVLTRSDKARGKSDNVPSEEVVKKMKNYWRQLLNAKLITQRKFDNLTKAERGGLSELDKAGFIKRQLVETRQITKHVAQILDSRMNTKYDENDKLIREVKVITLKSKLVSDFRKDFQFYKVREINNYHHAHDAYLNAVVGTALIKKYPKLESEFVYGDYKVYDVRKMIAKSEQEIGKATAKYFFYSNIMNFFKTEITLANGEIRKRPLIETNGETGEIVWDKGRDFATVRKVLSMPQVNIVKKTEVQTGGFSKESILPKRNSDKLIARKKDWDPKKYGGFDSPTVAYSVLVVAKVEKGKSKKLKSVKELLGITIMERSSFEKNPIDFLEAKGYKEVKKDLIIKLPKYSLFELENGRKRMLASAGELQKGNELALPSKYVNFLYLASHYEKLKGSPEDNEQKQLFVEQHKHYLDEIIEQISEFSKRVILADANLDKVLSAYNKHRDKPIREQAENIIHLFTLTNLGAPAAFKYFDTTIDRKRYTSTKEVLDATLIHQSITGLYETRIDLSQLGGDGGEAAAKGGGPAPGGTLNIEDEYRLHETSKEPDVPLGSTWLSDFPQAWAETGGMGLAVRQAPLIIPLKATSTPVSIKQYPMSQEARLGIKPHIQRLLDQGILVPCQSPWNTPLLPVKKPGTNDYRPVQDLREVNKRVEDIHPTVPNPYNLLSGLPPSHQWYTVLDLKDAFFCLRLHPTSQPLFAFEWRDPEMGISGQLTWTRLPQGFKNSPTLFNEALHRDLADFRIQHPDLILLQYVDDLLLAATSEQDCQRGTRALLQTLGNLGYRASAKKAQICQKQVKYLGYLLKEGQRWLTEARKETVMGQPTPKTPRQLREFLGTAGFCRLWIPGFAEMAAPLYPLTKPGTLFNWGPDQQKAYQEIKQALLTAPALGLPDLTKPFELFVDEKQGYAKGVLTQKLGPWRRPVAYLSKKLDPVAAGWPPCLRMVAAIAVLTKDAGKLTMGQPLVILAPHAVEALVKQPPDRWLSNARMTHYQAMLLDTDRVQFGPVVALNPATLLPLPEKEAPHDCLEILAETHGTRPDLTDQPIPDADYTWYTDGSSFLQEGQRRAGAAVTTETEVIWARALPAGTSAQRAELIALTQALKMAEGKKLNVYTDSRYAFATAHVHGEIYRRRGWLTSEGREIKNKNEILALLKALFLPKRLSIIHCPGHQKGNSAEARGNRMADQAAREAAMKAVLETSTLLAGKRTADGSEFEKRTADGSEFESPKKKAKVE

SEQ ID NO: 964 - protein, 2100 aa, synthetic construct
MPAAKRVKLDGGDKKYSIGLDIGTNSVGWAVITDEYKVPSKKFKVLGNTDRHSIKKNLIGALLFDSGETAEATRLKRTARRRYTRRKNRICYLQEIFSNEMAKVDDSFFHRLEESFLVEEDKKHERHPIFGNIVDEVAYHEKYPTIYHLRKKLVDSTDKADLRLIYLALAHMIKFRGHFLIEGDLNPDNSDVDKLFIQLVQTYNQLFEENPINASGVDAKAILSARLSKSRRLENLIAQLPGEKKNGLFGNLIALSLGLTPNFKSNFDLAEDAKLQLSKDTYDDDLDNLLAQIGDQYADLFLAAKNLSDAILLSDILRVNTEITKAPLSASMIKRYDEHHQDLTLLKALVRQQLPEKYKEIFFDQSKNGYAGYIDGGASQEEFYKFIKPILEKMDGTEELLVKLNREDLLRKQRTFDNGSIPHQIHLGELHAILRRQEDFYPFLKDNREKIEKILTFRIPYYVGPLARGNSRFAWMTRKSEETITPWNFEEVVDKGASAQSFIERMTNFDKNLPNEKVLPKHSLLYEYFTVYNELTKVKYVTEGMRKPAFLSGEQKKAIVDLLFKTNRKVTVKQLKEDYFKKIECFDSVEISGVEDRFNASLGTYHDLLKIIKDKDFLDNEENEDILEDIVLTLTLFEDREMIEERLKTYAHLFDDKVMKQLKRRRYTGWGRLSRKLINGIRDKQSGKTILDFLKSDGFANRNFMQLIHDDSLTFKEDIQKAQVSGQGDSLHEHIANLAGSPAIKKGILQTVKVVDELVKVMGRHKPENIVIEMARENQTTQKGQKNSRERMKRIEEGIKELGSQILKEHPVENTQLQNEKLYLYYLQNGRDMYVDQELDINRLSDYDVDHIVPQSFLKDDSIDNKVLTRSDKARGKSDNVPSEEVVKKMKNYWRQLLNAKLITQRKFDNLTKAERGGLSELDKAGFIKRQLVETRQITKHVAQILDSRMNTKYDENDKLIREVKVITLKSKLVSDFRKDFQFYKVREINNYHHAHDAYLNAVVGTALIKKYPKLESEFVYGDYKVYDVRKMIAKSEQEIGKATAKYFFYSNIMNFFKTEITLANGEIRKRPLIETNGETGEIVWDKGRDFATVRKVLSMPQVNIVKKTEVQTGGFSKESILPKRNSDKLIARKKDWDPKKYGGFDSPTVAYSVLVVAKVEKGKSKKLKSVKELLGITIMERSSFEKNPIDFLEAKGYKEVKKDLIIKLPKYSLFELENGRKRMLASAGELQKGNELALPSKYVNFLYLASHYEKLKGSPEDNEQKQLFVEQHKHYLDEIIEQISEFSKRVILADANLDKVLSAYNKHRDKPIREQAENIIHLFTLTNLGAPAAFKYFDTTIDRKRYTSTKEVLDATLIHQSITGLYETRIDLSQLGGDGGGSSGSSGSSGSSGSSGGTLNIEDEYRLHETSKEPDVPLGSTWLSDFPQAWAETGGMGLAVRQAPLIIPLKATSTPVSIKQYPMSQEARLGIKPHIQRLLDQGILVPCQSPWNTPLLPVKKPGTNDYRPVQDLREVNKRVEDIHPTVPNPYNLLSGLPPSHQWYTVLDLKDAFFCLRLHPTSQPLFAFEWRDPEMGISGQLTWTRLPQGFKNSPTLFNEALHRDLADFRIQHPDLILLQYVDDLLLAATSEQDCQRGTRALLQTLGNLGYRASAKKAQICQKQVKYLGYLLKEGQRWLTEARKETVMGQPTPKTPRQLREFLGTAGFCRLWIPGFAEMAAPLYPLTKPGTLFNWGPDQQKAYQEIKQALLTAPALGLPDLTKPFELFVDEKQGYAKGVLTQKLGPWRRPVAYLSKKLDPVAAGWPPCLRMVAAIAVLTKDAGKLTMGQPLVILAPHAVEALVKQPPDRWLSNARMTHYQAMLLDTDRVQFGPVVALNPATLLPLPEKEAPHDCLEILAETHGTRPDLTDQPIPDADYTWYTDGSSFLQEGQRRAGAAVTTETEVIWARALPAGTSAQRAELIALTQALKMAEGKKLNVYTDSRYAFATAHVHGEIYRRRGWLTSEGREIKNKNEILALLKALFLPKRLSIIHCPGHQKGNSAEARGNRMADQAAREAAMKAVLETSTLLAGKRTADGSEFEKRTADGSEFESPKKKAKVE

SEQ ID NO: 965 - protein, 2105 aa, synthetic construct
MPAAKRVKLDGGDKKYSIGLDIGTNSVGWAVITDEYKVPSKKFKVLGNTDRHSIKKNLIGALLFDSGETAEATRLKRTARRRYTRRKNRICYLQEIFSNEMAKVDDSFFHRLEESFLVEEDKKHERHPIFGNIVDEVAYHEKYPTIYHLRKKLVDSTDKADLRLIYLALAHMIKFRGHFLIEGDLNPDNSDVDKLFIQLVQTYNQLFEENPINASGVDAKAILSARLSKSRRLENLIAQLPGEKKNGLFGNLIALSLGLTPNFKSNFDLAEDAKLQLSKDTYDDDLDNLLAQIGDQYADLFLAAKNLSDAILLSDILRVNTEITKAPLSASMIKRYDEHHQDLTLLKALVRQQLPEKYKEIFFDQSKNGYAGYIDGGASQEEFYKFIKPILEKMDGTEELLVKLNREDLLRKQRTFDNGSIPHQIHLGELHAILRRQEDFYPFLKDNREKIEKILTFRIPYYVGPLARGNSRFAWMTRKSEETITPWNFEEVVDKGASAQSFIERMTNFDKNLPNEKVLPKHSLLYEYFTVYNELTKVKYVTEGMRKPAFLSGEQKKAIVDLLFKTNRKVTVKQLKEDYFKKIECFDSVEISGVEDRFNASLGTYHDLLKIIKDKDFLDNEENEDILEDIVLTLTLFEDREMIEERLKTYAHLFDDKVMKQLKRRRYTGWGRLSRKLINGIRDKQSGKTILDFLKSDGFANRNFMQLIHDDSLTFKEDIQKAQVSGQGDSLHEHIANLAGSPAIKKGILQTVKVVDELVKVMGRHKPENIVIEMARENQTTQKGQKNSRERMKRIEEGIKELGSQILKEHPVENTQLQNEKLYLYYLQNGRDMYVDQELDINRLSDYDVDHIVPQSFLKDDSIDNKVLTRSDKARGKSDNVPSEEVVKKMKNYWRQLLNAKLITQRKFDNLTKAERGGLSELDKAGFIKRQLVETRQITKHVAQILDSRMNTKYDENDKLIREVKVITLKSKLVSDFRKDFQFYKVREINNYHHAHDAYLNAVVGTALIKKYPKLESEFVYGDYKVYDVRKMIAKSEQEIGKATAKYFFYSNIMNFFKTEITLANGEIRKRPLIETNGETGEIVWDKGRDFATVRKVLSMPQVNIVKKTEVQTGGFSKESILPKRNSDKLIARKKDWDPKKYGGFDSPTVAYSVLVVAKVEKGKSKKLKSVKELLGITIMERSSFEKNPIDFLEAKGYKEVKKDLIIKLPKYSLFELENGRKRMLASAGELQKGNELALPSKYVNFLYLASHYEKLKGSPEDNEQKQLFVEQHKHYLDEIIEQISEFSKRVILADANLDKVLSAYNKHRDKPIREQAENIIHLFTLTNLGAPAAFKYFDTTIDRKRYTSTKEVLDATLIHQSITGLYETRIDLSQLGGDGGEAAAKEAAAKEAAAKEAAAKGGTLNIEDEYRLHETSKEPDVPLGSTWLSDFPQAWAETGGMGLAVRQAPLIIPLKATSTPVSIKQYPMSQEARLGIKPHIQRLLDQGILVPCQSPWNTPLLPVKKPGTNDYRPVQDLREVNKRVEDIHPTVPNPYNLLSGLPPSHQWYTVLDLKDAFFCLRLHPTSQPLFAFEWRDPEMGISGQLTWTRLPQGFKNSPTLFNEALHRDLADFRIQHPDLILLQYVDDLLLAATSEQDCQRGTRALLQTLGNLGYRASAKKAQICQKQVKYLGYLLKEGQRWLTEARKETVMGQPTPKTPRQLREFLGTAGFCRLWIPGFAEMAAPLYPLTKPGTLFNWGPDQQKAYQEIKQALLTAPALGLPDLTKPFELFVDEKQGYAKGVLTQKLGPWRRPVAYLSKKLDPVAAGWPPCLRMVAAIAVLTKDAGKLTMGQPLVILAPHAVEALVKQPPDRWLSNARMTHYQAMLLDTDRVQFGPVVALNPATLLPLPEKEAPHDCLEILAETHGTRPDLTDQPIPDADYTWYTDGSSFLQEGQRRAGAAVTTETEVIWARALPAGTSAQRAELIALTQALKMAEGKKLNVYTDSRYAFATAHVHGEIYRRRGWLTSEGREIKNKNEILALLKALFLPKRLSIIHCPGHQKGNSAEARGNRMADQAAREAAMKAVLETSTLLAGKRTADGSEFEKRTADGSEFESPKKKAKVE

SEQ ID NO: 966 - protein, 2093 aa, synthetic construct
MPAAKRVKLDGGDKKYSIGLDIGTNSVGWAVITDEYKVPSKKFKVLGNTDRHSIKKNLIGALLFDSGETAEATRLKRTARRRYTRRKNRICYLQEIFSNEMAKVDDSFFHRLEESFLVEEDKKHERHPIFGNIVDEVAYHEKYPTIYHLRKKLVDSTDKADLRLIYLALAHMIKFRGHFLIEGDLNPDNSDVDKLFIQLVQTYNQLFEENPINASGVDAKAILSARLSKSRRLENLIAQLPGEKKNGLFGNLIALSLGLTPNFKSNFDLAEDAKLQLSKDTYDDDLDNLLAQIGDQYADLFLAAKNLSDAILLSDILRVNTEITKAPLSASMIKRYDEHHQDLTLLKALVRQQLPEKYKEIFFDQSKNGYAGYIDGGASQEEFYKFIKPILEKMDGTEELLVKLNREDLLRKQRTFDNGSIPHQIHLGELHAILRRQEDFYPFLKDNREKIEKILTFRIPYYVGPLARGNSRFAWMTRKSEETITPWNFEEVVDKGASAQSFIERMTNFDKNLPNEKVLPKHSLLYEYFTVYNELTKVKYVTEGMRKPAFLSGEQKKAIVDLLFKTNRKVTVKQLKEDYFKKIECFDSVEISGVEDRFNASLGTYHDLLKIIKDKDFLDNEENEDILEDIVLTLTLFEDREMIEERLKTYAHLFDDKVMKQLKRRRYTGWGRLSRKLINGIRDKQSGKTILDFLKSDGFANRNFMQLIHDDSLTFKEDIQKAQVSGQGDSLHEHIANLAGSPAIKKGILQTVKVVDELVKVMGRHKPENIVIEMARENQTTQKGQKNSRERMKRIEEGIKELGSQILKEHPVENTQLQNEKLYLYYLQNGRDMYVDQELDINRLSDYDVDHIVPQSFLKDDSIDNKVLTRSDKARGKSDNVPSEEVVKKMKNYWRQLLNAKLITQRKFDNLTKAERGGLSELDKAGFIKRQLVETRQITKHVAQILDSRMNTKYDENDKLIREVKVITLKSKLVSDFRKDFQFYKVREINNYHHAHDAYLNAVVGTALIKKYPKLESEFVYGDYKVYDVRKMIAKSEQEIGKATAKYFFYSNIMNFFKTEITLANGEIRKRPLIETNGETGEIVWDKGRDFATVRKVLSMPQVNIVKKTEVQTGGFSKESILPKRNSDKLIARKKDWDPKKYGGFDSPTVAYSVLVVAKVEKGKSKKLKSVKELLGITIMERSSFEKNPIDFLEAKGYKEVKKDLIIKLPKYSLFELENGRKRMLASAGELQKGNELALPSKYVNFLYLASHYEKLKGSPEDNEQKQLFVEQHKHYLDEIIEQISEFSKRVILADANLDKVLSAYNKHRDKPIREQAENIIHLFTLTNLGAPAAFKYFDTTIDRKRYTSTKEVLDATLIHQSITGLYETRIDLSQLGGDGGGSSEAAAKGGTLNIEDEYRLHETSKEPDVPLGSTWLSDFPQAWAETGGMGLAVRQAPLIIPLKATSTPVSIKQYPMSQEARLGIKPHIQRLLDQGILVPCQSPWNTPLLPVKKPGTNDYRPVQDLREVNKRVEDIHPTVPNPYNLLSGLPPSHQWYTVLDLKDAFFCLRLHPTSQPLFAFEWRDPEMGISGQLTWTRLPQGFKNSPTLFNEALHRDLADFRIQHPDLILLQYVDDLLLAATSEQDCQRGTRALLQTLGNLGYRASAKKAQICQKQVKYLGYLLKEGQRWLTEARKETVMGQPTPKTPRQLREFLGTAGFCRLWIPGFAEMAAPLYPLTKPGTLFNWGPDQQKAYQEIKQALLTAPALGLPDLTKPFELFVDEKQGYAKGVLTQKLGPWRRPVAYLSKKLDPVAAGWPPCLRMVAAIAVLTKDAGKLTMGQPLVILAPHAVEALVKQPPDRWLSNARMTHYQAMLLDTDRVQFGPVVALNPATLLPLPEKEAPHDCLEILAETHGTRPDLTDQPIPDADYTWYTDGSSFLQEGQRRAGAAVTTETEVIWARALPAGTSAQRAELIALTQALKMAEGKKLNVYTDSRYAFATAHVHGEIYRRRGWLTSEGREIKNKNEILALLKALFLPKRLSIIHCPGHQKGNSAEARGNRMADQAAREAAMKAVLETSTLLAGKRTADGSEFEKRTADGSEFESPKKKAKVE

SEQ ID NO: 967 - protein, 2096 aa, synthetic construct
MPAAKRVKLDGGDKKYSIGLDIGTNSVGWAVITDEYKVPSKKFKVLGNTDRHSIKKNLIGALLFDSGETAEATRLKRTARRRYTRRKNRICYLQEIFSNEMAKVDDSFFHRLEESFLVEEDKKHERHPIFGNIVDEVAYHEKYPTIYHLRKKLVDSTDKADLRLIYLALAHMIKFRGHFLIEGDLNPDNSDVDKLFIQLVQTYNQLFEENPINASGVDAKAILSARLSKSRRLENLIAQLPGEKKNGLFGNLIALSLGLTPNFKSNFDLAEDAKLQLSKDTYDDDLDNLLAQIGDQYADLFLAAKNLSDAILLSDILRVNTEITKAPLSASMIKRYDEHHQDLTLLKALVRQQLPEKYKEIFFDQSKNGYAGYIDGGASQEEFYKFIKPILEKMDGTEELLVKLNREDLLRKQRTFDNGSIPHQIHLGELHAILRRQEDFYPFLKDNREKIEKILTFRIPYYVGPLARGNSRFAWMTRKSEETITPWNFEEVVDKGASAQSFIERMTNFDKNLPNEKVLPKHSLLYEYFTVYNELTKVKYVTEGMRKPAFLSGEQKKAIVDLLFKTNRKVTVKQLKEDYFKKIECFDSVEISGVEDRFNASLGTYHDLLKIIKDKDFLDNEENEDILEDIVLTLTLFEDREMIEERLKTYAHLFDDKVMKQLKRRRYTGWGRLSRKLINGIRDKQSGKTILDFLKSDGFANRNFMQLIHDDSLTFKEDIQKAQVSGQGDSLHEHIANLAGSPAIKKGILQTVKVVDELVKVMGRHKPENIVIEMARENQTTQKGQKNSRERMKRIEEGIKELGSQILKEHPVENTQLQNEKLYLYYLQNGRDMYVDQELDINRLSDYDVDHIVPQSFLKDDSIDNKVLTRSDKARGKSDNVPSEEVVKKMKNYWRQLLNAKLITQRKFDNLTKAERGGLSELDKAGFIKRQLVETRQITKHVAQILDSRMNTKYDENDKLIREVKVITLKSKLVSDFRKDFQFYKVREINNYHHAHDAYLNAVVGTALIKKYPKLESEFVYGDYKVYDVRKMIAKSEQEIGKATAKYFFYSNIMNFFKTEITLANGEIRKRPLIETNGETGEIVWDKGRDFATVRKVLSMPQVNIVKKTEVQTGGFSKESILPKRNSDKLIARKKDWDPKKYGGFDSPTVAYSVLVVAKVEKGKSKKLKSVKELLGITIMERSSFEKNPIDFLEAKGYKEVKKDLIIKLPKYSLFELENGRKRMLASAGELQKGNELALPSKYVNFLYLASHYEKLKGSPEDNEQKQLFVEQHKHYLDEIIEQISEFSKRVILADANLDKVLSAYNKHRDKPIREQAENIIHLFTLTNLGAPAAFKYFDTTIDRKRYTSTKEVLDATLIHQSITGLYETRIDLSQLGGDGGPAPGSSEAAAKGGTLNIEDEYRLHETSKEPDVPLGSTWLSDFPQAWAETGGMGLAVRQAPLIIPLKATSTPVSIKQYPMSQEARLGIKPHIQRLLDQGILVPCQSPWNTPLLPVKKPGTNDYRPVQDLREVNKRVEDIHPTVPNPYNLLSGLPPSHQWYTVLDLKDAFFCLRLHPTSQPLFAFEWRDPEMGISGQLTWTRLPQGFKNSPTLFNEALHRDLADFRIQHPDLILLQYVDDLLLAATSEQDCQRGTRALLQTLGNLGYRASAKKAQICQKQVKYLGYLLKEGQRWLTEARKETVMGQPTPKTPRQLREFLGTAGFCRLWIPGFAEMAAPLYPLTKPGTLFNWGPDQQKAYQEIKQALLTAPALGLPDLTKPFELFVDEKQGYAKGVLTQKLGPWRRPVAYLSKKLDPVAAGWPPCLRMVAAIAVLTKDAGKLTMGQPLVILAPHAVEALVKQPPDRWLSNARMTHYQAMLLDTDRVQFGPVVALNPATLLPLPEKEAPHDCLEILAETHGTRPDLTDQPIPDADYTWYTDGSSFLQEGQRRAGAAVTTETEVIWARALPAGTSAQRAELIALTQALKMAEGKKLNVYTDSRYAFATAHVHGEIYRRRGWLTSEGREIKNKNEILALLKALFLPKRLSIIHCPGHQKGNSAEARGNRMADQAAREAAMKAVLETSTLLAGKRTADGSEFEKRTADGSEFESPKKKAKVE

SEQ ID NO: 968 - protein, 2096 aa, synthetic construct
MPAAKRVKLDGGDKKYSIGLDIGTNSVGWAVITDEYKVPSKKFKVLGNTDRHSIKKNLIGALLFDSGETAEATRLKRTARRRYTRRKNRICYLQEIFSNEMAKVDDSFFHRLEESFLVEEDKKHERHPIFGNIVDEVAYHEKYPTIYHLRKKLVDSTDKADLRLIYLALAHMIKFRGHFLIEGDLNPDNSDVDKLFIQLVQTYNQLFEENPINASGVDAKAILSARLSKSRRLENLIAQLPGEKKNGLFGNLIALSLGLTPNFKSNFDLAEDAKLQLSKDTYDDDLDNLLAQIGDQYADLFLAAKNLSDAILLSDILRVNTEITKAPLSASMIKRYDEHHQDLTLLKALVRQQLPEKYKEIFFDQSKNGYAGYIDGGASQEEFYKFIKPILEKMDGTEELLVKLNREDLLRKQRTFDNGSIPHQIHLGELHAILRRQEDFYPFLKDNREKIEKILTFRIPYYVGPLARGNSRFAWMTRKSEETITPWNFEEVVDKGASAQSFIERMTNFDKNLPNEKVLPKHSLLYEYFTVYNELTKVKYVTEGMRKPAFLSGEQKKAIVDLLFKTNRKVTVKQLKEDYFKKIECFDSVEISGVEDRFNASLGTYHDLLKIIKDKDFLDNEENEDILEDIVLTLTLFEDREMIEERLKTYAHLFDDKVMKQLKRRRYTGWGRLSRKLINGIRDKQSGKTILDFLKSDGFANRNFMQLIHDDSLTFKEDIQKAQVSGQGDSLHEHIANLAGSPAIKKGILQTVKVVDELVKVMGRHKPENIVIEMARENQTTQKGQKNSRERMKRIEEGIKELGSQILKEHPVENTQLQNEKLYLYYLQNGRDMYVDQELDINRLSDYDVDHIVPQSFLKDDSIDNKVLTRSDKARGKSDNVPSEEVVKKMKNYWRQLLNAKLITQRKFDNLTKAERGGLSELDKAGFIKRQLVETRQITKHVAQILDSRMNTKYDENDKLIREVKVITLKSKLVSDFRKDFQFYKVREINNYHHAHDAYLNAVVGTALIKKYPKLESEFVYGDYKVYDVRKMIAKSEQEIGKATAKYFFYSNIMNFFKTEITLANGEIRKRPLIETNGETGEIVWDKGRDFATVRKVLSMPQVNIVKKTEVQTGGFSKESILPKRNSDKLIARKKDWDPKKYGGFDSPTVAYSVLVVAKVEKGKSKKLKSVKELLGITIMERSSFEKNPIDFLEAKGYKEVKKDLIIKLPKYSLFELENGRKRMLASAGELQKGNELALPSKYVNFLYLASHYEKLKGSPEDNEQKQLFVEQHKHYLDEIIEQISEFSKRVILADANLDKVLSAYNKHRDKPIREQAENIIHLFTLTNLGAPAAFKYFDTTIDRKRYTSTKEVLDATLIHQSITGLYETRIDLSQLGGDGGGGSPAPEAAAKGGTLNIEDEYRLHETSKEPDVPLGSTWLSDFPQAWAETGGMGLAVRQAPLIIPLKATSTPVSIKQYPMSQEARLGIKPHIQRLLDQGILVPCQSPWNTPLLPVKKPGTNDYRPVQDLREVNKRVEDIHPTVPNPYNLLSGLPPSHQWYTVLDLKDAFFCLRLHPTSQPLFAFEWRDPEMGISGQLTWTRLPQGFKNSPTLFNEALHRDLADFRIQHPDLILLQYVDDLLLAATSEQDCQRGTRALLQTLGNLGYRASAKKAQICQKQVKYLGYLLKEGQRWLTEARKETVMGQPTPKTPRQLREFLGTAGFCRLWIPGFAEMAAPLYPLTKPGTLFNWGPDQQKAYQEIKQALLTAPALGLPDLTKPFELFVDEKQGYAKGVLTQKLGPWRRPVAYLSKKLDPVAAGWPPCLRMVAAIAVLTKDAGKLTMGQPLVILAPHAVEALVKQPPDRWLSNARMTHYQAMLLDTDRVQFGPVVALNPATLLPLPEKEAPHDCLEILAETHGTRPDLTDQPIPDADYTWYTDGSSFLQEGQRRAGAAVTTETEVIWARALPAGTSAQRAELIALTQALKMAEGKKLNVYTDSRYAFATAHVHGEIYRRRGWLTSEGREIKNKNEILALLKALFLPKRLSIIHCPGHQKGNSAEARGNRMADQAAREAAMKAVLETSTLLAGKRTADGSEFEKRTADGSEFESPKKKAKVE

SEQ ID NO: 969 - protein, 2094 aa, synthetic construct
MPAAKRVKLDGGDKKYSIGLDIGTNSVGWAVITDEYKVPSKKFKVLGNTDRHSIKKNLIGALLFDSGETAEATRLKRTARRRYTRRKNRICYLQEIFSNEMAKVDDSFFHRLEESFLVEEDKKHERHPIFGNIVDEVAYHEKYPTIYHLRKKLVDSTDKADLRLIYLALAHMIKFRGHFLIEGDLNPDNSDVDKLFIQLVQTYNQLFEENPINASGVDAKAILSARLSKSRRLENLIAQLPGEKKNGLFGNLIALSLGLTPNFKSNFDLAEDAKLQLSKDTYDDDLDNLLAQIGDQYADLFLAAKNLSDAILLSDILRVNTEITKAPLSASMIKRYDEHHQDLTLLKALVRQQLPEKYKEIFFDQSKNGYAGYIDGGASQEEFYKFIKPILEKMDGTEELLVKLNREDLLRKQRTFDNGSIPHQIHLGELHAILRRQEDFYPFLKDNREKIEKILTFRIPYYVGPLARGNSRFAWMTRKSEETITPWNFEEVVDKGASAQSFIERMTNFDKNLPNEKVLPKHSLLYEYFTVYNELTKVKYVTEGMRKPAFLSGEQKKAIVDLLFKTNRKVTVKQLKEDYFKKIECFDSVEISGVEDRFNASLGTYHDLLKIIKDKDFLDNEENEDILEDIVLTLTLFEDREMIEERLKTYAHLFDDKVMKQLKRRRYTGWGRLSRKLINGIRDKQSGKTILDFLKSDGFANRNFMQLIHDDSLTFKEDIQKAQVSGQGDSLHEHIANLAGSPAIKKGILQTVKVVDELVKVMGRHKPENIVIEMARENQTTQKGQKNSRERMKRIEEGIKELGSQILKEHPVENTQLQNEKLYLYYLQNGRDMYVDQELDINRLSDYDVDHIVPQSFLKDDSIDNKVLTRSDKARGKSDNVPSEEVVKKMKNYWRQLLNAKLITQRKFDNLTKAERGGLSELDKAGFIKRQLVETRQITKHVAQILDSRMNTKYDENDKLIREVKVITLKSKLVSDFRKDFQFYKVREINNYHHAHDAYLNAVVGTALIKKYPKLESEFVYGDYKVYDVRKMIAKSEQEIGKATAKYFFYSNIMNFFKTEITLANGEIRKRPLIETNGETGEIVWDKGRDFATVRKVLSMPQVNIVKKTEVQTGGFSKESILPKRNSDKLIARKKDWDPKKYGGFDSPTVAYSVLVVAKVEKGKSKKLKSVKELLGITIMERSSFEKNPIDFLEAKGYKEVKKDLIIKLPKYSLFELENGRKRMLASAGELQKGNELALPSKYVNFLYLASHYEKLKGSPEDNEQKQLFVEQHKHYLDEIIEQISEFSKRVILADANLDKVLSAYNKHRDKPIREQAENIIHLFTLTNLGAPAAFKYFDTTIDRKRYTSTKEVLDATLIHQSITGLYETRIDLSQLGGDGGGGGGSSPAPGGTLNIEDEYRLHETSKEPDVPLGSTWLSDFPQAWAETGGMGLAVRQAPLIIPLKATSTPVSIKQYPMSQEARLGIKPHIQRLLDQGILVPCQSPWNTPLLPVKKPGTNDYRPVQDLREVNKRVEDIHPTVPNPYNLLSGLPPSHQWYTVLDLKDAFFCLRLHPTSQPLFAFEWRDPEMGISGQLTWTRLPQGFKNSPTLFNEALHRDLADFRIQHPDLILLQYVDDLLLAATSEQDCQRGTRALLQTLGNLGYRASAKKAQICQKQVKYLGYLLKEGQRWLTEARKETVMGQPTPKTPRQLREFLGTAGFCRLWIPGFAEMAAPLYPLTKPGTLFNWGPDQQKAYQEIKQALLTAPALGLPDLTKPFELFVDEKQGYAKGVLTQKLGPWRRPVAYLSKKLDPVAAGWPPCLRMVAAIAVLTKDAGKLTMGQPLVILAPHAVEALVKQPPDRWLSNARMTHYQAMLLDTDRVQFGPVVALNPATLLPLPEKEAPHDCLEILAETHGTRPDLTDQPIPDADYTWYTDGSSFLQEGQRRAGAAVTTETEVIWARALPAGTSAQRAELIALTQALKMAEGKKLNVYTDSRYAFATAHVHGEIYRRRGWLTSEGREIKNKNEILALLKALFLPKRLSIIHCPGHQKGNSAEARGNRMADQAAREAAMKAVLETSTLLAGKRTADGSEFEKRTADGSEFESPKKKAKVE

SEQ ID NO: 970 - protein, 2094 aa, synthetic construct
MPAAKRVKLDGGDKKYSIGLDIGTNSVGWAVITDEYKVPSKKFKVLGNTDRHSIKKNLIGALLFDSGETAEATRLKRTARRRYTRRKNRICYLQEIFSNEMAKVDDSFFHRLEESFLVEEDKKHERHPIFGNIVDEVAYHEKYPTIYHLRKKLVDSTDKADLRLIYLALAHMIKFRGHFLIEGDLNPDNSDVDKLFIQLVQTYNQLFEENPINASGVDAKAILSARLSKSRRLENLIAQLPGEKKNGLFGNLIALSLGLTPNFKSNFDLAEDAKLQLSKDTYDDDLDNLLAQIGDQYADLFLAAKNLSDAILLSDILRVNTEITKAPLSASMIKRYDEHHQDLTLLKALVRQQLPEKYKEIFFDQSKNGYAGYIDGGASQEEFYKFIKPILEKMDGTEELLVKLNREDLLRKQRTFDNGSIPHQIHLGELHAILRRQEDFYPFLKDNREKIEKILTFRIPYYVGPLARGNSRFAWMTRKSEETITPWNFEEVVDKGASAQSFIERMTNFDKNLPNEKVLPKHSLLYEYFTVYNELTKVKYVTEGMRKPAFLSGEQKKAIVDLLFKTNRKVTVKQLKEDYFKKIECFDSVEISGVEDRFNASLGTYHDLLKIIKDKDFLDNEENEDILEDIVLTLTLFEDREMIEERLKTYAHLFDDKVMKQLKRRRYTGWGRLSRKLINGIRDKQSGKTILDFLKSDGFANRNFMQLIHDDSLTFKEDIQKAQVSGQGDSLHEHIANLAGSPAIKKGILQTVKVVDELVKVMGRHKPENIVIEMARENQTTQKGQKNSRERMKRIEEGIKELGSQILKEHPVENTQLQNEKLYLYYLQNGRDMYVDQELDINRLSDYDVDHIVPQSFLKDDSIDNKVLTRSDKARGKSDNVPSEEVVKKMKNYWRQLLNAKLITQRKFDNLTKAERGGLSELDKAGFIKRQLVETRQITKHVAQILDSRMNTKYDENDKLIREVKVITLKSKLVSDFRKDFQFYKVREINNYHHAHDAYLNAVVGTALIKKYPKLESEFVYGDYKVYDVRKMIAKSEQEIGKATAKYFFYSNIMNFFKTEITLANGEIRKRPLIETNGETGEIVWDKGRDFATVRKVLSMPQVNIVKKTEVQTGGFSKESILPKRNSDKLIARKKDWDPKKYGGFDSPTVAYSVLVVAKVEKGKSKKLKSVKELLGITIMERSSFEKNPIDFLEAKGYKEVKKDLIIKLPKYSLFELENGRKRMLASAGELQKGNELALPSKYVNFLYLASHYEKLKGSPEDNEQKQLFVEQHKHYLDEIIEQISEFSKRVILADANLDKVLSAYNKHRDKPIREQAENIIHLFTLTNLGAPAAFKYFDTTIDRKRYTSTKEVLDATLIHQSITGLYETRIDLSQLGGDGGPAPGSSGGSGGTLNIEDEYRLHETSKEPDVPLGSTWLSDFPQAWAETGGMGLAVRQAPLIIPLKATSTPVSIKQYPMSQEARLGIKPHIQRLLDQGILVPCQSPWNTPLLPVKKPGTNDYRPVQDLREVNKRVEDIHPTVPNPYNLLSGLPPSHQWYTVLDLKDAFFCLRLHPTSQPLFAFEWRDPEMGISGQLTWTRLPQGFKNSPTLFNEALHRDLADFRIQHPDLILLQYVDDLLLAATSEQDCQRGTRALLQTLGNLGYRASAKKAQICQKQVKYLGYLLKEGQRWLTEARKETVMGQPTPKTPRQLREFLGTAGFCRLWIPGFAEMAAPLYPLTKPGTLFNWGPDQQKAYQEIKQALLTAPALGLPDLTKPFELFVDEKQGYAKGVLTQKLGPWRRPVAYLSKKLDPVAAGWPPCLRMVAAIAVLTKDAGKLTMGQPLVILAPHAVEALVKQPPDRWLSNARMTHYQAMLLDTDRVQFGPVVALNPATLLPLPEKEAPHDCLEILAETHGTRPDLTDQPIPDADYTWYTDGSSFLQEGQRRAGAAVTTETEVIWARALPAGTSAQRAELIALTQALKMAEGKKLNVYTDSRYAFATAHVHGEIYRRRGWLTSEGREIKNKNEILALLKALFLPKRLSIIHCPGHQKGNSAEARGNRMADQAAREAAMKAVLETSTLLAGKRTADGSEFEKRTADGSEFESPKKKAKVE

SEQ ID NO: 971 - protein, 2096 aa, synthetic construct
MPAAKRVKLDGGDKKYSIGLDIGTNSVGWAVITDEYKVPSKKFKVLGNTDRHSIKKNLIGALLFDSGETAEATRLKRTARRRYTRRKNRICYLQEIFSNEMAKVDDSFFHRLEESFLVEEDKKHERHPIFGNIVDEVAYHEKYPTIYHLRKKLVDSTDKADLRLIYLALAHMIKFRGHFLIEGDLNPDNSDVDKLFIQLVQTYNQLFEENPINASGVDAKAILSARLSKSRRLENLIAQLPGEKKNGLFGNLIALSLGLTPNFKSNFDLAEDAKLQLSKDTYDDDLDNLLAQIGDQYADLFLAAKNLSDAILLSDILRVNTEITKAPLSASMIKRYDEHHQDLTLLKALVRQQLPEKYKEIFFDQSKNGYAGYIDGGASQEEFYKFIKPILEKMDGTEELLVKLNREDLLRKQRTFDNGSIPHQIHLGELHAILRRQEDFYPFLKDNREKIEKILTFRIPYYVGPLARGNSRFAWMTRKSEETITPWNFEEVVDKGASAQSFIERMTNFDKNLPNEKVLPKHSLLYEYFTVYNELTKVKYVTEGMRKPAFLSGEQKKAIVDLLFKTNRKVTVKQLKEDYFKKIECFDSVEISGVEDRFNASLGTYHDLLKIIKDKDFLDNEENEDILEDIVLTLTLFEDREMIEERLKTYAHLFDDKVMKQLKRRRYTGWGRLSRKLINGIRDKQSGKTILDFLKSDGFANRNFMQLIHDDSLTFKEDIQKAQVSGQGDSLHEHIANLAGSPAIKKGILQTVKVVDELVKVMGRHKPENIVIEMARENQTTQKGQKNSRERMKRIEEGIKELGSQILKEHPVENTQLQNEKLYLYYLQNGRDMYVDQELDINRLSDYDVDHIVPQSFLKDDSIDNKVLTRSDKARGKSDNVPSEEVVKKMKNYWRQLLNAKLITQRKFDNLTKAERGGLSELDKAGFIKRQLVETRQITKHVAQILDSRMNTKYDENDKLIREVKVITLKSKLVSDFRKDFQFYKVREINNYHHAHDAYLNAVVGTALIKKYPKLESEFVYGDYKVYDVRKMIAKSEQEIGKATAKYFFYSNIMNFFKTEITLANGEIRKRPLIETNGETGEIVWDKGRDFATVRKVLSMPQVNIVKKTEVQTGGFSKESILPKRNSDKLIARKKDWDPKKYGGFDSPTVAYSVLVVAKVEKGKSKKLKSVKELLGITIMERSSFEKNPIDFLEAKGYKEVKKDLIIKLPKYSLFELENGRKRMLASAGELQKGNELALPSKYVNFLYLASHYEKLKGSPEDNEQKQLFVEQHKHYLDEIIEQISEFSKRVILADANLDKVLSAYNKHRDKPIREQAENIIHLFTLTNLGAPAAFKYFDTTIDRKRYTSTKEVLDATLIHQSITGLYETRIDLSQLGGDGGGSSGGGEAAAKGGTLNIEDEYRLHETSKEPDVPLGSTWLSDFPQAWAETGGMGLAVRQAPLIIPLKATSTPVSIKQYPMSQEARLGIKPHIQRLLDQGILVPCQSPWNTPLLPVKKPGTNDYRPVQDLREVNKRVEDIHPTVPNPYNLLSGLPPSHQWYTVLDLKDAFFCLRLHPTSQPLFAFEWRDPEMGISGQLTWTRLPQGFKNSPTLFNEALHRDLADFRIQHPDLILLQYVDDLLLAATSEQDCQRGTRALLQTLGNLGYRASAKKAQICQKQVKYLGYLLKEGQRWLTEARKETVMGQPTPKTPRQLREFLGTAGFCRLWIPGFAEMAAPLYPLTKPGTLFNWGPDQQKAYQEIKQALLTAPALGLPDLTKPFELFVDEKQGYAKGVLTQKLGPWRRPVAYLSKKLDPVAAGWPPCLRMVAAIAVLTKDAGKLTMGQPLVILAPHAVEALVKQPPDRWLSNARMTHYQAMLLDTDRVQFGPVVALNPATLLPLPEKEAPHDCLEILAETHGTRPDLTDQPIPDADYTWYTDGSSFLQEGQRRAGAAVTTETEVIWARALPAGTSAQRAELIALTQALKMAEGKKLNVYTDSRYAFATAHVHGEIYRRRGWLTSEGREIKNKNEILALLKALFLPKRLSIIHCPGHQKGNSAEARGNRMADQAAREAAMKAVLETSTLLAGKRTADGSEFEKRTADGSEFESPKKKAKVE

SEQ ID NO: 972 - protein, 2100 aa, synthetic construct
MPAAKRVKLDGGDKKYSIGLDIGTNSVGWAVITDEYKVPSKKFKVLGNTDRHSIKKNLIGALLFDSGETAEATRLKRTARRRYTRRKNRICYLQEIFSNEMAKVDDSFFHRLEESFLVEEDKKHERHPIFGNIVDEVAYHEKYPTIYHLRKKLVDSTDKADLRLIYLALAHMIKFRGHFLIEGDLNPDNSDVDKLFIQLVQTYNQLFEENPINASGVDAKAILSARLSKSRRLENLIAQLPGEKKNGLFGNLIALSLGLTPNFKSNFDLAEDAKLQLSKDTYDDDLDNLLAQIGDQYADLFLAAKNLSDAILLSDILRVNTEITKAPLSASMIKRYDEHHQDLTLLKALVRQQLPEKYKEIFFDQSKNGYAGYIDGGASQEEFYKFIKPILEKMDGTEELLVKLNREDLLRKQRTFDNGSIPHQIHLGELHAILRRQEDFYPFLKDNREKIEKILTFRIPYYVGPLARGNSRFAWMTRKSEETITPWNFEEVVDKGASAQSFIERMTNFDKNLPNEKVLPKHSLLYEYFTVYNELTKVKYVTEGMRKPAFLSGEQKKAIVDLLFKTNRKVTVKQLKEDYFKKIECFDSVEISGVEDRFNASLGTYHDLLKIIKDKDFLDNEENEDILEDIVLTLTLFEDREMIEERLKTYAHLFDDKVMKQLKRRRYTGWGRLSRKLINGIRDKQSGKTILDFLKSDGFANRNFMQLIHDDSLTFKEDIQKAQVSGQGDSLHEHIANLAGSPAIKKGILQTVKVVDELVKVMGRHKPENIVIEMARENQTTQKGQKNSRERMKRIEEGIKELGSQILKEHPVENTQLQNEKLYLYYLQNGRDMYVDQELDINRLSDYDVDHIVPQSFLKDDSIDNKVLTRSDKARGKSDNVPSEEVVKKMKNYWRQLLNAKLITQRKFDNLTKAERGGLSELDKAGFIKRQLVETRQITKHVAQILDSRMNTKYDENDKLIREVKVITLKSKLVSDFRKDFQFYKVREINNYHHAHDAYLNAVVGTALIKKYPKLESEFVYGDYKVYDVRKMIAKSEQEIGKATAKYFFYSNIMNFFKTEITLANGEIRKRPLIETNGETGEIVWDKGRDFATVRKVLSMPQVNIVKKTEVQTGGFSKESILPKRNSDKLIARKKDWDPKKYGGFDSPTVAYSVLVVAKVEKGKSKKLKSVKELLGITIMERSSFEKNPIDFLEAKGYKEVKKDLIIKLPKYSLFELENGRKRMLASAGELQKGNELALPSKYVNFLYLASHYEKLKGSPEDNEQKQLFVEQHKHYLDEIIEQISEFSKRVILADANLDKVLSAYNKHRDKPIREQAENIIHLFTLTNLGAPAAFKYFDTTIDRKRYTSTKEVLDATLIHQSITGLYETRIDLSQLGGDGGGGGGSEAAAKGGGGSGGTLNIEDEYRLHETSKEPDVPLGSTWLSDFPQAWAETGGMGLAVRQAPLIIPLKATSTPVSIKQYPMSQEARLGIKPHIQRLLDQGILVPCQSPWNTPLLPVKKPGTNDYRPVQDLREVNKRVEDIHPTVPNPYNLLSGLPPSHQWYTVLDLKDAFFCLRLHPTSQPLFAFEWRDPEMGISGQLTWTRLPQGFKNSPTLFNEALHRDLADFRIQHPDLILLQYVDDLLLAATSEQDCQRGTRALLQTLGNLGYRASAKKAQICQKQVKYLGYLLKEGQRWLTEARKETVMGQPTPKTPRQLREFLGTAGFCRLWIPGFAEMAAPLYPLTKPGTLFNWGPDQQKAYQEIKQALLTAPALGLPDLTKPFELFVDEKQGYAKGVLTQKLGPWRRPVAYLSKKLDPVAAGWPPCLRMVAAIAVLTKDAGKLTMGQPLVILAPHAVEALVKQPPDRWLSNARMTHYQAMLLDTDRVQFGPVVALNPATLLPLPEKEAPHDCLEILAETHGTRPDLTDQPIPDADYTWYTDGSSFLQEGQRRAGAAVTTETEVIWARALPAGTSAQRAELIALTQALKMAEGKKLNVYTDSRYAFATAHVHGEIYRRRGWLTSEGREIKNKNEILALLKALFLPKRLSIIHCPGHQKGNSAEARGNRMADQAAREAAMKAVLETSTLLAGKRTADGSEFEKRTADGSEFESPKKKAKVE

SEQ ID NO: 973 - protein, 2096 aa, synthetic construct
MPAAKRVKLDGGDKKYSIGLDIGTNSVGWAVITDEYKVPSKKFKVLGNTDRHSIKKNLIGALLFDSGETAEATRLKRTARRRYTRRKNRICYLQEIFSNEMAKVDDSFFHRLEESFLVEEDKKHERHPIFGNIVDEVAYHEKYPTIYHLRKKLVDSTDKADLRLIYLALAHMIKFRGHFLIEGDLNPDNSDVDKLFIQLVQTYNQLFEENPINASGVDAKAILSARLSKSRRLENLIAQLPGEKKNGLFGNLIALSLGLTPNFKSNFDLAEDAKLQLSKDTYDDDLDNLLAQIGDQYADLFLAAKNLSDAILLSDILRVNTEITKAPLSASMIKRYDEHHQDLTLLKALVRQQLPEKYKEIFFDQSKNGYAGYIDGGASQEEFYKFIKPILEKMDGTEELLVKLNREDLLRKQRTFDNGSIPHQIHLGELHAILRRQEDFYPFLKDNREKIEKILTFRIPYYVGPLARGNSRFAWMTRKSEETITPWNFEEVVDKGASAQSFIERMTNFDKNLPNEKVLPKHSLLYEYFTVYNELTKVKYVTEGMRKPAFLSGEQKKAIVDLLFKTNRKVTVKQLKEDYFKKIECFDSVEISGVEDRFNASLGTYHDLLKIIKDKDFLDNEENEDILEDIVLTLTLFEDREMIEERLKTYAHLFDDKVMKQLKRRRYTGWGRLSRKLINGIRDKQSGKTILDFLKSDGFANRNFMQLIHDDSLTFKEDIQKAQVSGQGDSLHEHIANLAGSPAIKKGILQTVKVVDELVKVMGRHKPENIVIEMARENQTTQKGQKNSRERMKRIEEGIKELGSQILKEHPVENTQLQNEKLYLYYLQNGRDMYVDQELDINRLSDYDVDHIVPQSFLKDDSIDNKVLTRSDKARGKSDNVPSEEVVKKMKNYWRQLLNAKLITQRKFDNLTKAERGGLSELDKAGFIKRQLVETRQITKHVAQILDSRMNTKYDENDKLIREVKVITLKSKLVSDFRKDFQFYKVREINNYHHAHDAYLNAVVGTALIKKYPKLESEFVYGDYKVYDVRKMIAKSEQEIGKATAKYFFYSNIMNFFKTEITLANGEIRKRPLIETNGETGEIVWDKGRDFATVRKVLSMPQVNIVKKTEVQTGGFSKESILPKRNSDKLIARKKDWDPKKYGGFDSPTVAYSVLVVAKVEKGKSKKLKSVKELLGITIMERSSFEKNPIDFLEAKGYKEVKKDLIIKLPKYSLFELENGRKRMLASAGELQKGNELALPSKYVNFLYLASHYEKLKGSPEDNEQKQLFVEQHKHYLDEIIEQISEFSKRVILADANLDKVLSAYNKHRDKPIREQAENIIHLFTLTNLGAPAAFKYFDTTIDRKRYTSTKEVLDATLIHQSITGLYETRIDLSQLGGDGGGGGGGSEAAAKGGTLNIEDEYRLHETSKEPDVPLGSTWLSDFPQAWAETGGMGLAVRQAPLIIPLKATSTPVSIKQYPMSQEARLGIKPHIQRLLDQGILVPCQSPWNTPLLPVKKPGTNDYRPVQDLREVNKRVEDIHPTVPNPYNLLSGLPPSHQWYTVLDLKDAFFCLRLHPTSQPLFAFEWRDPEMGISGQLTWTRLPQGFKNSPTLFNEALHRDLADFRIQHPDLILLQYVDDLLLAATSEQDCQRGTRALLQTLGNLGYRASAKKAQICQKQVKYLGYLLKEGQRWLTEARKETVMGQPTPKTPRQLREFLGTAGFCRLWIPGFAEMAAPLYPLTKPGTLFNWGPDQQKAYQEIKQALLTAPALGLPDLTKPFELFVDEKQGYAKGVLTQKLGPWRRPVAYLSKKLDPVAAGWPPCLRMVAAIAVLTKDAGKLTMGQPLVILAPHAVEALVKQPPDRWLSNARMTHYQAMLLDTDRVQFGPVVALNPATLLPLPEKEAPHDCLEILAETHGTRPDLTDQPIPDADYTWYTDGSSFLQEGQRRAGAAVTTETEVIWARALPAGTSAQRAELIALTQALKMAEGKKLNVYTDSRYAFATAHVHGEIYRRRGWLTSEGREIKNKNEILALLKALFLPKRLSIIHCPGHQKGNSAEARGNRMADQAAREAAMKAVLETSTLLAGKRTADGSEFEKRTADGSEFESPKKKAKVE

SEQ ID NO: 974 - protein, 2091 aa, synthetic construct
MPAAKRVKLDGGDKKYSIGLDIGTNSVGWAVITDEYKVPSKKFKVLGNTDRHSIKKNLIGALLFDSGETAEATRLKRTARRRYTRRKNRICYLQEIFSNEMAKVDDSFFHRLEESFLVEEDKKHERHPIFGNIVDEVAYHEKYPTIYHLRKKLVDSTDKADLRLIYLALAHMIKFRGHFLIEGDLNPDNSDVDKLFIQLVQTYNQLFEENPINASGVDAKAILSARLSKSRRLENLIAQLPGEKKNGLFGNLIALSLGLTPNFKSNFDLAEDAKLQLSKDTYDDDLDNLLAQIGDQYADLFLAAKNLSDAILLSDILRVNTEITKAPLSASMIKRYDEHHQDLTLLKALVRQQLPEKYKEIFFDQSKNGYAGYIDGGASQEEFYKFIKPILEKMDGTEELLVKLNREDLLRKQRTFDNGSIPHQIHLGELHAILRRQEDFYPFLKDNREKIEKILTFRIPYYVGPLARGNSRFAWMTRKSEETITPWNFEEVVDKGASAQSFIERMTNFDKNLPNEKVLPKHSLLYEYFTVYNELTKVKYVTEGMRKPAFLSGEQKKAIVDLLFKTNRKVTVKQLKEDYFKKIECFDSVEISGVEDRFNASLGTYHDLLKIIKDKDFLDNEENEDILEDIVLTLTLFEDREMIEERLKTYAHLFDDKVMKQLKRRRYTGWGRLSRKLINGIRDKQSGKTILDFLKSDGFANRNFMQLIHDDSLTFKEDIQKAQVSGQGDSLHEHIANLAGSPAIKKGILQTVKVVDELVKVMGRHKPENIVIEMARENQTTQKGQKNSRERMKRIEEGIKELGSQILKEHPVENTQLQNEKLYLYYLQNGRDMYVDQELDINRLSDYDVDHIVPQSFLKDDSIDNKVLTRSDKARGKSDNVPSEEVVKKMKNYWRQLLNAKLITQRKFDNLTKAERGGLSELDKAGFIKRQLVETRQITKHVAQILDSRMNTKYDENDKLIREVKVITLKSKLVSDFRKDFQFYKVREINNYHHAHDAYLNAVVGTALIKKYPKLESEFVYGDYKVYDVRKMIAKSEQEIGKATAKYFFYSNIMNFFKTEITLANGEIRKRPLIETNGETGEIVWDKGRDFATVRKVLSMPQVNIVKKTEVQTGGFSKESILPKRNSDKLIARKKDWDPKKYGGFDSPTVAYSVLVVAKVEKGKSKKLKSVKELLGITIMERSSFEKNPIDFLEAKGYKEVKKDLIIKLPKYSLFELENGRKRMLASAGELQKGNELALPSKYVNFLYLASHYEKLKGSPEDNEQKQLFVEQHKHYLDEIIEQISEFSKRVILADANLDKVLSAYNKHRDKPIREQAENIIHLFTLTNLGAPAAFKYFDTTIDRKRYTSTKEVLDATLIHQSITGLYETRIDLSQLGGDGGGGGGGSGGTLNIEDEYRLHETSKEPDVPLGSTWLSDFPQAWAETGGMGLAVRQAPLIIPLKATSTPVSIKQYPMSQEARLGIKPHIQRLLDQGILVPCQSPWNTPLLPVKKPGTNDYRPVQDLREVNKRVEDIHPTVPNPYNLLSGLPPSHQWYTVLDLKDAFFCLRLHPTSQPLFAFEWRDPEMGISGQLTWTRLPQGFKNSPTLFNEALHRDLADFRIQHPDLILLQYVDDLLLAATSEQDCQRGTRALLQTLGNLGYRASAKKAQICQKQVKYLGYLLKEGQRWLTEARKETVMGQPTPKTPRQLREFLGTAGFCRLWIPGFAEMAAPLYPLTKPGTLFNWGPDQQKAYQEIKQALLTAPALGLPDLTKPFELFVDEKQGYAKGVLTQKLGPWRRPVAYLSKKLDPVAAGWPPCLRMVAAIAVLTKDAGKLTMGQPLVILAPHAVEALVKQPPDRWLSNARMTHYQAMLLDTDRVQFGPVVALNPATLLPLPEKEAPHDCLEILAETHGTRPDLTDQPIPDADYTWYTDGSSFLQEGQRRAGAAVTTETEVIWARALPAGTSAQRAELIALTQALKMAEGKKLNVYTDSRYAFATAHVHGEIYRRRGWLTSEGREIKNKNEILALLKALFLPKRLSIIHCPGHQKGNSAEARGNRMADQAAREAAMKAVLETSTLLAGKRTADGSEFEKRTADGSEFESPKKKAKVE

SEQ ID NO: 975 - protein, 2096 aa, synthetic construct
MPAAKRVKLDGGDKKYSIGLDIGTNSVGWAVITDEYKVPSKKFKVLGNTDRHSIKKNLIGALLFDSGETAEATRLKRTARRRYTRRKNRICYLQEIFSNEMAKVDDSFFHRLEESFLVEEDKKHERHPIFGNIVDEVAYHEKYPTIYHLRKKLVDSTDKADLRLIYLALAHMIKFRGHFLIEGDLNPDNSDVDKLFIQLVQTYNQLFEENPINASGVDAKAILSARLSKSRRLENLIAQLPGEKKNGLFGNLIALSLGLTPNFKSNFDLAEDAKLQLSKDTYDDDLDNLLAQIGDQYADLFLAAKNLSDAILLSDILRVNTEITKAPLSASMIKRYDEHHQDLTLLKALVRQQLPEKYKEIFFDQSKNGYAGYIDGGASQEEFYKFIKPILEKMDGTEELLVKLNREDLLRKQRTFDNGSIPHQIHLGELHAILRRQEDFYPFLKDNREKIEKILTFRIPYYVGPLARGNSRFAWMTRKSEETITPWNFEEVVDKGASAQSFIERMTNFDKNLPNEKVLPKHSLLYEYFTVYNELTKVKYVTEGMRKPAFLSGEQKKAIVDLLFKTNRKVTVKQLKEDYFKKIECFDSVEISGVEDRFNASLGTYHDLLKIIKDKDFLDNEENEDILEDIVLTLTLFEDREMIEERLKTYAHLFDDKVMKQLKRRRYTGWGRLSRKLINGIRDKQSGKTILDFLKSDGFANRNFMQLIHDDSLTFKEDIQKAQVSGQGDSLHEHIANLAGSPAIKKGILQTVKVVDELVKVMGRHKPENIVIEMARENQTTQKGQKNSRERMKRIEEGIKELGSQILKEHPVENTQLQNEKLYLYYLQNGRDMYVDQELDINRLSDYDVDHIVPQSFLKDDSIDNKVLTRSDKARGKSDNVPSEEVVKKMKNYWRQLLNAKLITQRKFDNLTKAERGGLSELDKAGFIKRQLVETRQITKHVAQILDSRMNTKYDENDKLIREVKVITLKSKLVSDFRKDFQFYKVREINNYHHAHDAYLNAVVGTALIKKYPKLESEFVYGDYKVYDVRKMIAKSEQEIGKATAKYFFYSNIMNFFKTEITLANGEIRKRPLIETNGETGEIVWDKGRDFATVRKVLSMPQVNIVKKTEVQTGGFSKESILPKRNSDKLIARKKDWDPKKYGGFDSPTVAYSVLVVAKVEKGKSKKLKSVKELLGITIMERSSFEKNPIDFLEAKGYKEVKKDLIIKLPKYSLFELENGRKRMLASAGELQKGNELALPSKYVNFLYLASHYEKLKGSPEDNEQKQLFVEQHKHYLDEIIEQISEFSKRVILADANLDKVLSAYNKHRDKPIREQAENIIHLFTLTNLGAPAAFKYFDTTIDRKRYTSTKEVLDATLIHQSITGLYETRIDLSQLGGDGGGSSGGSEAAAKGGTLNIEDEYRLHETSKEPDVPLGSTWLSDFPQAWAETGGMGLAVRQAPLIIPLKATSTPVSIKQYPMSQEARLGIKPHIQRLLDQGILVPCQSPWNTPLLPVKKPGTNDYRPVQDLREVNKRVEDIHPTVPNPYNLLSGLPPSHQWYTVLDLKDAFFCLRLHPTSQPLFAFEWRDPEMGISGQLTWTRLPQGFKNSPTLFNEALHRDLADFRIQHPDLILLQYVDDLLLAATSEQDCQRGTRALLQTLGNLGYRASAKKAQICQKQVKYLGYLLKEGQRWLTEARKETVMGQPTPKTPRQLREFLGTAGFCRLWIPGFAEMAAPLYPLTKPGTLFNWGPDQQKAYQEIKQALLTAPALGLPDLTKPFELFVDEKQGYAKGVLTQKLGPWRRPVAYLSKKLDPVAAGWPPCLRMVAAIAVLTKDAGKLTMGQPLVILAPHAVEALVKQPPDRWLSNARMTHYQAMLLDTDRVQFGPVVALNPATLLPLPEKEAPHDCLEILAETHGTRPDLTDQPIPDADYTWYTDGSSFLQEGQRRAGAAVTTETEVIWARALPAGTSAQRAELIALTQALKMAEGKKLNVYTDSRYAFATAHVHGEIYRRRGWLTSEGREIKNKNEILALLKALFLPKRLSIIHCPGHQKGNSAEARGNRMADQAAREAAMKAVLETSTLLAGKRTADGSEFEKRTADGSEFESPKKKAKVE

SEQ ID NO: 976 - protein, 2115 aa, synthetic construct
MPAAKRVKLDGGDKKYSIGLDIGTNSVGWAVITDEYKVPSKKFKVLGNTDRHSIKKNLIGALLFDSGETAEATRLKRTARRRYTRRKNRICYLQEIFSNEMAKVDDSFFHRLEESFLVEEDKKHERHPIFGNIVDEVAYHEKYPTIYHLRKKLVDSTDKADLRLIYLALAHMIKFRGHFLIEGDLNPDNSDVDKLFIQLVQTYNQLFEENPINASGVDAKAILSARLSKSRRLENLIAQLPGEKKNGLFGNLIALSLGLTPNFKSNFDLAEDAKLQLSKDTYDDDLDNLLAQIGDQYADLFLAAKNLSDAILLSDILRVNTEITKAPLSASMIKRYDEHHQDLTLLKALVRQQLPEKYKEIFFDQSKNGYAGYIDGGASQEEFYKFIKPILEKMDGTEELLVKLNREDLLRKQRTFDNGSIPHQIHLGELHAILRRQEDFYPFLKDNREKIEKILTFRIPYYVGPLARGNSRFAWMTRKSEETITPWNFEEVVDKGASAQSFIERMTNFDKNLPNEKVLPKHSLLYEYFTVYNELTKVKYVTEGMRKPAFLSGEQKKAIVDLLFKTNRKVTVKQLKEDYFKKIECFDSVEISGVEDRFNASLGTYHDLLKIIKDKDFLDNEENEDILEDIVLTLTLFEDREMIEERLKTYAHLFDDKVMKQLKRRRYTGWGRLSRKLINGIRDKQSGKTILDFLKSDGFANRNFMQLIHDDSLTFKEDIQKAQVSGQGDSLHEHIANLAGSPAIKKGILQTVKVVDELVKVMGRHKPENIVIEMARENQTTQKGQKNSRERMKRIEEGIKELGSQILKEHPVENTQLQNEKLYLYYLQNGRDMYVDQELDINRLSDYDVDHIVPQSFLKDDSIDNKVLTRSDKARGKSDNVPSEEVVKKMKNYWRQLLNAKLITQRKFDNLTKAERGGLSELDKAGFIKRQLVETRQITKHVAQILDSRMNTKYDENDKLIREVKVITLKSKLVSDFRKDFQFYKVREINNYHHAHDAYLNAVVGTALIKKYPKLESEFVYGDYKVYDVRKMIAKSEQEIGKATAKYFFYSNIMNFFKTEITLANGEIRKRPLIETNGETGEIVWDKGRDFATVRKVLSMPQVNIVKKTEVQTGGFSKESILPKRNSDKLIARKKDWDPKKYGGFDSPTVAYSVLVVAKVEKGKSKKLKSVKELLGITIMERSSFEKNPIDFLEAKGYKEVKKDLIIKLPKYSLFELENGRKRMLASAGELQKGNELALPSKYVNFLYLASHYEKLKGSPEDNEQKQLFVEQHKHYLDEIIEQISEFSKRVILADANLDKVLSAYNKHRDKPIREQAENIIHLFTLTNLGAPAAFKYFDTTIDRKRYTSTKEVLDATLIHQSITGLYETRIDLSQLGGDGGGGGGSGGGGSGGGGSGGGGSGGGGSGGGGSGGTLNIEDEYRLHETSKEPDVPLGSTWLSDFPQAWAETGGMGLAVRQAPLIIPLKATSTPVSIKQYPMSQEARLGIKPHIQRLLDQGILVPCQSPWNTPLLPVKKPGTNDYRPVQDLREVNKRVEDIHPTVPNPYNLLSGLPPSHQWYTVLDLKDAFFCLRLHPTSQPLFAFEWRDPEMGISGQLTWTRLPQGFKNSPTLFNEALHRDLADFRIQHPDLILLQYVDDLLLAATSEQDCQRGTRALLQTLGNLGYRASAKKAQICQKQVKYLGYLLKEGQRWLTEARKETVMGQPTPKTPRQLREFLGTAGFCRLWIPGFAEMAAPLYPLTKPGTLFNWGPDQQKAYQEIKQALLTAPALGLPDLTKPFELFVDEKQGYAKGVLTQKLGPWRRPVAYLSKKLDPVAAGWPPCLRMVAAIAVLTKDAGKLTMGQPLVILAPHAVEALVKQPPDRWLSNARMTHYQAMLLDTDRVQFGPVVALNPATLLPLPEKEAPHDCLEILAETHGTRPDLTDQPIPDADYTWYTDGSSFLQEGQRRAGAAVTTETEVIWARALPAGTSAQRAELIALTQALKMAEGKKLNVYTDSRYAFATAHVHGEIYRRRGWLTSEGREIKNKNEILALLKALFLPKRLSIIHCPGHQKGNSAEARGNRMADQAAREAAMKAVLETSTLLAGKRTADGSEFEKRTADGSEFESPKKKAKVE

SEQ ID NO: 977 - protein, 2105 aa, synthetic construct
MPAAKRVKLDGGDKKYSIGLDIGTNSVGWAVITDEYKVPSKKFKVLGNTDRHSIKKNLIGALLFDSGETAEATRLKRTARRRYTRRKNRICYLQEIFSNEMAKVDDSFFHRLEESFLVEEDKKHERHPIFGNIVDEVAYHEKYPTIYHLRKKLVDSTDKADLRLIYLALAHMIKFRGHFLIEGDLNPDNSDVDKLFIQLVQTYNQLFEENPINASGVDAKAILSARLSKSRRLENLIAQLPGEKKNGLFGNLIALSLGLTPNFKSNFDLAEDAKLQLSKDTYDDDLDNLLAQIGDQYADLFLAAKNLSDAILLSDILRVNTEITKAPLSASMIKRYDEHHQDLTLLKALVRQQLPEKYKEIFFDQSKNGYAGYIDGGASQEEFYKFIKPILEKMDGTEELLVKLNREDLLRKQRTFDNGSIPHQIHLGELHAILRRQEDFYPFLKDNREKIEKILTFRIPYYVGPLARGNSRFAWMTRKSEETITPWNFEEVVDKGASAQSFIERMTNFDKNLPNEKVLPKHSLLYEYFTVYNELTKVKYVTEGMRKPAFLSGEQKKAIVDLLFKTNRKVTVKQLKEDYFKKIECFDSVEISGVEDRFNASLGTYHDLLKIIKDKDFLDNEENEDILEDIVLTLTLFEDREMIEERLKTYAHLFDDKVMKQLKRRRYTGWGRLSRKLINGIRDKQSGKTILDFLKSDGFANRNFMQLIHDDSLTFKEDIQKAQVSGQGDSLHEHIANLAGSPAIKKGILQTVKVVDELVKVMGRHKPENIVIEMARENQTTQKGQKNSRERMKRIEEGIKELGSQILKEHPVENTQLQNEKLYLYYLQNGRDMYVDQELDINRLSDYDVDHIVPQSFLKDDSIDNKVLTRSDKARGKSDNVPSEEVVKKMKNYWRQLLNAKLITQRKFDNLTKAERGGLSELDKAGFIKRQLVETRQITKHVAQILDSRMNTKYDENDKLIREVKVITLKSKLVSDFRKDFQFYKVREINNYHHAHDAYLNAVVGTALIKKYPKLESEFVYGDYKVYDVRKMIAKSEQEIGKATAKYFFYSNIMNFFKTEITLANGEIRKRPLIETNGETGEIVWDKGRDFATVRKVLSMPQVNIVKKTEVQTGGFSKESILPKRNSDKLIARKKDWDPKKYGGFDSPTVAYSVLVVAKVEKGKSKKLKSVKELLGITIMERSSFEKNPIDFLEAKGYKEVKKDLIIKLPKYSLFELENGRKRMLASAGELQKGNELALPSKYVNFLYLASHYEKLKGSPEDNEQKQLFVEQHKHYLDEIIEQISEFSKRVILADANLDKVLSAYNKHRDKPIREQAENIIHLFTLTNLGAPAAFKYFDTTIDRKRYTSTKEVLDATLIHQSITGLYETRIDLSQLGGDGGGGGGSGGGGSGGGGSGGGGSGGTLNIEDEYRLHETSKEPDVPLGSTWLSDFPQAWAETGGMGLAVRQAPLIIPLKATSTPVSIKQYPMSQEARLGIKPHIQRLLDQGILVPCQSPWNTPLLPVKKPGTNDYRPVQDLREVNKRVEDIHPTVPNPYNLLSGLPPSHQWYTVLDLKDAFFCLRLHPTSQPLFAFEWRDPEMGISGQLTWTRLPQGFKNSPTLFNEALHRDLADFRIQHPDLILLQYVDDLLLAATSEQDCQRGTRALLQTLGNLGYRASAKKAQICQKQVKYLGYLLKEGQRWLTEARKETVMGQPTPKTPRQLREFLGTAGFCRLWIPGFAEMAAPLYPLTKPGTLFNWGPDQQKAYQEIKQALLTAPALGLPDLTKPFELFVDEKQGYAKGVLTQKLGPWRRPVAYLSKKLDPVAAGWPPCLRMVAAIAVLTKDAGKLTMGQPLVILAPHAVEALVKQPPDRWLSNARMTHYQAMLLDTDRVQFGPVVALNPATLLPLPEKEAPHDCLEILAETHGTRPDLTDQPIPDADYTWYTDGSSFLQEGQRRAGAAVTTETEVIWARALPAGTSAQRAELIALTQALKMAEGKKLNVYTDSRYAFATAHVHGEIYRRRGWLTSEGREIKNKNEILALLKALFLPKRLSIIHCPGHQKGNSAEARGNRMADQAAREAAMKAVLETSTLLAGKRTADGSEFEKRTADGSEFESPKKKAKVE

SEQ ID NO: 978 - protein, 2094 aa, synthetic construct
MPAAKRVKLDGGDKKYSIGLDIGTNSVGWAVITDEYKVPSKKFKVLGNTDRHSIKKNLIGALLFDSGETAEATRLKRTARRRYTRRKNRICYLQEIFSNEMAKVDDSFFHRLEESFLVEEDKKHERHPIFGNIVDEVAYHEKYPTIYHLRKKLVDSTDKADLRLIYLALAHMIKFRGHFLIEGDLNPDNSDVDKLFIQLVQTYNQLFEENPINASGVDAKAILSARLSKSRRLENLIAQLPGEKKNGLFGNLIALSLGLTPNFKSNFDLAEDAKLQLSKDTYDDDLDNLLAQIGDQYADLFLAAKNLSDAILLSDILRVNTEITKAPLSASMIKRYDEHHQDLTLLKALVRQQLPEKYKEIFFDQSKNGYAGYIDGGASQEEFYKFIKPILEKMDGTEELLVKLNREDLLRKQRTFDNGSIPHQIHLGELHAILRRQEDFYPFLKDNREKIEKILTFRIPYYVGPLARGNSRFAWMTRKSEETITPWNFEEVVDKGASAQSFIERMTNFDKNLPNEKVLPKHSLLYEYFTVYNELTKVKYVTEGMRKPAFLSGEQKKAIVDLLFKTNRKVTVKQLKEDYFKKIECFDSVEISGVEDRFNASLGTYHDLLKIIKDKDFLDNEENEDILEDIVLTLTLFEDREMIEERLKTYAHLFDDKVMKQLKRRRYTGWGRLSRKLINGIRDKQSGKTILDFLKSDGFANRNFMQLIHDDSLTFKEDIQKAQVSGQGDSLHEHIANLAGSPAIKKGILQTVKVVDELVKVMGRHKPENIVIEMARENQTTQKGQKNSRERMKRIEEGIKELGSQILKEHPVENTQLQNEKLYLYYLQNGRDMYVDQELDINRLSDYDVDHIVPQSFLKDDSIDNKVLTRSDKARGKSDNVPSEEVVKKMKNYWRQLLNAKLITQRKFDNLTKAERGGLSELDKAGFIKRQLVETRQITKHVAQILDSRMNTKYDENDKLIREVKVITLKSKLVSDFRKDFQFYKVREINNYHHAHDAYLNAVVGTALIKKYPKLESEFVYGDYKVYDVRKMIAKSEQEIGKATAKYFFYSNIMNFFKTEITLANGEIRKRPLIETNGETGEIVWDKGRDFATVRKVLSMPQVNIVKKTEVQTGGFSKESILPKRNSDKLIARKKDWDPKKYGGFDSPTVAYSVLVVAKVEKGKSKKLKSVKELLGITIMERSSFEKNPIDFLEAKGYKEVKKDLIIKLPKYSLFELENGRKRMLASAGELQKGNELALPSKYVNFLYLASHYEKLKGSPEDNEQKQLFVEQHKHYLDEIIEQISEFSKRVILADANLDKVLSAYNKHRDKPIREQAENIIHLFTLTNLGAPAAFKYFDTTIDRKRYTSTKEVLDATLIHQSITGLYETRIDLSQLGGDGGPAPAPAPAPGGTLNIEDEYRLHETSKEPDVPLGSTWLSDFPQAWAETGGMGLAVRQAPLIIPLKATSTPVSIKQYPMSQEARLGIKPHIQRLLDQGILVPCQSPWNTPLLPVKKPGTNDYRPVQDLREVNKRVEDIHPTVPNPYNLLSGLPPSHQWYTVLDLKDAFFCLRLHPTSQPLFAFEWRDPEMGISGQLTWTRLPQGFKNSPTLFNEALHRDLADFRIQHPDLILLQYVDDLLLAATSEQDCQRGTRALLQTLGNLGYRASAKKAQICQKQVKYLGYLLKEGQRWLTEARKETVMGQPTPKTPRQLREFLGTAGFCRLWIPGFAEMAAPLYPLTKPGTLFNWGPDQQKAYQEIKQALLTAPALGLPDLTKPFELFVDEKQGYAKGVLTQKLGPWRRPVAYLSKKLDPVAAGWPPCLRMVAAIAVLTKDAGKLTMGQPLVILAPHAVEALVKQPPDRWLSNARMTHYQAMLLDTDRVQFGPVVALNPATLLPLPEKEAPHDCLEILAETHGTRPDLTDQPIPDADYTWYTDGSSFLQEGQRRAGAAVTTETEVIWARALPAGTSAQRAELIALTQALKMAEGKKLNVYTDSRYAFATAHVHGEIYRRRGWLTSEGREIKNKNEILALLKALFLPKRLSIIHCPGHQKGNSAEARGNRMADQAAREAAMKAVLETSTLLAGKRTADGSEFEKRTADGSEFESPKKKAKVE

SEQ ID NO: 979 - protein, 2096 aa, synthetic construct
MPAAKRVKLDGGDKKYSIGLDIGTNSVGWAVITDEYKVPSKKFKVLGNTDRHSIKKNLIGALLFDSGETAEATRLKRTARRRYTRRKNRICYLQEIFSNEMAKVDDSFFHRLEESFLVEEDKKHERHPIFGNIVDEVAYHEKYPTIYHLRKKLVDSTDKADLRLIYLALAHMIKFRGHFLIEGDLNPDNSDVDKLFIQLVQTYNQLFEENPINASGVDAKAILSARLSKSRRLENLIAQLPGEKKNGLFGNLIALSLGLTPNFKSNFDLAEDAKLQLSKDTYDDDLDNLLAQIGDQYADLFLAAKNLSDAILLSDILRVNTEITKAPLSASMIKRYDEHHQDLTLLKALVRQQLPEKYKEIFFDQSKNGYAGYIDGGASQEEFYKFIKPILEKMDGTEELLVKLNREDLLRKQRTFDNGSIPHQIHLGELHAILRRQEDFYPFLKDNREKIEKILTFRIPYYVGPLARGNSRFAWMTRKSEETITPWNFEEVVDKGASAQSFIERMTNFDKNLPNEKVLPKHSLLYEYFTVYNELTKVKYVTEGMRKPAFLSGEQKKAIVDLLFKTNRKVTVKQLKEDYFKKIECFDSVEISGVEDRFNASLGTYHDLLKIIKDKDFLDNEENEDILEDIVLTLTLFEDREMIEERLKTYAHLFDDKVMKQLKRRRYTGWGRLSRKLINGIRDKQSGKTILDFLKSDGFANRNFMQLIHDDSLTFKEDIQKAQVSGQGDSLHEHIANLAGSPAIKKGILQTVKVVDELVKVMGRHKPENIVIEMARENQTTQKGQKNSRERMKRIEEGIKELGSQILKEHPVENTQLQNEKLYLYYLQNGRDMYVDQELDINRLSDYDVDHIVPQSFLKDDSIDNKVLTRSDKARGKSDNVPSEEVVKKMKNYWRQLLNAKLITQRKFDNLTKAERGGLSELDKAGFIKRQLVETRQITKHVAQILDSRMNTKYDENDKLIREVKVITLKSKLVSDFRKDFQFYKVREINNYHHAHDAYLNAVVGTALIKKYPKLESEFVYGDYKVYDVRKMIAKSEQEIGKATAKYFFYSNIMNFFKTEITLANGEIRKRPLIETNGETGEIVWDKGRDFATVRKVLSMPQVNIVKKTEVQTGGFSKESILPKRNSDKLIARKKDWDPKKYGGFDSPTVAYSVLVVAKVEKGKSKKLKSVKELLGITIMERSSFEKNPIDFLEAKGYKEVKKDLIIKLPKYSLFELENGRKRMLASAGELQKGNELALPSKYVNFLYLASHYEKLKGSPEDNEQKQLFVEQHKHYLDEIIEQISEFSKRVILADANLDKVLSAYNKHRDKPIREQAENIIHLFTLTNLGAPAAFKYFDTTIDRKRYTSTKEVLDATLIHQSITGLYETRIDLSQLGGDGGGGGEAAAKGGSGGTLNIEDEYRLHETSKEPDVPLGSTWLSDFPQAWAETGGMGLAVRQAPLIIPLKATSTPVSIKQYPMSQEARLGIKPHIQRLLDQGILVPCQSPWNTPLLPVKKPGTNDYRPVQDLREVNKRVEDIHPTVPNPYNLLSGLPPSHQWYTVLDLKDAFFCLRLHPTSQPLFAFEWRDPEMGISGQLTWTRLPQGFKNSPTLFNEALHRDLADFRIQHPDLILLQYVDDLLLAATSEQDCQRGTRALLQTLGNLGYRASAKKAQICQKQVKYLGYLLKEGQRWLTEARKETVMGQPTPKTPRQLREFLGTAGFCRLWIPGFAEMAAPLYPLTKPGTLFNWGPDQQKAYQEIKQALLTAPALGLPDLTKPFELFVDEKQGYAKGVLTQKLGPWRRPVAYLSKKLDPVAAGWPPCLRMVAAIAVLTKDAGKLTMGQPLVILAPHAVEALVKQPPDRWLSNARMTHYQAMLLDTDRVQFGPVVALNPATLLPLPEKEAPHDCLEILAETHGTRPDLTDQPIPDADYTWYTDGSSFLQEGQRRAGAAVTTETEVIWARALPAGTSAQRAELIALTQALKMAEGKKLNVYTDSRYAFATAHVHGEIYRRRGWLTSEGREIKNKNEILALLKALFLPKRLSIIHCPGHQKGNSAEARGNRMADQAAREAAMKAVLETSTLLAGKRTADGSEFEKRTADGSEFESPKKKAKVE

SEQ ID NO: 980 - protein, 2094 aa, synthetic construct
MPAAKRVKLDGGDKKYSIGLDIGTNSVGWAVITDEYKVPSKKFKVLGNTDRHSIKKNLIGALLFDSGETAEATRLKRTARRRYTRRKNRICYLQEIFSNEMAKVDDSFFHRLEESFLVEEDKKHERHPIFGNIVDEVAYHEKYPTIYHLRKKLVDSTDKADLRLIYLALAHMIKFRGHFLIEGDLNPDNSDVDKLFIQLVQTYNQLFEENPINASGVDAKAILSARLSKSRRLENLIAQLPGEKKNGLFGNLIALSLGLTPNFKSNFDLAEDAKLQLSKDTYDDDLDNLLAQIGDQYADLFLAAKNLSDAILLSDILRVNTEITKAPLSASMIKRYDEHHQDLTLLKALVRQQLPEKYKEIFFDQSKNGYAGYIDGGASQEEFYKFIKPILEKMDGTEELLVKLNREDLLRKQRTFDNGSIPHQIHLGELHAILRRQEDFYPFLKDNREKIEKILTFRIPYYVGPLARGNSRFAWMTRKSEETITPWNFEEVVDKGASAQSFIERMTNFDKNLPNEKVLPKHSLLYEYFTVYNELTKVKYVTEGMRKPAFLSGEQKKAIVDLLFKTNRKVTVKQLKEDYFKKIECFDSVEISGVEDRFNASLGTYHDLLKIIKDKDFLDNEENEDILEDIVLTLTLFEDREMIEERLKTYAHLFDDKVMKQLKRRRYTGWGRLSRKLINGIRDKQSGKTILDFLKSDGFANRNFMQLIHDDSLTFKEDIQKAQVSGQGDSLHEHIANLAGSPAIKKGILQTVKVVDELVKVMGRHKPENIVIEMARENQTTQKGQKNSRERMKRIEEGIKELGSQILKEHPVENTQLQNEKLYLYYLQNGRDMYVDQELDINRLSDYDVDHIVPQSFLKDDSIDNKVLTRSDKARGKSDNVPSEEVVKKMKNYWRQLLNAKLITQRKFDNLTKAERGGLSELDKAGFIKRQLVETRQITKHVAQILDSRMNTKYDENDKLIREVKVITLKSKLVSDFRKDFQFYKVREINNYHHAHDAYLNAVVGTALIKKYPKLESEFVYGDYKVYDVRKMIAKSEQEIGKATAKYFFYSNIMNFFKTEITLANGEIRKRPLIETNGETGEIVWDKGRDFATVRKVLSMPQVNIVKKTEVQTGGFSKESILPKRNSDKLIARKKDWDPKKYGGFDSPTVAYSVLVVAKVEKGKSKKLKSVKELLGITIMERSSFEKNPIDFLEAKGYKEVKKDLIIKLPKYSLFELENGRKRMLASAGELQKGNELALPSKYVNFLYLASHYEKLKGSPEDNEQKQLFVEQHKHYLDEIIEQISEFSKRVILADANLDKVLSAYNKHRDKPIREQAENIIHLFTLTNLGAPAAFKYFDTTIDRKRYTSTKEVLDATLIHQSITGLYETRIDLSQLGGDGGGGSGGSGGSGGTLNIEDEYRLHETSKEPDVPLGSTWLSDFPQAWAETGGMGLAVRQAPLIIPLKATSTPVSIKQYPMSQEARLGIKPHIQRLLDQGILVPCQSPWNTPLLPVKKPGTNDYRPVQDLREVNKRVEDIHPTVPNPYNLLSGLPPSHQWYTVLDLKDAFFCLRLHPTSQPLFAFEWRDPEMGISGQLTWTRLPQGFKNSPTLFNEALHRDLADFRIQHPDLILLQYVDDLLLAATSEQDCQRGTRALLQTLGNLGYRASAKKAQICQKQVKYLGYLLKEGQRWLTEARKETVMGQPTPKTPRQLREFLGTAGFCRLWIPGFAEMAAPLYPLTKPGTLFNWGPDQQKAYQEIKQALLTAPALGLPDLTKPFELFVDEKQGYAKGVLTQKLGPWRRPVAYLSKKLDPVAAGWPPCLRMVAAIAVLTKDAGKLTMGQPLVILAPHAVEALVKQPPDRWLSNARMTHYQAMLLDTDRVQFGPVVALNPATLLPLPEKEAPHDCLEILAETHGTRPDLTDQPIPDADYTWYTDGSSFLQEGQRRAGAAVTTETEVIWARALPAGTSAQRAELIALTQALKMAEGKKLNVYTDSRYAFATAHVHGEIYRRRGWLTSEGREIKNKNEILALLKALFLPKRLSIIHCPGHQKGNSAEARGNRMADQAAREAAMKAVLETSTLLAGKRTADGSEFEKRTADGSEFESPKKKAKVE

SEQ ID NO: 981 - protein, 2100 aa, synthetic construct
MPAAKRVKLDGGDKKYSIGLDIGTNSVGWAVITDEYKVPSKKFKVLGNTDRHSIKKNLIGALLFDSGETAEATRLKRTARRRYTRRKNRICYLQEIFSNEMAKVDDSFFHRLEESFLVEEDKKHERHPIFGNIVDEVAYHEKYPTIYHLRKKLVDSTDKADLRLIYLALAHMIKFRGHFLIEGDLNPDNSDVDKLFIQLVQTYNQLFEENPINASGVDAKAILSARLSKSRRLENLIAQLPGEKKNGLFGNLIALSLGLTPNFKSNFDLAEDAKLQLSKDTYDDDLDNLLAQIGDQYADLFLAAKNLSDAILLSDILRVNTEITKAPLSASMIKRYDEHHQDLTLLKALVRQQLPEKYKEIFFDQSKNGYAGYIDGGASQEEFYKFIKPILEKMDGTEELLVKLNREDLLRKQRTFDNGSIPHQIHLGELHAILRRQEDFYPFLKDNREKIEKILTFRIPYYVGPLARGNSRFAWMTRKSEETITPWNFEEVVDKGASAQSFIERMTNFDKNLPNEKVLPKHSLLYEYFTVYNELTKVKYVTEGMRKPAFLSGEQKKAIVDLLFKTNRKVTVKQLKEDYFKKIECFDSVEISGVEDRFNASLGTYHDLLKIIKDKDFLDNEENEDILEDIVLTLTLFEDREMIEERLKTYAHLFDDKVMKQLKRRRYTGWGRLSRKLINGIRDKQSGKTILDFLKSDGFANRNFMQLIHDDSLTFKEDIQKAQVSGQGDSLHEHIANLAGSPAIKKGILQTVKVVDELVKVMGRHKPENIVIEMARENQTTQKGQKNSRERMKRIEEGIKELGSQILKEHPVENTQLQNEKLYLYYLQNGRDMYVDQELDINRLSDYDVDHIVPQSFLKDDSIDNKVLTRSDKARGKSDNVPSEEVVKKMKNYWRQLLNAKLITQRKFDNLTKAERGGLSELDKAGFIKRQLVETRQITKHVAQILDSRMNTKYDENDKLIREVKVITLKSKLVSDFRKDFQFYKVREINNYHHAHDAYLNAVVGTALIKKYPKLESEFVYGDYKVYDVRKMIAKSEQEIGKATAKYFFYSNIMNFFKTEITLANGEIRKRPLIETNGETGEIVWDKGRDFATVRKVLSMPQVNIVKKTEVQTGGFSKESILPKRNSDKLIARKKDWDPKKYGGFDSPTVAYSVLVVAKVEKGKSKKLKSVKELLGITIMERSSFEKNPIDFLEAKGYKEVKKDLIIKLPKYSLFELENGRKRMLASAGELQKGNELALPSKYVNFLYLASHYEKLKGSPEDNEQKQLFVEQHKHYLDEIIEQISEFSKRVILADANLDKVLSAYNKHRDKPIREQAENIIHLFTLTNLGAPAAFKYFDTTIDRKRYTSTKEVLDATLIHQSITGLYETRIDLSQLGGDGGEAAAKGGGGSEAAAKGGTLNIEDEYRLHETSKEPDVPLGSTWLSDFPQAWAETGGMGLAVRQAPLIIPLKATSTPVSIKQYPMSQEARLGIKPHIQRLLDQGILVPCQSPWNTPLLPVKKPGTNDYRPVQDLREVNKRVEDIHPTVPNPYNLLSGLPPSHQWYTVLDLKDAFFCLRLHPTSQPLFAFEWRDPEMGISGQLTWTRLPQGFKNSPTLFNEALHRDLADFRIQHPDLILLQYVDDLLLAATSEQDCQRGTRALLQTLGNLGYRASAKKAQICQKQVKYLGYLLKEGQRWLTEARKETVMGQPTPKTPRQLREFLGTAGFCRLWIPGFAEMAAPLYPLTKPGTLFNWGPDQQKAYQEIKQALLTAPALGLPDLTKPFELFVDEKQGYAKGVLTQKLGPWRRPVAYLSKKLDPVAAGWPPCLRMVAAIAVLTKDAGKLTMGQPLVILAPHAVEALVKQPPDRWLSNARMTHYQAMLLDTDRVQFGPVVALNPATLLPLPEKEAPHDCLEILAETHGTRPDLTDQPIPDADYTWYTDGSSFLQEGQRRAGAAVTTETEVIWARALPAGTSAQRAELIALTQALKMAEGKKLNVYTDSRYAFATAHVHGEIYRRRGWLTSEGREIKNKNEILALLKALFLPKRLSIIHCPGHQKGNSAEARGNRMADQAAREAAMKAVLETSTLLAGKRTADGSEFEKRTADGSEFESPKKKAKVE

SEQ ID NO: 982 - protein, 2093 aa, synthetic construct
MPAAKRVKLDGGDKKYSIGLDIGTNSVGWAVITDEYKVPSKKFKVLGNTDRHSIKKNLIGALLFDSGETAEATRLKRTARRRYTRRKNRICYLQEIFSNEMAKVDDSFFHRLEESFLVEEDKKHERHPIFGNIVDEVAYHEKYPTIYHLRKKLVDSTDKADLRLIYLALAHMIKFRGHFLIEGDLNPDNSDVDKLFIQLVQTYNQLFEENPINASGVDAKAILSARLSKSRRLENLIAQLPGEKKNGLFGNLIALSLGLTPNFKSNFDLAEDAKLQLSKDTYDDDLDNLLAQIGDQYADLFLAAKNLSDAILLSDILRVNTEITKAPLSASMIKRYDEHHQDLTLLKALVRQQLPEKYKEIFFDQSKNGYAGYIDGGASQEEFYKFIKPILEKMDGTEELLVKLNREDLLRKQRTFDNGSIPHQIHLGELHAILRRQEDFYPFLKDNREKIEKILTFRIPYYVGPLARGNSRFAWMTRKSEETITPWNFEEVVDKGASAQSFIERMTNFDKNLPNEKVLPKHSLLYEYFTVYNELTKVKYVTEGMRKPAFLSGEQKKAIVDLLFKTNRKVTVKQLKEDYFKKIECFDSVEISGVEDRFNASLGTYHDLLKIIKDKDFLDNEENEDILEDIVLTLTLFEDREMIEERLKTYAHLFDDKVMKQLKRRRYTGWGRLSRKLINGIRDKQSGKTILDFLKSDGFANRNFMQLIHDDSLTFKEDIQKAQVSGQGDSLHEHIANLAGSPAIKKGILQTVKVVDELVKVMGRHKPENIVIEMARENQTTQKGQKNSRERMKRIEEGIKELGSQILKEHPVENTQLQNEKLYLYYLQNGRDMYVDQELDINRLSDYDVDHIVPQSFLKDDSIDNKVLTRSDKARGKSDNVPSEEVVKKMKNYWRQLLNAKLITQRKFDNLTKAERGGLSELDKAGFIKRQLVETRQITKHVAQILDSRMNTKYDENDKLIREVKVITLKSKLVSDFRKDFQFYKVREINNYHHAHDAYLNAVVGTALIKKYPKLESEFVYGDYKVYDVRKMIAKSEQEIGKATAKYFFYSNIMNFFKTEITLANGEIRKRPLIETNGETGEIVWDKGRDFATVRKVLSMPQVNIVKKTEVQTGGFSKESILPKRNSDKLIARKKDWDPKKYGGFDSPTVAYSVLVVAKVEKGKSKKLKSVKELLGITIMERSSFEKNPIDFLEAKGYKEVKKDLIIKLPKYSLFELENGRKRMLASAGELQKGNELALPSKYVNFLYLASHYEKLKGSPEDNEQKQLFVEQHKHYLDEIIEQISEFSKRVILADANLDKVLSAYNKHRDKPIREQAENIIHLFTLTNLGAPAAFKYFDTTIDRKRYTSTKEVLDATLIHQSITGLYETRIDLSQLGGDGGEAAAKPAPGGTLNIEDEYRLHETSKEPDVPLGSTWLSDFPQAWAETGGMGLAVRQAPLIIPLKATSTPVSIKQYPMSQEARLGIKPHIQRLLDQGILVPCQSPWNTPLLPVKKPGTNDYRPVQDLREVNKRVEDIHPTVPNPYNLLSGLPPSHQWYTVLDLKDAFFCLRLHPTSQPLFAFEWRDPEMGISGQLTWTRLPQGFKNSPTLFNEALHRDLADFRIQHPDLILLQYVDDLLLAATSEQDCQRGTRALLQTLGNLGYRASAKKAQICQKQVKYLGYLLKEGQRWLTEARKETVMGQPTPKTPRQLREFLGTAGFCRLWIPGFAEMAAPLYPLTKPGTLFNWGPDQQKAYQEIKQALLTAPALGLPDLTKPFELFVDEKQGYAKGVLTQKLGPWRRPVAYLSKKLDPVAAGWPPCLRMVAAIAVLTKDAGKLTMGQPLVILAPHAVEALVKQPPDRWLSNARMTHYQAMLLDTDRVQFGPVVALNPATLLPLPEKEAPHDCLEILAETHGTRPDLTDQPIPDADYTWYTDGSSFLQEGQRRAGAAVTTETEVIWARALPAGTSAQRAELIALTQALKMAEGKKLNVYTDSRYAFATAHVHGEIYRRRGWLTSEGREIKNKNEILALLKALFLPKRLSIIHCPGHQKGNSAEARGNRMADQAAREAAMKAVLETSTLLAGKRTADGSEFEKRTADGSEFESPKKKAKVE

SEQ ID NO: 983 - protein, 2090 aa, synthetic construct
MPAAKRVKLDGGDKKYSIGLDIGTNSVGWAVITDEYKVPSKKFKVLGNTDRHSIKKNLIGALLFDSGETAEATRLKRTARRRYTRRKNRICYLQEIFSNEMAKVDDSFFHRLEESFLVEEDKKHERHPIFGNIVDEVAYHEKYPTIYHLRKKLVDSTDKADLRLIYLALAHMIKFRGHFLIEGDLNPDNSDVDKLFIQLVQTYNQLFEENPINASGVDAKAILSARLSKSRRLENLIAQLPGEKKNGLFGNLIALSLGLTPNFKSNFDLAEDAKLQLSKDTYDDDLDNLLAQIGDQYADLFLAAKNLSDAILLSDILRVNTEITKAPLSASMIKRYDEHHQDLTLLKALVRQQLPEKYKEIFFDQSKNGYAGYIDGGASQEEFYKFIKPILEKMDGTEELLVKLNREDLLRKQRTFDNGSIPHQIHLGELHAILRRQEDFYPFLKDNREKIEKILTFRIPYYVGPLARGNSRFAWMTRKSEETITPWNFEEVVDKGASAQSFIERMTNFDKNLPNEKVLPKHSLLYEYFTVYNELTKVKYVTEGMRKPAFLSGEQKKAIVDLLFKTNRKVTVKQLKEDYFKKIECFDSVEISGVEDRFNASLGTYHDLLKIIKDKDFLDNEENEDILEDIVLTLTLFEDREMIEERLKTYAHLFDDKVMKQLKRRRYTGWGRLSRKLINGIRDKQSGKTILDFLKSDGFANRNFMQLIHDDSLTFKEDIQKAQVSGQGDSLHEHIANLAGSPAIKKGILQTVKVVDELVKVMGRHKPENIVIEMARENQTTQKGQKNSRERMKRIEEGIKELGSQILKEHPVENTQLQNEKLYLYYLQNGRDMYVDQELDINRLSDYDVDHIVPQSFLKDDSIDNKVLTRSDKARGKSDNVPSEEVVKKMKNYWRQLLNAKLITQRKFDNLTKAERGGLSELDKAGFIKRQLVETRQITKHVAQILDSRMNTKYDENDKLIREVKVITLKSKLVSDFRKDFQFYKVREINNYHHAHDAYLNAVVGTALIKKYPKLESEFVYGDYKVYDVRKMIAKSEQEIGKATAKYFFYSNIMNFFKTEITLANGEIRKRPLIETNGETGEIVWDKGRDFATVRKVLSMPQVNIVKKTEVQTGGFSKESILPKRNSDKLIARKKDWDPKKYGGFDSPTVAYSVLVVAKVEKGKSKKLKSVKELLGITIMERSSFEKNPIDFLEAKGYKEVKKDLIIKLPKYSLFELENGRKRMLASAGELQKGNELALPSKYVNFLYLASHYEKLKGSPEDNEQKQLFVEQHKHYLDEIIEQISEFSKRVILADANLDKVLSAYNKHRDKPIREQAENIIHLFTLTNLGAPAAFKYFDTTIDRKRYTSTKEVLDATLIHQSITGLYETRIDLSQLGGDGGPAPAPGGTLNIEDEYRLHETSKEPDVPLGSTWLSDFPQAWAETGGMGLAVRQAPLIIPLKATSTPVSIKQYPMSQEARLGIKPHIQRLLDQGILVPCQSPWNTPLLPVKKPGTNDYRPVQDLREVNKRVEDIHPTVPNPYNLLSGLPPSHQWYTVLDLKDAFFCLRLHPTSQPLFAFEWRDPEMGISGQLTWTRLPQGFKNSPTLFNEALHRDLADFRIQHPDLILLQYVDDLLLAATSEQDCQRGTRALLQTLGNLGYRASAKKAQICQKQVKYLGYLLKEGQRWLTEARKETVMGQPTPKTPRQLREFLGTAGFCRLWIPGFAEMAAPLYPLTKPGTLFNWGPDQQKAYQEIKQALLTAPALGLPDLTKPFELFVDEKQGYAKGVLTQKLGPWRRPVAYLSKKLDPVAAGWPPCLRMVAAIAVLTKDAGKLTMGQPLVILAPHAVEALVKQPPDRWLSNARMTHYQAMLLDTDRVQFGPVVALNPATLLPLPEKEAPHDCLEILAETHGTRPDLTDQPIPDADYTWYTDGSSFLQEGQRRAGAAVTTETEVIWARALPAGTSAQRAELIALTQALKMAEGKKLNVYTDSRYAFATAHVHGEIYRRRGWLTSEGREIKNKNEILALLKALFLPKRLSIIHCPGHQKGNSAEARGNRMADQAAREAAMKAVLETSTLLAGKRTADGSEFEKRTADGSEFESPKKKAKVE

SEQ ID NO: 984 - protein, 2094 aa, synthetic construct
MPAAKRVKLDGGDKKYSIGLDIGTNSVGWAVITDEYKVPSKKFKVLGNTDRHSIKKNLIGALLFDSGETAEATRLKRTARRRYTRRKNRICYLQEIFSNEMAKVDDSFFHRLEESFLVEEDKKHERHPIFGNIVDEVAYHEKYPTIYHLRKKLVDSTDKADLRLIYLALAHMIKFRGHFLIEGDLNPDNSDVDKLFIQLVQTYNQLFEENPINASGVDAKAILSARLSKSRRLENLIAQLPGEKKNGLFGNLIALSLGLTPNFKSNFDLAEDAKLQLSKDTYDDDLDNLLAQIGDQYADLFLAAKNLSDAILLSDILRVNTEITKAPLSASMIKRYDEHHQDLTLLKALVRQQLPEKYKEIFFDQSKNGYAGYIDGGASQEEFYKFIKPILEKMDGTEELLVKLNREDLLRKQRTFDNGSIPHQIHLGELHAILRRQEDFYPFLKDNREKIEKILTFRIPYYVGPLARGNSRFAWMTRKSEETITPWNFEEVVDKGASAQSFIERMTNFDKNLPNEKVLPKHSLLYEYFTVYNELTKVKYVTEGMRKPAFLSGEQKKAIVDLLFKTNRKVTVKQLKEDYFKKIECFDSVEISGVEDRFNASLGTYHDLLKIIKDKDFLDNEENEDILEDIVLTLTLFEDREMIEERLKTYAHLFDDKVMKQLKRRRYTGWGRLSRKLINGIRDKQSGKTILDFLKSDGFANRNFMQLIHDDSLTFKEDIQKAQVSGQGDSLHEHIANLAGSPAIKKGILQTVKVVDELVKVMGRHKPENIVIEMARENQTTQKGQKNSRERMKRIEEGIKELGSQILKEHPVENTQLQNEKLYLYYLQNGRDMYVDQELDINRLSDYDVDHIVPQSFLKDDSIDNKVLTRSDKARGKSDNVPSEEVVKKMKNYWRQLLNAKLITQRKFDNLTKAERGGLSELDKAGFIKRQLVETRQITKHVAQILDSRMNTKYDENDKLIREVKVITLKSKLVSDFRKDFQFYKVREINNYHHAHDAYLNAVVGTALIKKYPKLESEFVYGDYKVYDVRKMIAKSEQEIGKATAKYFFYSNIMNFFKTEITLANGEIRKRPLIETNGETGEIVWDKGRDFATVRKVLSMPQVNIVKKTEVQTGGFSKESILPKRNSDKLIARKKDWDPKKYGGFDSPTVAYSVLVVAKVEKGKSKKLKSVKELLGITIMERSSFEKNPIDFLEAKGYKEVKKDLIIKLPKYSLFELENGRKRMLASAGELQKGNELALPSKYVNFLYLASHYEKLKGSPEDNEQKQLFVEQHKHYLDEIIEQISEFSKRVILADANLDKVLSAYNKHRDKPIREQAENIIHLFTLTNLGAPAAFKYFDTTIDRKRYTSTKEVLDATLIHQSITGLYETRIDLSQLGGDGGGGGPAPGGSGGTLNIEDEYRLHETSKEPDVPLGSTWLSDFPQAWAETGGMGLAVRQAPLIIPLKATSTPVSIKQYPMSQEARLGIKPHIQRLLDQGILVPCQSPWNTPLLPVKKPGTNDYRPVQDLREVNKRVEDIHPTVPNPYNLLSGLPPSHQWYTVLDLKDAFFCLRLHPTSQPLFAFEWRDPEMGISGQLTWTRLPQGFKNSPTLFNEALHRDLADFRIQHPDLILLQYVDDLLLAATSEQDCQRGTRALLQTLGNLGYRASAKKAQICQKQVKYLGYLLKEGQRWLTEARKETVMGQPTPKTPRQLREFLGTAGFCRLWIPGFAEMAAPLYPLTKPGTLFNWGPDQQKAYQEIKQALLTAPALGLPDLTKPFELFVDEKQGYAKGVLTQKLGPWRRPVAYLSKKLDPVAAGWPPCLRMVAAIAVLTKDAGKLTMGQPLVILAPHAVEALVKQPPDRWLSNARMTHYQAMLLDTDRVQFGPVVALNPATLLPLPEKEAPHDCLEILAETHGTRPDLTDQPIPDADYTWYTDGSSFLQEGQRRAGAAVTTETEVIWARALPAGTSAQRAELIALTQALKMAEGKKLNVYTDSRYAFATAHVHGEIYRRRGWLTSEGREIKNKNEILALLKALFLPKRLSIIHCPGHQKGNSAEARGNRMADQAAREAAMKAVLETSTLLAGKRTADGSEFEKRTADGSEFESPKKKAKVE

SEQ ID NO: 985 - protein, 2096 aa, synthetic construct
MPAAKRVKLDGGDKKYSIGLDIGTNSVGWAVITDEYKVPSKKFKVLGNTDRHSIKKNLIGALLFDSGETAEATRLKRTARRRYTRRKNRICYLQEIFSNEMAKVDDSFFHRLEESFLVEEDKKHERHPIFGNIVDEVAYHEKYPTIYHLRKKLVDSTDKADLRLIYLALAHMIKFRGHFLIEGDLNPDNSDVDKLFIQLVQTYNQLFEENPINASGVDAKAILSARLSKSRRLENLIAQLPGEKKNGLFGNLIALSLGLTPNFKSNFDLAEDAKLQLSKDTYDDDLDNLLAQIGDQYADLFLAAKNLSDAILLSDILRVNTEITKAPLSASMIKRYDEHHQDLTLLKALVRQQLPEKYKEIFFDQSKNGYAGYIDGGASQEEFYKFIKPILEKMDGTEELLVKLNREDLLRKQRTFDNGSIPHQIHLGELHAILRRQEDFYPFLKDNREKIEKILTFRIPYYVGPLARGNSRFAWMTRKSEETITPWNFEEVVDKGASAQSFIERMTNFDKNLPNEKVLPKHSLLYEYFTVYNELTKVKYVTEGMRKPAFLSGEQKKAIVDLLFKTNRKVTVKQLKEDYFKKIECFDSVEISGVEDRFNASLGTYHDLLKIIKDKDFLDNEENEDILEDIVLTLTLFEDREMIEERLKTYAHLFDDKVMKQLKRRRYTGWGRLSRKLINGIRDKQSGKTILDFLKSDGFANRNFMQLIHDDSLTFKEDIQKAQVSGQGDSLHEHIANLAGSPAIKKGILQTVKVVDELVKVMGRHKPENIVIEMARENQTTQKGQKNSRERMKRIEEGIKELGSQILKEHPVENTQLQNEKLYLYYLQNGRDMYVDQELDINRLSDYDVDHIVPQSFLKDDSIDNKVLTRSDKARGKSDNVPSEEVVKKMKNYWRQLLNAKLITQRKFDNLTKAERGGLSELDKAGFIKRQLVETRQITKHVAQILDSRMNTKYDENDKLIREVKVITLKSKLVSDFRKDFQFYKVREINNYHHAHDAYLNAVVGTALIKKYPKLESEFVYGDYKVYDVRKMIAKSEQEIGKATAKYFFYSNIMNFFKTEITLANGEIRKRPLIETNGETGEIVWDKGRDFATVRKVLSMPQVNIVKKTEVQTGGFSKESILPKRNSDKLIARKKDWDPKKYGGFDSPTVAYSVLVVAKVEKGKSKKLKSVKELLGITIMERSSFEKNPIDFLEAKGYKEVKKDLIIKLPKYSLFELENGRKRMLASAGELQKGNELALPSKYVNFLYLASHYEKLKGSPEDNEQKQLFVEQHKHYLDEIIEQISEFSKRVILADANLDKVLSAYNKHRDKPIREQAENIIHLFTLTNLGAPAAFKYFDTTIDRKRYTSTKEVLDATLIHQSITGLYETRIDLSQLGGDGGGGGEAAAKPAPGGTLNIEDEYRLHETSKEPDVPLGSTWLSDFPQAWAETGGMGLAVRQAPLIIPLKATSTPVSIKQYPMSQEARLGIKPHIQRLLDQGILVPCQSPWNTPLLPVKKPGTNDYRPVQDLREVNKRVEDIHPTVPNPYNLLSGLPPSHQWYTVLDLKDAFFCLRLHPTSQPLFAFEWRDPEMGISGQLTWTRLPQGFKNSPTLFNEALHRDLADFRIQHPDLILLQYVDDLLLAATSEQDCQRGTRALLQTLGNLGYRASAKKAQICQKQVKYLGYLLKEGQRWLTEARKETVMGQPTPKTPRQLREFLGTAGFCRLWIPGFAEMAAPLYPLTKPGTLFNWGPDQQKAYQEIKQALLTAPALGLPDLTKPFELFVDEKQGYAKGVLTQKLGPWRRPVAYLSKKLDPVAAGWPPCLRMVAAIAVLTKDAGKLTMGQPLVILAPHAVEALVKQPPDRWLSNARMTHYQAMLLDTDRVQFGPVVALNPATLLPLPEKEAPHDCLEILAETHGTRPDLTDQPIPDADYTWYTDGSSFLQEGQRRAGAAVTTETEVIWARALPAGTSAQRAELIALTQALKMAEGKKLNVYTDSRYAFATAHVHGEIYRRRGWLTSEGREIKNKNEILALLKALFLPKRLSIIHCPGHQKGNSAEARGNRMADQAAREAAMKAVLETSTLLAGKRTADGSEFEKRTADGSEFESPKKKAKVE

SEQ ID NO: 986 - protein, 2094 aa, synthetic construct
MPAAKRVKLDGGDKKYSIGLDIGTNSVGWAVITDEYKVPSKKFKVLGNTDRHSIKKNLIGALLFDSGETAEATRLKRTARRRYTRRKNRICYLQEIFSNEMAKVDDSFFHRLEESFLVEEDKKHERHPIFGNIVDEVAYHEKYPTIYHLRKKLVDSTDKADLRLIYLALAHMIKFRGHFLIEGDLNPDNSDVDKLFIQLVQTYNQLFEENPINASGVDAKAILSARLSKSRRLENLIAQLPGEKKNGLFGNLIALSLGLTPNFKSNFDLAEDAKLQLSKDTYDDDLDNLLAQIGDQYADLFLAAKNLSDAILLSDILRVNTEITKAPLSASMIKRYDEHHQDLTLLKALVRQQLPEKYKEIFFDQSKNGYAGYIDGGASQEEFYKFIKPILEKMDGTEELLVKLNREDLLRKQRTFDNGSIPHQIHLGELHAILRRQEDFYPFLKDNREKIEKILTFRIPYYVGPLARGNSRFAWMTRKSEETITPWNFEEVVDKGASAQSFIERMTNFDKNLPNEKVLPKHSLLYEYFTVYNELTKVKYVTEGMRKPAFLSGEQKKAIVDLLFKTNRKVTVKQLKEDYFKKIECFDSVEISGVEDRFNASLGTYHDLLKIIKDKDFLDNEENEDILEDIVLTLTLFEDREMIEERLKTYAHLFDDKVMKQLKRRRYTGWGRLSRKLINGIRDKQSGKTILDFLKSDGFANRNFMQLIHDDSLTFKEDIQKAQVSGQGDSLHEHIANLAGSPAIKKGILQTVKVVDELVKVMGRHKPENIVIEMARENQTTQKGQKNSRERMKRIEEGIKELGSQILKEHPVENTQLQNEKLYLYYLQNGRDMYVDQELDINRLSDYDVDHIVPQSFLKDDSIDNKVLTRSDKARGKSDNVPSEEVVKKMKNYWRQLLNAKLITQRKFDNLTKAERGGLSELDKAGFIKRQLVETRQITKHVAQILDSRMNTKYDENDKLIREVKVITLKSKLVSDFRKDFQFYKVREINNYHHAHDAYLNAVVGTALIKKYPKLESEFVYGDYKVYDVRKMIAKSEQEIGKATAKYFFYSNIMNFFKTEITLANGEIRKRPLIETNGETGEIVWDKGRDFATVRKVLSMPQVNIVKKTEVQTGGFSKESILPKRNSDKLIARKKDWDPKKYGGFDSPTVAYSVLVVAKVEKGKSKKLKSVKELLGITIMERSSFEKNPIDFLEAKGYKEVKKDLIIKLPKYSLFELENGRKRMLASAGELQKGNELALPSKYVNFLYLASHYEKLKGSPEDNEQKQLFVEQHKHYLDEIIEQISEFSKRVILADANLDKVLSAYNKHRDKPIREQAENIIHLFTLTNLGAPAAFKYFDTTIDRKRYTSTKEVLDATLIHQSITGLYETRIDLSQLGGDGGGGSPAPGSSGGTLNIEDEYRLHETSKEPDVPLGSTWLSDFPQAWAETGGMGLAVRQAPLIIPLKATSTPVSIKQYPMSQEARLGIKPHIQRLLDQGILVPCQSPWNTPLLPVKKPGTNDYRPVQDLREVNKRVEDIHPTVPNPYNLLSGLPPSHQWYTVLDLKDAFFCLRLHPTSQPLFAFEWRDPEMGISGQLTWTRLPQGFKNSPTLFNEALHRDLADFRIQHPDLILLQYVDDLLLAATSEQDCQRGTRALLQTLGNLGYRASAKKAQICQKQVKYLGYLLKEGQRWLTEARKETVMGQPTPKTPRQLREFLGTAGFCRLWIPGFAEMAAPLYPLTKPGTLFNWGPDQQKAYQEIKQALLTAPALGLPDLTKPFELFVDEKQGYAKGVLTQKLGPWRRPVAYLSKKLDPVAAGWPPCLRMVAAIAVLTKDAGKLTMGQPLVILAPHAVEALVKQPPDRWLSNARMTHYQAMLLDTDRVQFGPVVALNPATLLPLPEKEAPHDCLEILAETHGTRPDLTDQPIPDADYTWYTDGSSFLQEGQRRAGAAVTTETEVIWARALPAGTSAQRAELIALTQALKMAEGKKLNVYTDSRYAFATAHVHGEIYRRRGWLTSEGREIKNKNEILALLKALFLPKRLSIIHCPGHQKGNSAEARGNRMADQAAREAAMKAVLETSTLLAGKRTADGSEFEKRTADGSEFESPKKKAKVE

SEQ ID NO: 987 - protein, 2094 aa, synthetic construct
MPAAKRVKLDGGDKKYSIGLDIGTNSVGWAVITDEYKVPSKKFKVLGNTDRHSIKKNLIGALLFDSGETAEATRLKRTARRRYTRRKNRICYLQEIFSNEMAKVDDSFFHRLEESFLVEEDKKHERHPIFGNIVDEVAYHEKYPTIYHLRKKLVDSTDKADLRLIYLALAHMIKFRGHFLIEGDLNPDNSDVDKLFIQLVQTYNQLFEENPINASGVDAKAILSARLSKSRRLENLIAQLPGEKKNGLFGNLIALSLGLTPNFKSNFDLAEDAKLQLSKDTYDDDLDNLLAQIGDQYADLFLAAKNLSDAILLSDILRVNTEITKAPLSASMIKRYDEHHQDLTLLKALVRQQLPEKYKEIFFDQSKNGYAGYIDGGASQEEFYKFIKPILEKMDGTEELLVKLNREDLLRKQRTFDNGSIPHQIHLGELHAILRRQEDFYPFLKDNREKIEKILTFRIPYYVGPLARGNSRFAWMTRKSEETITPWNFEEVVDKGASAQSFIERMTNFDKNLPNEKVLPKHSLLYEYFTVYNELTKVKYVTEGMRKPAFLSGEQKKAIVDLLFKTNRKVTVKQLKEDYFKKIECFDSVEISGVEDRFNASLGTYHDLLKIIKDKDFLDNEENEDILEDIVLTLTLFEDREMIEERLKTYAHLFDDKVMKQLKRRRYTGWGRLSRKLINGIRDKQSGKTILDFLKSDGFANRNFMQLIHDDSLTFKEDIQKAQVSGQGDSLHEHIANLAGSPAIKKGILQTVKVVDELVKVMGRHKPENIVIEMARENQTTQKGQKNSRERMKRIEEGIKELGSQILKEHPVENTQLQNEKLYLYYLQNGRDMYVDQELDINRLSDYDVDHIVPQSFLKDDSIDNKVLTRSDKARGKSDNVPSEEVVKKMKNYWRQLLNAKLITQRKFDNLTKAERGGLSELDKAGFIKRQLVETRQITKHVAQILDSRMNTKYDENDKLIREVKVITLKSKLVSDFRKDFQFYKVREINNYHHAHDAYLNAVVGTALIKKYPKLESEFVYGDYKVYDVRKMIAKSEQEIGKATAKYFFYSNIMNFFKTEITLANGEIRKRPLIETNGETGEIVWDKGRDFATVRKVLSMPQVNIVKKTEVQTGGFSKESILPKRNSDKLIARKKDWDPKKYGGFDSPTVAYSVLVVAKVEKGKSKKLKSVKELLGITIMERSSFEKNPIDFLEAKGYKEVKKDLIIKLPKYSLFELENGRKRMLASAGELQKGNELALPSKYVNFLYLASHYEKLKGSPEDNEQKQLFVEQHKHYLDEIIEQISEFSKRVILADANLDKVLSAYNKHRDKPIREQAENIIHLFTLTNLGAPAAFKYFDTTIDRKRYTSTKEVLDATLIHQSITGLYETRIDLSQLGGDGGGSSPAPGGSGGTLNIEDEYRLHETSKEPDVPLGSTWLSDFPQAWAETGGMGLAVRQAPLIIPLKATSTPVSIKQYPMSQEARLGIKPHIQRLLDQGILVPCQSPWNTPLLPVKKPGTNDYRPVQDLREVNKRVEDIHPTVPNPYNLLSGLPPSHQWYTVLDLKDAFFCLRLHPTSQPLFAFEWRDPEMGISGQLTWTRLPQGFKNSPTLFNEALHRDLADFRIQHPDLILLQYVDDLLLAATSEQDCQRGTRALLQTLGNLGYRASAKKAQICQKQVKYLGYLLKEGQRWLTEARKETVMGQPTPKTPRQLREFLGTAGFCRLWIPGFAEMAAPLYPLTKPGTLFNWGPDQQKAYQEIKQALLTAPALGLPDLTKPFELFVDEKQGYAKGVLTQKLGPWRRPVAYLSKKLDPVAAGWPPCLRMVAAIAVLTKDAGKLTMGQPLVILAPHAVEALVKQPPDRWLSNARMTHYQAMLLDTDRVQFGPVVALNPATLLPLPEKEAPHDCLEILAETHGTRPDLTDQPIPDADYTWYTDGSSFLQEGQRRAGAAVTTETEVIWARALPAGTSAQRAELIALTQALKMAEGKKLNVYTDSRYAFATAHVHGEIYRRRGWLTSEGREIKNKNEILALLKALFLPKRLSIIHCPGHQKGNSAEARGNRMADQAAREAAMKAVLETSTLLAGKRTADGSEFEKRTADGSEFESPKKKAKVE

SEQ ID NO: 988 - protein, 2090 aa, synthetic construct
MPAAKRVKLDGGDKKYSIGLDIGTNSVGWAVITDEYKVPSKKFKVLGNTDRHSIKKNLIGALLFDSGETAEATRLKRTARRRYTRRKNRICYLQEIFSNEMAKVDDSFFHRLEESFLVEEDKKHERHPIFGNIVDEVAYHEKYPTIYHLRKKLVDSTDKADLRLIYLALAHMIKFRGHFLIEGDLNPDNSDVDKLFIQLVQTYNQLFEENPINASGVDAKAILSARLSKSRRLENLIAQLPGEKKNGLFGNLIALSLGLTPNFKSNFDLAEDAKLQLSKDTYDDDLDNLLAQIGDQYADLFLAAKNLSDAILLSDILRVNTEITKAPLSASMIKRYDEHHQDLTLLKALVRQQLPEKYKEIFFDQSKNGYAGYIDGGASQEEFYKFIKPILEKMDGTEELLVKLNREDLLRKQRTFDNGSIPHQIHLGELHAILRRQEDFYPFLKDNREKIEKILTFRIPYYVGPLARGNSRFAWMTRKSEETITPWNFEEVVDKGASAQSFIERMTNFDKNLPNEKVLPKHSLLYEYFTVYNELTKVKYVTEGMRKPAFLSGEQKKAIVDLLFKTNRKVTVKQLKEDYFKKIECFDSVEISGVEDRFNASLGTYHDLLKIIKDKDFLDNEENEDILEDIVLTLTLFEDREMIEERLKTYAHLFDDKVMKQLKRRRYTGWGRLSRKLINGIRDKQSGKTILDFLKSDGFANRNFMQLIHDDSLTFKEDIQKAQVSGQGDSLHEHIANLAGSPAIKKGILQTVKVVDELVKVMGRHKPENIVIEMARENQTTQKGQKNSRERMKRIEEGIKELGSQILKEHPVENTQLQNEKLYLYYLQNGRDMYVDQELDINRLSDYDVDHIVPQSFLKDDSIDNKVLTRSDKARGKSDNVPSEEVVKKMKNYWRQLLNAKLITQRKFDNLTKAERGGLSELDKAGFIKRQLVETRQITKHVAQILDSRMNTKYDENDKLIREVKVITLKSKLVSDFRKDFQFYKVREINNYHHAHDAYLNAVVGTALIKKYPKLESEFVYGDYKVYDVRKMIAKSEQEIGKATAKYFFYSNIMNFFKTEITLANGEIRKRPLIETNGETGEIVWDKGRDFATVRKVLSMPQVNIVKKTEVQTGGFSKESILPKRNSDKLIARKKDWDPKKYGGFDSPTVAYSVLVVAKVEKGKSKKLKSVKELLGITIMERSSFEKNPIDFLEAKGYKEVKKDLIIKLPKYSLFELENGRKRMLASAGELQKGNELALPSKYVNFLYLASHYEKLKGSPEDNEQKQLFVEQHKHYLDEIIEQISEFSKRVILADANLDKVLSAYNKHRDKPIREQAENIIHLFTLTNLGAPAAFKYFDTTIDRKRYTSTKEVLDATLIHQSITGLYETRIDLSQLGGDGGEAAAKGGTLNIEDEYRLHETSKEPDVPLGSTWLSDFPQAWAETGGMGLAVRQAPLIIPLKATSTPVSIKQYPMSQEARLGIKPHIQRLLDQGILVPCQSPWNTPLLPVKKPGTNDYRPVQDLREVNKRVEDIHPTVPNPYNLLSGLPPSHQWYTVLDLKDAFFCLRLHPTSQPLFAFEWRDPEMGISGQLTWTRLPQGFKNSPTLFNEALHRDLADFRIQHPDLILLQYVDDLLLAATSEQDCQRGTRALLQTLGNLGYRASAKKAQICQKQVKYLGYLLKEGQRWLTEARKETVMGQPTPKTPRQLREFLGTAGFCRLWIPGFAEMAAPLYPLTKPGTLFNWGPDQQKAYQEIKQALLTAPALGLPDLTKPFELFVDEKQGYAKGVLTQKLGPWRRPVAYLSKKLDPVAAGWPPCLRMVAAIAVLTKDAGKLTMGQPLVILAPHAVEALVKQPPDRWLSNARMTHYQAMLLDTDRVQFGPVVALNPATLLPLPEKEAPHDCLEILAETHGTRPDLTDQPIPDADYTWYTDGSSFLQEGQRRAGAAVTTETEVIWARALPAGTSAQRAELIALTQALKMAEGKKLNVYTDSRYAFATAHVHGEIYRRRGWLTSEGREIKNKNEILALLKALFLPKRLSIIHCPGHQKGNSAEARGNRMADQAAREAAMKAVLETSTLLAGKRTADGSEFEKRTADGSEFESPKKKAKVE

SEQ ID NO: 989 - protein, 2094 aa, synthetic construct
MPAAKRVKLDGGDKKYSIGLDIGTNSVGWAVITDEYKVPSKKFKVLGNTDRHSIKKNLIGALLFDSGETAEATRLKRTARRRYTRRKNRICYLQEIFSNEMAKVDDSFFHRLEESFLVEEDKKHERHPIFGNIVDEVAYHEKYPTIYHLRKKLVDSTDKADLRLIYLALAHMIKFRGHFLIEGDLNPDNSDVDKLFIQLVQTYNQLFEENPINASGVDAKAILSARLSKSRRLENLIAQLPGEKKNGLFGNLIALSLGLTPNFKSNFDLAEDAKLQLSKDTYDDDLDNLLAQIGDQYADLFLAAKNLSDAILLSDILRVNTEITKAPLSASMIKRYDEHHQDLTLLKALVRQQLPEKYKEIFFDQSKNGYAGYIDGGASQEEFYKFIKPILEKMDGTEELLVKLNREDLLRKQRTFDNGSIPHQIHLGELHAILRRQEDFYPFLKDNREKIEKILTFRIPYYVGPLARGNSRFAWMTRKSEETITPWNFEEVVDKGASAQSFIERMTNFDKNLPNEKVLPKHSLLYEYFTVYNELTKVKYVTEGMRKPAFLSGEQKKAIVDLLFKTNRKVTVKQLKEDYFKKIECFDSVEISGVEDRFNASLGTYHDLLKIIKDKDFLDNEENEDILEDIVLTLTLFEDREMIEERLKTYAHLFDDKVMKQLKRRRYTGWGRLSRKLINGIRDKQSGKTILDFLKSDGFANRNFMQLIHDDSLTFKEDIQKAQVSGQGDSLHEHIANLAGSPAIKKGILQTVKVVDELVKVMGRHKPENIVIEMARENQTTQKGQKNSRERMKRIEEGIKELGSQILKEHPVENTQLQNEKLYLYYLQNGRDMYVDQELDINRLSDYDVDHIVPQSFLKDDSIDNKVLTRSDKARGKSDNVPSEEVVKKMKNYWRQLLNAKLITQRKFDNLTKAERGGLSELDKAGFIKRQLVETRQITKHVAQILDSRMNTKYDENDKLIREVKVITLKSKLVSDFRKDFQFYKVREINNYHHAHDAYLNAVVGTALIKKYPKLESEFVYGDYKVYDVRKMIAKSEQEIGKATAKYFFYSNIMNFFKTEITLANGEIRKRPLIETNGETGEIVWDKGRDFATVRKVLSMPQVNIVKKTEVQTGGFSKESILPKRNSDKLIARKKDWDPKKYGGFDSPTVAYSVLVVAKVEKGKSKKLKSVKELLGITIMERSSFEKNPIDFLEAKGYKEVKKDLIIKLPKYSLFELENGRKRMLASAGELQKGNELALPSKYVNFLYLASHYEKLKGSPEDNEQKQLFVEQHKHYLDEIIEQISEFSKRVILADANLDKVLSAYNKHRDKPIREQAENIIHLFTLTNLGAPAAFKYFDTTIDRKRYTSTKEVLDATLIHQSITGLYETRIDLSQLGGDGGGGGGGSGSSGGTLNIEDEYRLHETSKEPDVPLGSTWLSDFPQAWAETGGMGLAVRQAPLIIPLKATSTPVSIKQYPMSQEARLGIKPHIQRLLDQGILVPCQSPWNTPLLPVKKPGTNDYRPVQDLREVNKRVEDIHPTVPNPYNLLSGLPPSHQWYTVLDLKDAFFCLRLHPTSQPLFAFEWRDPEMGISGQLTWTRLPQGFKNSPTLFNEALHRDLADFRIQHPDLILLQYVDDLLLAATSEQDCQRGTRALLQTLGNLGYRASAKKAQICQKQVKYLGYLLKEGQRWLTEARKETVMGQPTPKTPRQLREFLGTAGFCRLWIPGFAEMAAPLYPLTKPGTLFNWGPDQQKAYQEIKQALLTAPALGLPDLTKPFELFVDEKQGYAKGVLTQKLGPWRRPVAYLSKKLDPVAAGWPPCLRMVAAIAVLTKDAGKLTMGQPLVILAPHAVEALVKQPPDRWLSNARMTHYQAMLLDTDRVQFGPVVALNPATLLPLPEKEAPHDCLEILAETHGTRPDLTDQPIPDADYTWYTDGSSFLQEGQRRAGAAVTTETEVIWARALPAGTSAQRAELIALTQALKMAEGKKLNVYTDSRYAFATAHVHGEIYRRRGWLTSEGREIKNKNEILALLKALFLPKRLSIIHCPGHQKGNSAEARGNRMADQAAREAAMKAVLETSTLLAGKRTADGSEFEKRTADGSEFESPKKKAKVE

SEQ ID NO: 990 - protein, 2091 aa, synthetic construct
MPAAKRVKLDGGDKKYSIGLDIGTNSVGWAVITDEYKVPSKKFKVLGNTDRHSIKKNLIGALLFDSGETAEATRLKRTARRRYTRRKNRICYLQEIFSNEMAKVDDSFFHRLEESFLVEEDKKHERHPIFGNIVDEVAYHEKYPTIYHLRKKLVDSTDKADLRLIYLALAHMIKFRGHFLIEGDLNPDNSDVDKLFIQLVQTYNQLFEENPINASGVDAKAILSARLSKSRRLENLIAQLPGEKKNGLFGNLIALSLGLTPNFKSNFDLAEDAKLQLSKDTYDDDLDNLLAQIGDQYADLFLAAKNLSDAILLSDILRVNTEITKAPLSASMIKRYDEHHQDLTLLKALVRQQLPEKYKEIFFDQSKNGYAGYIDGGASQEEFYKFIKPILEKMDGTEELLVKLNREDLLRKQRTFDNGSIPHQIHLGELHAILRRQEDFYPFLKDNREKIEKILTFRIPYYVGPLARGNSRFAWMTRKSEETITPWNFEEVVDKGASAQSFIERMTNFDKNLPNEKVLPKHSLLYEYFTVYNELTKVKYVTEGMRKPAFLSGEQKKAIVDLLFKTNRKVTVKQLKEDYFKKIECFDSVEISGVEDRFNASLGTYHDLLKIIKDKDFLDNEENEDILEDIVLTLTLFEDREMIEERLKTYAHLFDDKVMKQLKRRRYTGWGRLSRKLINGIRDKQSGKTILDFLKSDGFANRNFMQLIHDDSLTFKEDIQKAQVSGQGDSLHEHIANLAGSPAIKKGILQTVKVVDELVKVMGRHKPENIVIEMARENQTTQKGQKNSRERMKRIEEGIKELGSQILKEHPVENTQLQNEKLYLYYLQNGRDMYVDQELDINRLSDYDVDHIVPQSFLKDDSIDNKVLTRSDKARGKSDNVPSEEVVKKMKNYWRQLLNAKLITQRKFDNLTKAERGGLSELDKAGFIKRQLVETRQITKHVAQILDSRMNTKYDENDKLIREVKVITLKSKLVSDFRKDFQFYKVREINNYHHAHDAYLNAVVGTALIKKYPKLESEFVYGDYKVYDVRKMIAKSEQEIGKATAKYFFYSNIMNFFKTEITLANGEIRKRPLIETNGETGEIVWDKGRDFATVRKVLSMPQVNIVKKTEVQTGGFSKESILPKRNSDKLIARKKDWDPKKYGGFDSPTVAYSVLVVAKVEKGKSKKLKSVKELLGITIMERSSFEKNPIDFLEAKGYKEVKKDLIIKLPKYSLFELENGRKRMLASAGELQKGNELALPSKYVNFLYLASHYEKLKGSPEDNEQKQLFVEQHKHYLDEIIEQISEFSKRVILADANLDKVLSAYNKHRDKPIREQAENIIHLFTLTNLGAPAAFKYFDTTIDRKRYTSTKEVLDATLIHQSITGLYETRIDLSQLGGDGGPAPGSSGGTLNIEDEYRLHETSKEPDVPLGSTWLSDFPQAWAETGGMGLAVRQAPLIIPLKATSTPVSIKQYPMSQEARLGIKPHIQRLLDQGILVPCQSPWNTPLLPVKKPGTNDYRPVQDLREVNKRVEDIHPTVPNPYNLLSGLPPSHQWYTVLDLKDAFFCLRLHPTSQPLFAFEWRDPEMGISGQLTWTRLPQGFKNSPTLFNEALHRDLADFRIQHPDLILLQYVDDLLLAATSEQDCQRGTRALLQTLGNLGYRASAKKAQICQKQVKYLGYLLKEGQRWLTEARKETVMGQPTPKTPRQLREFLGTAGFCRLWIPGFAEMAAPLYPLTKPGTLFNWGPDQQKAYQEIKQALLTAPALGLPDLTKPFELFVDEKQGYAKGVLTQKLGPWRRPVAYLSKKLDPVAAGWPPCLRMVAAIAVLTKDAGKLTMGQPLVILAPHAVEALVKQPPDRWLSNARMTHYQAMLLDTDRVQFGPVVALNPATLLPLPEKEAPHDCLEILAETHGTRPDLTDQPIPDADYTWYTDGSSFLQEGQRRAGAAVTTETEVIWARALPAGTSAQRAELIALTQALKMAEGKKLNVYTDSRYAFATAHVHGEIYRRRGWLTSEGREIKNKNEILALLKALFLPKRLSIIHCPGHQKGNSAEARGNRMADQAAREAAMKAVLETSTLLAGKRTADGSEFEKRTADGSEFESPKKKAKVE

SEQ ID NO: 991 - protein, 2095 aa, synthetic construct
MPAAKRVKLDGGDKKYSIGLDIGTNSVGWAVITDEYKVPSKKFKVLGNTDRHSIKKNLIGALLFDSGETAEATRLKRTARRRYTRRKNRICYLQEIFSNEMAKVDDSFFHRLEESFLVEEDKKHERHPIFGNIVDEVAYHEKYPTIYHLRKKLVDSTDKADLRLIYLALAHMIKFRGHFLIEGDLNPDNSDVDKLFIQLVQTYNQLFEENPINASGVDAKAILSARLSKSRRLENLIAQLPGEKKNGLFGNLIALSLGLTPNFKSNFDLAEDAKLQLSKDTYDDDLDNLLAQIGDQYADLFLAAKNLSDAILLSDILRVNTEITKAPLSASMIKRYDEHHQDLTLLKALVRQQLPEKYKEIFFDQSKNGYAGYIDGGASQEEFYKFIKPILEKMDGTEELLVKLNREDLLRKQRTFDNGSIPHQIHLGELHAILRRQEDFYPFLKDNREKIEKILTFRIPYYVGPLARGNSRFAWMTRKSEETITPWNFEEVVDKGASAQSFIERMTNFDKNLPNEKVLPKHSLLYEYFTVYNELTKVKYVTEGMRKPAFLSGEQKKAIVDLLFKTNRKVTVKQLKEDYFKKIECFDSVEISGVEDRFNASLGTYHDLLKIIKDKDFLDNEENEDILEDIVLTLTLFEDREMIEERLKTYAHLFDDKVMKQLKRRRYTGWGRLSRKLINGIRDKQSGKTILDFLKSDGFANRNFMQLIHDDSLTFKEDIQKAQVSGQGDSLHEHIANLAGSPAIKKGILQTVKVVDELVKVMGRHKPENIVIEMARENQTTQKGQKNSRERMKRIEEGIKELGSQILKEHPVENTQLQNEKLYLYYLQNGRDMYVDQELDINRLSDYDVDHIVPQSFLKDDSIDNKVLTRSDKARGKSDNVPSEEVVKKMKNYWRQLLNAKLITQRKFDNLTKAERGGLSELDKAGFIKRQLVETRQITKHVAQILDSRMNTKYDENDKLIREVKVITLKSKLVSDFRKDFQFYKVREINNYHHAHDAYLNAVVGTALIKKYPKLESEFVYGDYKVYDVRKMIAKSEQEIGKATAKYFFYSNIMNFFKTEITLANGEIRKRPLIETNGETGEIVWDKGRDFATVRKVLSMPQVNIVKKTEVQTGGFSKESILPKRNSDKLIARKKDWDPKKYGGFDSPTVAYSVLVVAKVEKGKSKKLKSVKELLGITIMERSSFEKNPIDFLEAKGYKEVKKDLIIKLPKYSLFELENGRKRMLASAGELQKGNELALPSKYVNFLYLASHYEKLKGSPEDNEQKQLFVEQHKHYLDEIIEQISEFSKRVILADANLDKVLSAYNKHRDKPIREQAENIIHLFTLTNLGAPAAFKYFDTTIDRKRYTSTKEVLDATLIHQSITGLYETRIDLSQLGGDGGEAAAKEAAAKGGTLNIEDEYRLHETSKEPDVPLGSTWLSDFPQAWAETGGMGLAVRQAPLIIPLKATSTPVSIKQYPMSQEARLGIKPHIQRLLDQGILVPCQSPWNTPLLPVKKPGTNDYRPVQDLREVNKRVEDIHPTVPNPYNLLSGLPPSHQWYTVLDLKDAFFCLRLHPTSQPLFAFEWRDPEMGISGQLTWTRLPQGFKNSPTLFNEALHRDLADFRIQHPDLILLQYVDDLLLAATSEQDCQRGTRALLQTLGNLGYRASAKKAQICQKQVKYLGYLLKEGQRWLTEARKETVMGQPTPKTPRQLREFLGTAGFCRLWIPGFAEMAAPLYPLTKPGTLFNWGPDQQKAYQEIKQALLTAPALGLPDLTKPFELFVDEKQGYAKGVLTQKLGPWRRPVAYLSKKLDPVAAGWPPCLRMVAAIAVLTKDAGKLTMGQPLVILAPHAVEALVKQPPDRWLSNARMTHYQAMLLDTDRVQFGPVVALNPATLLPLPEKEAPHDCLEILAETHGTRPDLTDQPIPDADYTWYTDGSSFLQEGQRRAGAAVTTETEVIWARALPAGTSAQRAELIALTQALKMAEGKKLNVYTDSRYAFATAHVHGEIYRRRGWLTSEGREIKNKNEILALLKALFLPKRLSIIHCPGHQKGNSAEARGNRMADQAAREAAMKAVLETSTLLAGKRTADGSEFEKRTADGSEFESPKKKAKVE

SEQ ID NO: 992 - protein, 2091 aa, synthetic construct
MPAAKRVKLDGGDKKYSIGLDIGTNSVGWAVITDEYKVPSKKFKVLGNTDRHSIKKNLIGALLFDSGETAEATRLKRTARRRYTRRKNRICYLQEIFSNEMAKVDDSFFHRLEESFLVEEDKKHERHPIFGNIVDEVAYHEKYPTIYHLRKKLVDSTDKADLRLIYLALAHMIKFRGHFLIEGDLNPDNSDVDKLFIQLVQTYNQLFEENPINASGVDAKAILSARLSKSRRLENLIAQLPGEKKNGLFGNLIALSLGLTPNFKSNFDLAEDAKLQLSKDTYDDDLDNLLAQIGDQYADLFLAAKNLSDAILLSDILRVNTEITKAPLSASMIKRYDEHHQDLTLLKALVRQQLPEKYKEIFFDQSKNGYAGYIDGGASQEEFYKFIKPILEKMDGTEELLVKLNREDLLRKQRTFDNGSIPHQIHLGELHAILRRQEDFYPFLKDNREKIEKILTFRIPYYVGPLARGNSRFAWMTRKSEETITPWNFEEVVDKGASAQSFIERMTNFDKNLPNEKVLPKHSLLYEYFTVYNELTKVKYVTEGMRKPAFLSGEQKKAIVDLLFKTNRKVTVKQLKEDYFKKIECFDSVEISGVEDRFNASLGTYHDLLKIIKDKDFLDNEENEDILEDIVLTLTLFEDREMIEERLKTYAHLFDDKVMKQLKRRRYTGWGRLSRKLINGIRDKQSGKTILDFLKSDGFANRNFMQLIHDDSLTFKEDIQKAQVSGQGDSLHEHIANLAGSPAIKKGILQTVKVVDELVKVMGRHKPENIVIEMARENQTTQKGQKNSRERMKRIEEGIKELGSQILKEHPVENTQLQNEKLYLYYLQNGRDMYVDQELDINRLSDYDVDHIVPQSFLKDDSIDNKVLTRSDKARGKSDNVPSEEVVKKMKNYWRQLLNAKLITQRKFDNLTKAERGGLSELDKAGFIKRQLVETRQITKHVAQILDSRMNTKYDENDKLIREVKVITLKSKLVSDFRKDFQFYKVREINNYHHAHDAYLNAVVGTALIKKYPKLESEFVYGDYKVYDVRKMIAKSEQEIGKATAKYFFYSNIMNFFKTEITLANGEIRKRPLIETNGETGEIVWDKGRDFATVRKVLSMPQVNIVKKTEVQTGGFSKESILPKRNSDKLIARKKDWDPKKYGGFDSPTVAYSVLVVAKVEKGKSKKLKSVKELLGITIMERSSFEKNPIDFLEAKGYKEVKKDLIIKLPKYSLFELENGRKRMLASAGELQKGNELALPSKYVNFLYLASHYEKLKGSPEDNEQKQLFVEQHKHYLDEIIEQISEFSKRVILADANLDKVLSAYNKHRDKPIREQAENIIHLFTLTNLGAPAAFKYFDTTIDRKRYTSTKEVLDATLIHQSITGLYETRIDLSQLGGDGGGSSGGGGGTLNIEDEYRLHETSKEPDVPLGSTWLSDFPQAWAETGGMGLAVRQAPLIIPLKATSTPVSIKQYPMSQEARLGIKPHIQRLLDQGILVPCQSPWNTPLLPVKKPGTNDYRPVQDLREVNKRVEDIHPTVPNPYNLLSGLPPSHQWYTVLDLKDAFFCLRLHPTSQPLFAFEWRDPEMGISGQLTWTRLPQGFKNSPTLFNEALHRDLADFRIQHPDLILLQYVDDLLLAATSEQDCQRGTRALLQTLGNLGYRASAKKAQICQKQVKYLGYLLKEGQRWLTEARKETVMGQPTPKTPRQLREFLGTAGFCRLWIPGFAEMAAPLYPLTKPGTLFNWGPDQQKAYQEIKQALLTAPALGLPDLTKPFELFVDEKQGYAKGVLTQKLGPWRRPVAYLSKKLDPVAAGWPPCLRMVAAIAVLTKDAGKLTMGQPLVILAPHAVEALVKQPPDRWLSNARMTHYQAMLLDTDRVQFGPVVALNPATLLPLPEKEAPHDCLEILAETHGTRPDLTDQPIPDADYTWYTDGSSFLQEGQRRAGAAVTTETEVIWARALPAGTSAQRAELIALTQALKMAEGKKLNVYTDSRYAFATAHVHGEIYRRRGWLTSEGREIKNKNEILALLKALFLPKRLSIIHCPGHQKGNSAEARGNRMADQAAREAAMKAVLETSTLLAGKRTADGSEFEKRTADGSEFESPKKKAKVE

SEQ ID NO: 993 - protein, 2093 aa, synthetic construct
MPAAKRVKLDGGDKKYSIGLDIGTNSVGWAVITDEYKVPSKKFKVLGNTDRHSIKKNLIGALLFDSGETAEATRLKRTARRRYTRRKNRICYLQEIFSNEMAKVDDSFFHRLEESFLVEEDKKHERHPIFGNIVDEVAYHEKYPTIYHLRKKLVDSTDKADLRLIYLALAHMIKFRGHFLIEGDLNPDNSDVDKLFIQLVQTYNQLFEENPINASGVDAKAILSARLSKSRRLENLIAQLPGEKKNGLFGNLIALSLGLTPNFKSNFDLAEDAKLQLSKDTYDDDLDNLLAQIGDQYADLFLAAKNLSDAILLSDILRVNTEITKAPLSASMIKRYDEHHQDLTLLKALVRQQLPEKYKEIFFDQSKNGYAGYIDGGASQEEFYKFIKPILEKMDGTEELLVKLNREDLLRKQRTFDNGSIPHQIHLGELHAILRRQEDFYPFLKDNREKIEKILTFRIPYYVGPLARGNSRFAWMTRKSEETITPWNFEEVVDKGASAQSFIERMTNFDKNLPNEKVLPKHSLLYEYFTVYNELTKVKYVTEGMRKPAFLSGEQKKAIVDLLFKTNRKVTVKQLKEDYFKKIECFDSVEISGVEDRFNASLGTYHDLLKIIKDKDFLDNEENEDILEDIVLTLTLFEDREMIEERLKTYAHLFDDKVMKQLKRRRYTGWGRLSRKLINGIRDKQSGKTILDFLKSDGFANRNFMQLIHDDSLTFKEDIQKAQVSGQGDSLHEHIANLAGSPAIKKGILQTVKVVDELVKVMGRHKPENIVIEMARENQTTQKGQKNSRERMKRIEEGIKELGSQILKEHPVENTQLQNEKLYLYYLQNGRDMYVDQELDINRLSDYDVDHIVPQSFLKDDSIDNKVLTRSDKARGKSDNVPSEEVVKKMKNYWRQLLNAKLITQRKFDNLTKAERGGLSELDKAGFIKRQLVETRQITKHVAQILDSRMNTKYDENDKLIREVKVITLKSKLVSDFRKDFQFYKVREINNYHHAHDAYLNAVVGTALIKKYPKLESEFVYGDYKVYDVRKMIAKSEQEIGKATAKYFFYSNIMNFFKTEITLANGEIRKRPLIETNGETGEIVWDKGRDFATVRKVLSMPQVNIVKKTEVQTGGFSKESILPKRNSDKLIARKKDWDPKKYGGFDSPTVAYSVLVVAKVEKGKSKKLKSVKELLGITIMERSSFEKNPIDFLEAKGYKEVKKDLIIKLPKYSLFELENGRKRMLASAGELQKGNELALPSKYVNFLYLASHYEKLKGSPEDNEQKQLFVEQHKHYLDEIIEQISEFSKRVILADANLDKVLSAYNKHRDKPIREQAENIIHLFTLTNLGAPAAFKYFDTTIDRKRYTSTKEVLDATLIHQSITGLYETRIDLSQLGGDGGGGSEAAAKGGTLNIEDEYRLHETSKEPDVPLGSTWLSDFPQAWAETGGMGLAVRQAPLIIPLKATSTPVSIKQYPMSQEARLGIKPHIQRLLDQGILVPCQSPWNTPLLPVKKPGTNDYRPVQDLREVNKRVEDIHPTVPNPYNLLSGLPPSHQWYTVLDLKDAFFCLRLHPTSQPLFAFEWRDPEMGISGQLTWTRLPQGFKNSPTLFNEALHRDLADFRIQHPDLILLQYVDDLLLAATSEQDCQRGTRALLQTLGNLGYRASAKKAQICQKQVKYLGYLLKEGQRWLTEARKETVMGQPTPKTPRQLREFLGTAGFCRLWIPGFAEMAAPLYPLTKPGTLFNWGPDQQKAYQEIKQALLTAPALGLPDLTKPFELFVDEKQGYAKGVLTQKLGPWRRPVAYLSKKLDPVAAGWPPCLRMVAAIAVLTKDAGKLTMGQPLVILAPHAVEALVKQPPDRWLSNARMTHYQAMLLDTDRVQFGPVVALNPATLLPLPEKEAPHDCLEILAETHGTRPDLTDQPIPDADYTWYTDGSSFLQEGQRRAGAAVTTETEVIWARALPAGTSAQRAELIALTQALKMAEGKKLNVYTDSRYAFATAHVHGEIYRRRGWLTSEGREIKNKNEILALLKALFLPKRLSIIHCPGHQKGNSAEARGNRMADQAAREAAMKAVLETSTLLAGKRTADGSEFEKRTADGSEFESPKKKAKVE

SEQ ID NO: 994 - protein, 2100 aa, synthetic construct
MPAAKRVKLDGGDKKYSIGLDIGTNSVGWAVITDEYKVPSKKFKVLGNTDRHSIKKNLIGALLFDSGETAEATRLKRTARRRYTRRKNRICYLQEIFSNEMAKVDDSFFHRLEESFLVEEDKKHERHPIFGNIVDEVAYHEKYPTIYHLRKKLVDSTDKADLRLIYLALAHMIKFRGHFLIEGDLNPDNSDVDKLFIQLVQTYNQLFEENPINASGVDAKAILSARLSKSRRLENLIAQLPGEKKNGLFGNLIALSLGLTPNFKSNFDLAEDAKLQLSKDTYDDDLDNLLAQIGDQYADLFLAAKNLSDAILLSDILRVNTEITKAPLSASMIKRYDEHHQDLTLLKALVRQQLPEKYKEIFFDQSKNGYAGYIDGGASQEEFYKFIKPILEKMDGTEELLVKLNREDLLRKQRTFDNGSIPHQIHLGELHAILRRQEDFYPFLKDNREKIEKILTFRIPYYVGPLARGNSRFAWMTRKSEETITPWNFEEVVDKGASAQSFIERMTNFDKNLPNEKVLPKHSLLYEYFTVYNELTKVKYVTEGMRKPAFLSGEQKKAIVDLLFKTNRKVTVKQLKEDYFKKIECFDSVEISGVEDRFNASLGTYHDLLKIIKDKDFLDNEENEDILEDIVLTLTLFEDREMIEERLKTYAHLFDDKVMKQLKRRRYTGWGRLSRKLINGIRDKQSGKTILDFLKSDGFANRNFMQLIHDDSLTFKEDIQKAQVSGQGDSLHEHIANLAGSPAIKKGILQTVKVVDELVKVMGRHKPENIVIEMARENQTTQKGQKNSRERMKRIEEGIKELGSQILKEHPVENTQLQNEKLYLYYLQNGRDMYVDQELDINRLSDYDVDHIVPQSFLKDDSIDNKVLTRSDKARGKSDNVPSEEVVKKMKNYWRQLLNAKLITQRKFDNLTKAERGGLSELDKAGFIKRQLVETRQITKHVAQILDSRMNTKYDENDKLIREVKVITLKSKLVSDFRKDFQFYKVREINNYHHAHDAYLNAVVGTALIKKYPKLESEFVYGDYKVYDVRKMIAKSEQEIGKATAKYFFYSNIMNFFKTEITLANGEIRKRPLIETNGETGEIVWDKGRDFATVRKVLSMPQVNIVKKTEVQTGGFSKESILPKRNSDKLIARKKDWDPKKYGGFDSPTVAYSVLVVAKVEKGKSKKLKSVKELLGITIMERSSFEKNPIDFLEAKGYKEVKKDLIIKLPKYSLFELENGRKRMLASAGELQKGNELALPSKYVNFLYLASHYEKLKGSPEDNEQKQLFVEQHKHYLDEIIEQISEFSKRVILADANLDKVLSAYNKHRDKPIREQAENIIHLFTLTNLGAPAAFKYFDTTIDRKRYTSTKEVLDATLIHQSITGLYETRIDLSQLGGDGGGGSGGSGGSGGSGGSGGTLNIEDEYRLHETSKEPDVPLGSTWLSDFPQAWAETGGMGLAVRQAPLIIPLKATSTPVSIKQYPMSQEARLGIKPHIQRLLDQGILVPCQSPWNTPLLPVKKPGTNDYRPVQDLREVNKRVEDIHPTVPNPYNLLSGLPPSHQWYTVLDLKDAFFCLRLHPTSQPLFAFEWRDPEMGISGQLTWTRLPQGFKNSPTLFNEALHRDLADFRIQHPDLILLQYVDDLLLAATSEQDCQRGTRALLQTLGNLGYRASAKKAQICQKQVKYLGYLLKEGQRWLTEARKETVMGQPTPKTPRQLREFLGTAGFCRLWIPGFAEMAAPLYPLTKPGTLFNWGPDQQKAYQEIKQALLTAPALGLPDLTKPFELFVDEKQGYAKGVLTQKLGPWRRPVAYLSKKLDPVAAGWPPCLRMVAAIAVLTKDAGKLTMGQPLVILAPHAVEALVKQPPDRWLSNARMTHYQAMLLDTDRVQFGPVVALNPATLLPLPEKEAPHDCLEILAETHGTRPDLTDQPIPDADYTWYTDGSSFLQEGQRRAGAAVTTETEVIWARALPAGTSAQRAELIALTQALKMAEGKKLNVYTDSRYAFATAHVHGEIYRRRGWLTSEGREIKNKNEILALLKALFLPKRLSIIHCPGHQKGNSAEARGNRMADQAAREAAMKAVLETSTLLAGKRTADGSEFEKRTADGSEFESPKKKAKVE

SEQ ID NO: 995 - protein, 2094 aa, synthetic construct
MPAAKRVKLDGGDKKYSIGLDIGTNSVGWAVITDEYKVPSKKFKVLGNTDRHSIKKNLIGALLFDSGETAEATRLKRTARRRYTRRKNRICYLQEIFSNEMAKVDDSFFHRLEESFLVEEDKKHERHPIFGNIVDEVAYHEKYPTIYHLRKKLVDSTDKADLRLIYLALAHMIKFRGHFLIEGDLNPDNSDVDKLFIQLVQTYNQLFEENPINASGVDAKAILSARLSKSRRLENLIAQLPGEKKNGLFGNLIALSLGLTPNFKSNFDLAEDAKLQLSKDTYDDDLDNLLAQIGDQYADLFLAAKNLSDAILLSDILRVNTEITKAPLSASMIKRYDEHHQDLTLLKALVRQQLPEKYKEIFFDQSKNGYAGYIDGGASQEEFYKFIKPILEKMDGTEELLVKLNREDLLRKQRTFDNGSIPHQIHLGELHAILRRQEDFYPFLKDNREKIEKILTFRIPYYVGPLARGNSRFAWMTRKSEETITPWNFEEVVDKGASAQSFIERMTNFDKNLPNEKVLPKHSLLYEYFTVYNELTKVKYVTEGMRKPAFLSGEQKKAIVDLLFKTNRKVTVKQLKEDYFKKIECFDSVEISGVEDRFNASLGTYHDLLKIIKDKDFLDNEENEDILEDIVLTLTLFEDREMIEERLKTYAHLFDDKVMKQLKRRRYTGWGRLSRKLINGIRDKQSGKTILDFLKSDGFANRNFMQLIHDDSLTFKEDIQKAQVSGQGDSLHEHIANLAGSPAIKKGILQTVKVVDELVKVMGRHKPENIVIEMARENQTTQKGQKNSRERMKRIEEGIKELGSQILKEHPVENTQLQNEKLYLYYLQNGRDMYVDQELDINRLSDYDVDHIVPQSFLKDDSIDNKVLTRSDKARGKSDNVPSEEVVKKMKNYWRQLLNAKLITQRKFDNLTKAERGGLSELDKAGFIKRQLVETRQITKHVAQILDSRMNTKYDENDKLIREVKVITLKSKLVSDFRKDFQFYKVREINNYHHAHDAYLNAVVGTALIKKYPKLESEFVYGDYKVYDVRKMIAKSEQEIGKATAKYFFYSNIMNFFKTEITLANGEIRKRPLIETNGETGEIVWDKGRDFATVRKVLSMPQVNIVKKTEVQTGGFSKESILPKRNSDKLIARKKDWDPKKYGGFDSPTVAYSVLVVAKVEKGKSKKLKSVKELLGITIMERSSFEKNPIDFLEAKGYKEVKKDLIIKLPKYSLFELENGRKRMLASAGELQKGNELALPSKYVNFLYLASHYEKLKGSPEDNEQKQLFVEQHKHYLDEIIEQISEFSKRVILADANLDKVLSAYNKHRDKPIREQAENIIHLFTLTNLGAPAAFKYFDTTIDRKRYTSTKEVLDATLIHQSITGLYETRIDLSQLGGDGGGGSGSSGGGGGTLNIEDEYRLHETSKEPDVPLGSTWLSDFPQAWAETGGMGLAVRQAPLIIPLKATSTPVSIKQYPMSQEARLGIKPHIQRLLDQGILVPCQSPWNTPLLPVKKPGTNDYRPVQDLREVNKRVEDIHPTVPNPYNLLSGLPPSHQWYTVLDLKDAFFCLRLHPTSQPLFAFEWRDPEMGISGQLTWTRLPQGFKNSPTLFNEALHRDLADFRIQHPDLILLQYVDDLLLAATSEQDCQRGTRALLQTLGNLGYRASAKKAQICQKQVKYLGYLLKEGQRWLTEARKETVMGQPTPKTPRQLREFLGTAGFCRLWIPGFAEMAAPLYPLTKPGTLFNWGPDQQKAYQEIKQALLTAPALGLPDLTKPFELFVDEKQGYAKGVLTQKLGPWRRPVAYLSKKLDPVAAGWPPCLRMVAAIAVLTKDAGKLTMGQPLVILAPHAVEALVKQPPDRWLSNARMTHYQAMLLDTDRVQFGPVVALNPATLLPLPEKEAPHDCLEILAETHGTRPDLTDQPIPDADYTWYTDGSSFLQEGQRRAGAAVTTETEVIWARALPAGTSAQRAELIALTQALKMAEGKKLNVYTDSRYAFATAHVHGEIYRRRGWLTSEGREIKNKNEILALLKALFLPKRLSIIHCPGHQKGNSAEARGNRMADQAAREAAMKAVLETSTLLAGKRTADGSEFEKRTADGSEFESPKKKAKVE

SEQ ID NO: 996 - protein, 2100 aa, synthetic construct
MPAAKRVKLDGGDKKYSIGLDIGTNSVGWAVITDEYKVPSKKFKVLGNTDRHSIKKNLIGALLFDSGETAEATRLKRTARRRYTRRKNRICYLQEIFSNEMAKVDDSFFHRLEESFLVEEDKKHERHPIFGNIVDEVAYHEKYPTIYHLRKKLVDSTDKADLRLIYLALAHMIKFRGHFLIEGDLNPDNSDVDKLFIQLVQTYNQLFEENPINASGVDAKAILSARLSKSRRLENLIAQLPGEKKNGLFGNLIALSLGLTPNFKSNFDLAEDAKLQLSKDTYDDDLDNLLAQIGDQYADLFLAAKNLSDAILLSDILRVNTEITKAPLSASMIKRYDEHHQDLTLLKALVRQQLPEKYKEIFFDQSKNGYAGYIDGGASQEEFYKFIKPILEKMDGTEELLVKLNREDLLRKQRTFDNGSIPHQIHLGELHAILRRQEDFYPFLKDNREKIEKILTFRIPYYVGPLARGNSRFAWMTRKSEETITPWNFEEVVDKGASAQSFIERMTNFDKNLPNEKVLPKHSLLYEYFTVYNELTKVKYVTEGMRKPAFLSGEQKKAIVDLLFKTNRKVTVKQLKEDYFKKIECFDSVEISGVEDRFNASLGTYHDLLKIIKDKDFLDNEENEDILEDIVLTLTLFEDREMIEERLKTYAHLFDDKVMKQLKRRRYTGWGRLSRKLINGIRDKQSGKTILDFLKSDGFANRNFMQLIHDDSLTFKEDIQKAQVSGQGDSLHEHIANLAGSPAIKKGILQTVKVVDELVKVMGRHKPENIVIEMARENQTTQKGQKNSRERMKRIEEGIKELGSQILKEHPVENTQLQNEKLYLYYLQNGRDMYVDQELDINRLSDYDVDHIVPQSFLKDDSIDNKVLTRSDKARGKSDNVPSEEVVKKMKNYWRQLLNAKLITQRKFDNLTKAERGGLSELDKAGFIKRQLVETRQITKHVAQILDSRMNTKYDENDKLIREVKVITLKSKLVSDFRKDFQFYKVREINNYHHAHDAYLNAVVGTALIKKYPKLESEFVYGDYKVYDVRKMIAKSEQEIGKATAKYFFYSNIMNFFKTEITLANGEIRKRPLIETNGETGEIVWDKGRDFATVRKVLSMPQVNIVKKTEVQTGGFSKESILPKRNSDKLIARKKDWDPKKYGGFDSPTVAYSVLVVAKVEKGKSKKLKSVKELLGITIMERSSFEKNPIDFLEAKGYKEVKKDLIIKLPKYSLFELENGRKRMLASAGELQKGNELALPSKYVNFLYLASHYEKLKGSPEDNEQKQLFVEQHKHYLDEIIEQISEFSKRVILADANLDKVLSAYNKHRDKPIREQAENIIHLFTLTNLGAPAAFKYFDTTIDRKRYTSTKEVLDATLIHQSITGLYETRIDLSQLGGDGGEAAAKEAAAKEAAAKGGTLNIEDEYRLHETSKEPDVPLGSTWLSDFPQAWAETGGMGLAVRQAPLIIPLKATSTPVSIKQYPMSQEARLGIKPHIQRLLDQGILVPCQSPWNTPLLPVKKPGTNDYRPVQDLREVNKRVEDIHPTVPNPYNLLSGLPPSHQWYTVLDLKDAFFCLRLHPTSQPLFAFEWRDPEMGISGQLTWTRLPQGFKNSPTLFNEALHRDLADFRIQHPDLILLQYVDDLLLAATSEQDCQRGTRALLQTLGNLGYRASAKKAQICQKQVKYLGYLLKEGQRWLTEARKETVMGQPTPKTPRQLREFLGTAGFCRLWIPGFAEMAAPLYPLTKPGTLFNWGPDQQKAYQEIKQALLTAPALGLPDLTKPFELFVDEKQGYAKGVLTQKLGPWRRPVAYLSKKLDPVAAGWPPCLRMVAAIAVLTKDAGKLTMGQPLVILAPHAVEALVKQPPDRWLSNARMTHYQAMLLDTDRVQFGPVVALNPATLLPLPEKEAPHDCLEILAETHGTRPDLTDQPIPDADYTWYTDGSSFLQEGQRRAGAAVTTETEVIWARALPAGTSAQRAELIALTQALKMAEGKKLNVYTDSRYAFATAHVHGEIYRRRGWLTSEGREIKNKNEILALLKALFLPKRLSIIHCPGHQKGNSAEARGNRMADQAAREAAMKAVLETSTLLAGKRTADGSEFEKRTADGSEFESPKKKAKVE

SEQ ID NO: 997 - protein, 2088 aa, synthetic construct
MPAAKRVKLDGGDKKYSIGLDIGTNSVGWAVITDEYKVPSKKFKVLGNTDRHSIKKNLIGALLFDSGETAEATRLKRTARRRYTRRKNRICYLQEIFSNEMAKVDDSFFHRLEESFLVEEDKKHERHPIFGNIVDEVAYHEKYPTIYHLRKKLVDSTDKADLRLIYLALAHMIKFRGHFLIEGDLNPDNSDVDKLFIQLVQTYNQLFEENPINASGVDAKAILSARLSKSRRLENLIAQLPGEKKNGLFGNLIALSLGLTPNFKSNFDLAEDAKLQLSKDTYDDDLDNLLAQIGDQYADLFLAAKNLSDAILLSDILRVNTEITKAPLSASMIKRYDEHHQDLTLLKALVRQQLPEKYKEIFFDQSKNGYAGYIDGGASQEEFYKFIKPILEKMDGTEELLVKLNREDLLRKQRTFDNGSIPHQIHLGELHAILRRQEDFYPFLKDNREKIEKILTFRIPYYVGPLARGNSRFAWMTRKSEETITPWNFEEVVDKGASAQSFIERMTNFDKNLPNEKVLPKHSLLYEYFTVYNELTKVKYVTEGMRKPAFLSGEQKKAIVDLLFKTNRKVTVKQLKEDYFKKIECFDSVEISGVEDRFNASLGTYHDLLKIIKDKDFLDNEENEDILEDIVLTLTLFEDREMIEERLKTYAHLFDDKVMKQLKRRRYTGWGRLSRKLINGIRDKQSGKTILDFLKSDGFANRNFMQLIHDDSLTFKEDIQKAQVSGQGDSLHEHIANLAGSPAIKKGILQTVKVVDELVKVMGRHKPENIVIEMARENQTTQKGQKNSRERMKRIEEGIKELGSQILKEHPVENTQLQNEKLYLYYLQNGRDMYVDQELDINRLSDYDVDHIVPQSFLKDDSIDNKVLTRSDKARGKSDNVPSEEVVKKMKNYWRQLLNAKLITQRKFDNLTKAERGGLSELDKAGFIKRQLVETRQITKHVAQILDSRMNTKYDENDKLIREVKVITLKSKLVSDFRKDFQFYKVREINNYHHAHDAYLNAVVGTALIKKYPKLESEFVYGDYKVYDVRKMIAKSEQEIGKATAKYFFYSNIMNFFKTEITLANGEIRKRPLIETNGETGEIVWDKGRDFATVRKVLSMPQVNIVKKTEVQTGGFSKESILPKRNSDKLIARKKDWDPKKYGGFDSPTVAYSVLVVAKVEKGKSKKLKSVKELLGITIMERSSFEKNPIDFLEAKGYKEVKKDLIIKLPKYSLFELENGRKRMLASAGELQKGNELALPSKYVNFLYLASHYEKLKGSPEDNEQKQLFVEQHKHYLDEIIEQISEFSKRVILADANLDKVLSAYNKHRDKPIREQAENIIHLFTLTNLGAPAAFKYFDTTIDRKRYTSTKEVLDATLIHQSITGLYETRIDLSQLGGDGGGGGGGTLNIEDEYRLHETSKEPDVPLGSTWLSDFPQAWAETGGMGLAVRQAPLIIPLKATSTPVSIKQYPMSQEARLGIKPHIQRLLDQGILVPCQSPWNTPLLPVKKPGTNDYRPVQDLREVNKRVEDIHPTVPNPYNLLSGLPPSHQWYTVLDLKDAFFCLRLHPTSQPLFAFEWRDPEMGISGQLTWTRLPQGFKNSPTLFNEALHRDLADFRIQHPDLILLQYVDDLLLAATSEQDCQRGTRALLQTLGNLGYRASAKKAQICQKQVKYLGYLLKEGQRWLTEARKETVMGQPTPKTPRQLREFLGTAGFCRLWIPGFAEMAAPLYPLTKPGTLFNWGPDQQKAYQEIKQALLTAPALGLPDLTKPFELFVDEKQGYAKGVLTQKLGPWRRPVAYLSKKLDPVAAGWPPCLRMVAAIAVLTKDAGKLTMGQPLVILAPHAVEALVKQPPDRWLSNARMTHYQAMLLDTDRVQFGPVVALNPATLLPLPEKEAPHDCLEILAETHGTRPDLTDQPIPDADYTWYTDGSSFLQEGQRRAGAAVTTETEVIWARALPAGTSAQRAELIALTQALKMAEGKKLNVYTDSRYAFATAHVHGEIYRRRGWLTSEGREIKNKNEILALLKALFLPKRLSIIHCPGHQKGNSAEARGNRMADQAAREAAMKAVLETSTLLAGKRTADGSEFEKRTADGSEFESPKKKAKVE

SEQ ID NO: 998 - protein, 2090 aa, synthetic construct
MPAAKRVKLDGGDKKYSIGLDIGTNSVGWAVITDEYKVPSKKFKVLGNTDRHSIKKNLIGALLFDSGETAEATRLKRTARRRYTRRKNRICYLQEIFSNEMAKVDDSFFHRLEESFLVEEDKKHERHPIFGNIVDEVAYHEKYPTIYHLRKKLVDSTDKADLRLIYLALAHMIKFRGHFLIEGDLNPDNSDVDKLFIQLVQTYNQLFEENPINASGVDAKAILSARLSKSRRLENLIAQLPGEKKNGLFGNLIALSLGLTPNFKSNFDLAEDAKLQLSKDTYDDDLDNLLAQIGDQYADLFLAAKNLSDAILLSDILRVNTEITKAPLSASMIKRYDEHHQDLTLLKALVRQQLPEKYKEIFFDQSKNGYAGYIDGGASQEEFYKFIKPILEKMDGTEELLVKLNREDLLRKQRTFDNGSIPHQIHLGELHAILRRQEDFYPFLKDNREKIEKILTFRIPYYVGPLARGNSRFAWMTRKSEETITPWNFEEVVDKGASAQSFIERMTNFDKNLPNEKVLPKHSLLYEYFTVYNELTKVKYVTEGMRKPAFLSGEQKKAIVDLLFKTNRKVTVKQLKEDYFKKIECFDSVEISGVEDRFNASLGTYHDLLKIIKDKDFLDNEENEDILEDIVLTLTLFEDREMIEERLKTYAHLFDDKVMKQLKRRRYTGWGRLSRKLINGIRDKQSGKTILDFLKSDGFANRNFMQLIHDDSLTFKEDIQKAQVSGQGDSLHEHIANLAGSPAIKKGILQTVKVVDELVKVMGRHKPENIVIEMARENQTTQKGQKNSRERMKRIEEGIKELGSQILKEHPVENTQLQNEKLYLYYLQNGRDMYVDQELDINRLSDYDVDHIVPQSFLKDDSIDNKVLTRSDKARGKSDNVPSEEVVKKMKNYWRQLLNAKLITQRKFDNLTKAERGGLSELDKAGFIKRQLVETRQITKHVAQILDSRMNTKYDENDKLIREVKVITLKSKLVSDFRKDFQFYKVREINNYHHAHDAYLNAVVGTALIKKYPKLESEFVYGDYKVYDVRKMIAKSEQEIGKATAKYFFYSNIMNFFKTEITLANGEIRKRPLIETNGETGEIVWDKGRDFATVRKVLSMPQVNIVKKTEVQTGGFSKESILPKRNSDKLIARKKDWDPKKYGGFDSPTVAYSVLVVAKVEKGKSKKLKSVKELLGITIMERSSFEKNPIDFLEAKGYKEVKKDLIIKLPKYSLFELENGRKRMLASAGELQKGNELALPSKYVNFLYLASHYEKLKGSPEDNEQKQLFVEQHKHYLDEIIEQISEFSKRVILADANLDKVLSAYNKHRDKPIREQAENIIHLFTLTNLGAPAAFKYFDTTIDRKRYTSTKEVLDATLIHQSITGLYETRIDLSQLGGDGGGGGGSGGTLNIEDEYRLHETSKEPDVPLGSTWLSDFPQAWAETGGMGLAVRQAPLIIPLKATSTPVSIKQYPMSQEARLGIKPHIQRLLDQGILVPCQSPWNTPLLPVKKPGTNDYRPVQDLREVNKRVEDIHPTVPNPYNLLSGLPPSHQWYTVLDLKDAFFCLRLHPTSQPLFAFEWRDPEMGISGQLTWTRLPQGFKNSPTLFNEALHRDLADFRIQHPDLILLQYVDDLLLAATSEQDCQRGTRALLQTLGNLGYRASAKKAQICQKQVKYLGYLLKEGQRWLTEARKETVMGQPTPKTPRQLREFLGTAGFCRLWIPGFAEMAAPLYPLTKPGTLFNWGPDQQKAYQEIKQALLTAPALGLPDLTKPFELFVDEKQGYAKGVLTQKLGPWRRPVAYLSKKLDPVAAGWPPCLRMVAAIAVLTKDAGKLTMGQPLVILAPHAVEALVKQPPDRWLSNARMTHYQAMLLDTDRVQFGPVVALNPATLLPLPEKEAPHDCLEILAETHGTRPDLTDQPIPDADYTWYTDGSSFLQEGQRRAGAAVTTETEVIWARALPAGTSAQRAELIALTQALKMAEGKKLNVYTDSRYAFATAHVHGEIYRRRGWLTSEGREIKNKNEILALLKALFLPKRLSIIHCPGHQKGNSAEARGNRMADQAAREAAMKAVLETSTLLAGKRTADGSEFEKRTADGSEFESPKKKAKVE

SEQ ID NO: 999 - protein, 2094 aa, synthetic construct
MPAAKRVKLDGGDKKYSIGLDIGTNSVGWAVITDEYKVPSKKFKVLGNTDRHSIKKNLIGALLFDSGETAEATRLKRTARRRYTRRKNRICYLQEIFSNEMAKVDDSFFHRLEESFLVEEDKKHERHPIFGNIVDEVAYHEKYPTIYHLRKKLVDSTDKADLRLIYLALAHMIKFRGHFLIEGDLNPDNSDVDKLFIQLVQTYNQLFEENPINASGVDAKAILSARLSKSRRLENLIAQLPGEKKNGLFGNLIALSLGLTPNFKSNFDLAEDAKLQLSKDTYDDDLDNLLAQIGDQYADLFLAAKNLSDAILLSDILRVNTEITKAPLSASMIKRYDEHHQDLTLLKALVRQQLPEKYKEIFFDQSKNGYAGYIDGGASQEEFYKFIKPILEKMDGTEELLVKLNREDLLRKQRTFDNGSIPHQIHLGELHAILRRQEDFYPFLKDNREKIEKILTFRIPYYVGPLARGNSRFAWMTRKSEETITPWNFEEVVDKGASAQSFIERMTNFDKNLPNEKVLPKHSLLYEYFTVYNELTKVKYVTEGMRKPAFLSGEQKKAIVDLLFKTNRKVTVKQLKEDYFKKIECFDSVEISGVEDRFNASLGTYHDLLKIIKDKDFLDNEENEDILEDIVLTLTLFEDREMIEERLKTYAHLFDDKVMKQLKRRRYTGWGRLSRKLINGIRDKQSGKTILDFLKSDGFANRNFMQLIHDDSLTFKEDIQKAQVSGQGDSLHEHIANLAGSPAIKKGILQTVKVVDELVKVMGRHKPENIVIEMARENQTTQKGQKNSRERMKRIEEGIKELGSQILKEHPVENTQLQNEKLYLYYLQNGRDMYVDQELDINRLSDYDVDHIVPQSFLKDDSIDNKVLTRSDKARGKSDNVPSEEVVKKMKNYWRQLLNAKLITQRKFDNLTKAERGGLSELDKAGFIKRQLVETRQITKHVAQILDSRMNTKYDENDKLIREVKVITLKSKLVSDFRKDFQFYKVREINNYHHAHDAYLNAVVGTALIKKYPKLESEFVYGDYKVYDVRKMIAKSEQEIGKATAKYFFYSNIMNFFKTEITLANGEIRKRPLIETNGETGEIVWDKGRDFATVRKVLSMPQVNIVKKTEVQTGGFSKESILPKRNSDKLIARKKDWDPKKYGGFDSPTVAYSVLVVAKVEKGKSKKLKSVKELLGITIMERSSFEKNPIDFLEAKGYKEVKKDLIIKLPKYSLFELENGRKRMLASAGELQKGNELALPSKYVNFLYLASHYEKLKGSPEDNEQKQLFVEQHKHYLDEIIEQISEFSKRVILADANLDKVLSAYNKHRDKPIREQAENIIHLFTLTNLGAPAAFKYFDTTIDRKRYTSTKEVLDATLIHQSITGLYETRIDLSQLGGDGGGGGGGSPAPGGTLNIEDEYRLHETSKEPDVPLGSTWLSDFPQAWAETGGMGLAVRQAPLIIPLKATSTPVSIKQYPMSQEARLGIKPHIQRLLDQGILVPCQSPWNTPLLPVKKPGTNDYRPVQDLREVNKRVEDIHPTVPNPYNLLSGLPPSHQWYTVLDLKDAFFCLRLHPTSQPLFAFEWRDPEMGISGQLTWTRLPQGFKNSPTLFNEALHRDLADFRIQHPDLILLQYVDDLLLAATSEQDCQRGTRALLQTLGNLGYRASAKKAQICQKQVKYLGYLLKEGQRWLTEARKETVMGQPTPKTPRQLREFLGTAGFCRLWIPGFAEMAAPLYPLTKPGTLFNWGPDQQKAYQEIKQALLTAPALGLPDLTKPFELFVDEKQGYAKGVLTQKLGPWRRPVAYLSKKLDPVAAGWPPCLRMVAAIAVLTKDAGKLTMGQPLVILAPHAVEALVKQPPDRWLSNARMTHYQAMLLDTDRVQFGPVVALNPATLLPLPEKEAPHDCLEILAETHGTRPDLTDQPIPDADYTWYTDGSSFLQEGQRRAGAAVTTETEVIWARALPAGTSAQRAELIALTQALKMAEGKKLNVYTDSRYAFATAHVHGEIYRRRGWLTSEGREIKNKNEILALLKALFLPKRLSIIHCPGHQKGNSAEARGNRMADQAAREAAMKAVLETSTLLAGKRTADGSEFEKRTADGSEFESPKKKAKVE

SEQ ID NO: 1000 - protein, 2094 aa, synthetic construct
MPAAKRVKLDGGDKKYSIGLDIGTNSVGWAVITDEYKVPSKKFKVLGNTDRHSIKKNLIGALLFDSGETAEATRLKRTARRRYTRRKNRICYLQEIFSNEMAKVDDSFFHRLEESFLVEEDKKHERHPIFGNIVDEVAYHEKYPTIYHLRKKLVDSTDKADLRLIYLALAHMIKFRGHFLIEGDLNPDNSDVDKLFIQLVQTYNQLFEENPINASGVDAKAILSARLSKSRRLENLIAQLPGEKKNGLFGNLIALSLGLTPNFKSNFDLAEDAKLQLSKDTYDDDLDNLLAQIGDQYADLFLAAKNLSDAILLSDILRVNTEITKAPLSASMIKRYDEHHQDLTLLKALVRQQLPEKYKEIFFDQSKNGYAGYIDGGASQEEFYKFIKPILEKMDGTEELLVKLNREDLLRKQRTFDNGSIPHQIHLGELHAILRRQEDFYPFLKDNREKIEKILTFRIPYYVGPLARGNSRFAWMTRKSEETITPWNFEEVVDKGASAQSFIERMTNFDKNLPNEKVLPKHSLLYEYFTVYNELTKVKYVTEGMRKPAFLSGEQKKAIVDLLFKTNRKVTVKQLKEDYFKKIECFDSVEISGVEDRFNASLGTYHDLLKIIKDKDFLDNEENEDILEDIVLTLTLFEDREMIEERLKTYAHLFDDKVMKQLKRRRYTGWGRLSRKLINGIRDKQSGKTILDFLKSDGFANRNFMQLIHDDSLTFKEDIQKAQVSGQGDSLHEHIANLAGSPAIKKGILQTVKVVDELVKVMGRHKPENIVIEMARENQTTQKGQKNSRERMKRIEEGIKELGSQILKEHPVENTQLQNEKLYLYYLQNGRDMYVDQELDINRLSDYDVDHIVPQSFLKDDSIDNKVLTRSDKARGKSDNVPSEEVVKKMKNYWRQLLNAKLITQRKFDNLTKAERGGLSELDKAGFIKRQLVETRQITKHVAQILDSRMNTKYDENDKLIREVKVITLKSKLVSDFRKDFQFYKVREINNYHHAHDAYLNAVVGTALIKKYPKLESEFVYGDYKVYDVRKMIAKSEQEIGKATAKYFFYSNIMNFFKTEITLANGEIRKRPLIETNGETGEIVWDKGRDFATVRKVLSMPQVNIVKKTEVQTGGFSKESILPKRNSDKLIARKKDWDPKKYGGFDSPTVAYSVLVVAKVEKGKSKKLKSVKELLGITIMERSSFEKNPIDFLEAKGYKEVKKDLIIKLPKYSLFELENGRKRMLASAGELQKGNELALPSKYVNFLYLASHYEKLKGSPEDNEQKQLFVEQHKHYLDEIIEQISEFSKRVILADANLDKVLSAYNKHRDKPIREQAENIIHLFTLTNLGAPAAFKYFDTTIDRKRYTSTKEVLDATLIHQSITGLYETRIDLSQLGGDGGGSSPAPGGGGGTLNIEDEYRLHETSKEPDVPLGSTWLSDFPQAWAETGGMGLAVRQAPLIIPLKATSTPVSIKQYPMSQEARLGIKPHIQRLLDQGILVPCQSPWNTPLLPVKKPGTNDYRPVQDLREVNKRVEDIHPTVPNPYNLLSGLPPSHQWYTVLDLKDAFFCLRLHPTSQPLFAFEWRDPEMGISGQLTWTRLPQGFKNSPTLFNEALHRDLADFRIQHPDLILLQYVDDLLLAATSEQDCQRGTRALLQTLGNLGYRASAKKAQICQKQVKYLGYLLKEGQRWLTEARKETVMGQPTPKTPRQLREFLGTAGFCRLWIPGFAEMAAPLYPLTKPGTLFNWGPDQQKAYQEIKQALLTAPALGLPDLTKPFELFVDEKQGYAKGVLTQKLGPWRRPVAYLSKKLDPVAAGWPPCLRMVAAIAVLTKDAGKLTMGQPLVILAPHAVEALVKQPPDRWLSNARMTHYQAMLLDTDRVQFGPVVALNPATLLPLPEKEAPHDCLEILAETHGTRPDLTDQPIPDADYTWYTDGSSFLQEGQRRAGAAVTTETEVIWARALPAGTSAQRAELIALTQALKMAEGKKLNVYTDSRYAFATAHVHGEIYRRRGWLTSEGREIKNKNEILALLKALFLPKRLSIIHCPGHQKGNSAEARGNRMADQAAREAAMKAVLETSTLLAGKRTADGSEFEKRTADGSEFESPKKKAKVE

SEQ ID NO: 1001 - protein, 2094 aa, synthetic construct
MPAAKRVKLDGGDKKYSIGLDIGTNSVGWAVITDEYKVPSKKFKVLGNTDRHSIKKNLIGALLFDSGETAEATRLKRTARRRYTRRKNRICYLQEIFSNEMAKVDDSFFHRLEESFLVEEDKKHERHPIFGNIVDEVAYHEKYPTIYHLRKKLVDSTDKADLRLIYLALAHMIKFRGHFLIEGDLNPDNSDVDKLFIQLVQTYNQLFEENPINASGVDAKAILSARLSKSRRLENLIAQLPGEKKNGLFGNLIALSLGLTPNFKSNFDLAEDAKLQLSKDTYDDDLDNLLAQIGDQYADLFLAAKNLSDAILLSDILRVNTEITKAPLSASMIKRYDEHHQDLTLLKALVRQQLPEKYKEIFFDQSKNGYAGYIDGGASQEEFYKFIKPILEKMDGTEELLVKLNREDLLRKQRTFDNGSIPHQIHLGELHAILRRQEDFYPFLKDNREKIEKILTFRIPYYVGPLARGNSRFAWMTRKSEETITPWNFEEVVDKGASAQSFIERMTNFDKNLPNEKVLPKHSLLYEYFTVYNELTKVKYVTEGMRKPAFLSGEQKKAIVDLLFKTNRKVTVKQLKEDYFKKIECFDSVEISGVEDRFNASLGTYHDLLKIIKDKDFLDNEENEDILEDIVLTLTLFEDREMIEERLKTYAHLFDDKVMKQLKRRRYTGWGRLSRKLINGIRDKQSGKTILDFLKSDGFANRNFMQLIHDDSLTFKEDIQKAQVSGQGDSLHEHIANLAGSPAIKKGILQTVKVVDELVKVMGRHKPENIVIEMARENQTTQKGQKNSRERMKRIEEGIKELGSQILKEHPVENTQLQNEKLYLYYLQNGRDMYVDQELDINRLSDYDVDHIVPQSFLKDDSIDNKVLTRSDKARGKSDNVPSEEVVKKMKNYWRQLLNAKLITQRKFDNLTKAERGGLSELDKAGFIKRQLVETRQITKHVAQILDSRMNTKYDENDKLIREVKVITLKSKLVSDFRKDFQFYKVREINNYHHAHDAYLNAVVGTALIKKYPKLESEFVYGDYKVYDVRKMIAKSEQEIGKATAKYFFYSNIMNFFKTEITLANGEIRKRPLIETNGETGEIVWDKGRDFATVRKVLSMPQVNIVKKTEVQTGGFSKESILPKRNSDKLIARKKDWDPKKYGGFDSPTVAYSVLVVAKVEKGKSKKLKSVKELLGITIMERSSFEKNPIDFLEAKGYKEVKKDLIIKLPKYSLFELENGRKRMLASAGELQKGNELALPSKYVNFLYLASHYEKLKGSPEDNEQKQLFVEQHKHYLDEIIEQISEFSKRVILADANLDKVLSAYNKHRDKPIREQAENIIHLFTLTNLGAPAAFKYFDTTIDRKRYTSTKEVLDATLIHQSITGLYETRIDLSQLGGDGGGGSPAPGGGGGTLNIEDEYRLHETSKEPDVPLGSTWLSDFPQAWAETGGMGLAVRQAPLIIPLKATSTPVSIKQYPMSQEARLGIKPHIQRLLDQGILVPCQSPWNTPLLPVKKPGTNDYRPVQDLREVNKRVEDIHPTVPNPYNLLSGLPPSHQWYTVLDLKDAFFCLRLHPTSQPLFAFEWRDPEMGISGQLTWTRLPQGFKNSPTLFNEALHRDLADFRIQHPDLILLQYVDDLLLAATSEQDCQRGTRALLQTLGNLGYRASAKKAQICQKQVKYLGYLLKEGQRWLTEARKETVMGQPTPKTPRQLREFLGTAGFCRLWIPGFAEMAAPLYPLTKPGTLFNWGPDQQKAYQEIKQALLTAPALGLPDLTKPFELFVDEKQGYAKGVLTQKLGPWRRPVAYLSKKLDPVAAGWPPCLRMVAAIAVLTKDAGKLTMGQPLVILAPHAVEALVKQPPDRWLSNARMTHYQAMLLDTDRVQFGPVVALNPATLLPLPEKEAPHDCLEILAETHGTRPDLTDQPIPDADYTWYTDGSSFLQEGQRRAGAAVTTETEVIWARALPAGTSAQRAELIALTQALKMAEGKKLNVYTDSRYAFATAHVHGEIYRRRGWLTSEGREIKNKNEILALLKALFLPKRLSIIHCPGHQKGNSAEARGNRMADQAAREAAMKAVLETSTLLAGKRTADGSEFEKRTADGSEFESPKKKAKVE

SEQ ID NO: 1002 - protein, 2095 aa, synthetic construct
MPAAKRVKLDGGDKKYSIGLDIGTNSVGWAVITDEYKVPSKKFKVLGNTDRHSIKKNLIGALLFDSGETAEATRLKRTARRRYTRRKNRICYLQEIFSNEMAKVDDSFFHRLEESFLVEEDKKHERHPIFGNIVDEVAYHEKYPTIYHLRKKLVDSTDKADLRLIYLALAHMIKFRGHFLIEGDLNPDNSDVDKLFIQLVQTYNQLFEENPINASGVDAKAILSARLSKSRRLENLIAQLPGEKKNGLFGNLIALSLGLTPNFKSNFDLAEDAKLQLSKDTYDDDLDNLLAQIGDQYADLFLAAKNLSDAILLSDILRVNTEITKAPLSASMIKRYDEHHQDLTLLKALVRQQLPEKYKEIFFDQSKNGYAGYIDGGASQEEFYKFIKPILEKMDGTEELLVKLNREDLLRKQRTFDNGSIPHQIHLGELHAILRRQEDFYPFLKDNREKIEKILTFRIPYYVGPLARGNSRFAWMTRKSEETITPWNFEEVVDKGASAQSFIERMTNFDKNLPNEKVLPKHSLLYEYFTVYNELTKVKYVTEGMRKPAFLSGEQKKAIVDLLFKTNRKVTVKQLKEDYFKKIECFDSVEISGVEDRFNASLGTYHDLLKIIKDKDFLDNEENEDILEDIVLTLTLFEDREMIEERLKTYAHLFDDKVMKQLKRRRYTGWGRLSRKLINGIRDKQSGKTILDFLKSDGFANRNFMQLIHDDSLTFKEDIQKAQVSGQGDSLHEHIANLAGSPAIKKGILQTVKVVDELVKVMGRHKPENIVIEMARENQTTQKGQKNSRERMKRIEEGIKELGSQILKEHPVENTQLQNEKLYLYYLQNGRDMYVDQELDINRLSDYDVDHIVPQSFLKDDSIDNKVLTRSDKARGKSDNVPSEEVVKKMKNYWRQLLNAKLITQRKFDNLTKAERGGLSELDKAGFIKRQLVETRQITKHVAQILDSRMNTKYDENDKLIREVKVITLKSKLVSDFRKDFQFYKVREINNYHHAHDAYLNAVVGTALIKKYPKLESEFVYGDYKVYDVRKMIAKSEQEIGKATAKYFFYSNIMNFFKTEITLANGEIRKRPLIETNGETGEIVWDKGRDFATVRKVLSMPQVNIVKKTEVQTGGFSKESILPKRNSDKLIARKKDWDPKKYGGFDSPTVAYSVLVVAKVEKGKSKKLKSVKELLGITIMERSSFEKNPIDFLEAKGYKEVKKDLIIKLPKYSLFELENGRKRMLASAGELQKGNELALPSKYVNFLYLASHYEKLKGSPEDNEQKQLFVEQHKHYLDEIIEQISEFSKRVILADANLDKVLSAYNKHRDKPIREQAENIIHLFTLTNLGAPAAFKYFDTTIDRKRYTSTKEVLDATLIHQSITGLYETRIDLSQLGGDGGGGGGSGGGGSGGTLNIEDEYRLHETSKEPDVPLGSTWLSDFPQAWAETGGMGLAVRQAPLIIPLKATSTPVSIKQYPMSQEARLGIKPHIQRLLDQGILVPCQSPWNTPLLPVKKPGTNDYRPVQDLREVNKRVEDIHPTVPNPYNLLSGLPPSHQWYTVLDLKDAFFCLRLHPTSQPLFAFEWRDPEMGISGQLTWTRLPQGFKNSPTLFNEALHRDLADFRIQHPDLILLQYVDDLLLAATSEQDCQRGTRALLQTLGNLGYRASAKKAQICQKQVKYLGYLLKEGQRWLTEARKETVMGQPTPKTPRQLREFLGTAGFCRLWIPGFAEMAAPLYPLTKPGTLFNWGPDQQKAYQEIKQALLTAPALGLPDLTKPFELFVDEKQGYAKGVLTQKLGPWRRPVAYLSKKLDPVAAGWPPCLRMVAAIAVLTKDAGKLTMGQPLVILAPHAVEALVKQPPDRWLSNARMTHYQAMLLDTDRVQFGPVVALNPATLLPLPEKEAPHDCLEILAETHGTRPDLTDQPIPDADYTWYTDGSSFLQEGQRRAGAAVTTETEVIWARALPAGTSAQRAELIALTQALKMAEGKKLNVYTDSRYAFATAHVHGEIYRRRGWLTSEGREIKNKNEILALLKALFLPKRLSIIHCPGHQKGNSAEARGNRMADQAAREAAMKAVLETSTLLAGKRTADGSEFEKRTADGSEFESPKKKAKVE

SEQ ID NO: 1003 - protein, 2088 aa, synthetic construct
MPAAKRVKLDGGDKKYSIGLDIGTNSVGWAVITDEYKVPSKKFKVLGNTDRHSIKKNLIGALLFDSGETAEATRLKRTARRRYTRRKNRICYLQEIFSNEMAKVDDSFFHRLEESFLVEEDKKHERHPIFGNIVDEVAYHEKYPTIYHLRKKLVDSTDKADLRLIYLALAHMIKFRGHFLIEGDLNPDNSDVDKLFIQLVQTYNQLFEENPINASGVDAKAILSARLSKSRRLENLIAQLPGEKKNGLFGNLIALSLGLTPNFKSNFDLAEDAKLQLSKDTYDDDLDNLLAQIGDQYADLFLAAKNLSDAILLSDILRVNTEITKAPLSASMIKRYDEHHQDLTLLKALVRQQLPEKYKEIFFDQSKNGYAGYIDGGASQEEFYKFIKPILEKMDGTEELLVKLNREDLLRKQRTFDNGSIPHQIHLGELHAILRRQEDFYPFLKDNREKIEKILTFRIPYYVGPLARGNSRFAWMTRKSEETITPWNFEEVVDKGASAQSFIERMTNFDKNLPNEKVLPKHSLLYEYFTVYNELTKVKYVTEGMRKPAFLSGEQKKAIVDLLFKTNRKVTVKQLKEDYFKKIECFDSVEISGVEDRFNASLGTYHDLLKIIKDKDFLDNEENEDILEDIVLTLTLFEDREMIEERLKTYAHLFDDKVMKQLKRRRYTGWGRLSRKLINGIRDKQSGKTILDFLKSDGFANRNFMQLIHDDSLTFKEDIQKAQVSGQGDSLHEHIANLAGSPAIKKGILQTVKVVDELVKVMGRHKPENIVIEMARENQTTQKGQKNSRERMKRIEEGIKELGSQILKEHPVENTQLQNEKLYLYYLQNGRDMYVDQELDINRLSDYDVDHIVPQSFLKDDSIDNKVLTRSDKARGKSDNVPSEEVVKKMKNYWRQLLNAKLITQRKFDNLTKAERGGLSELDKAGFIKRQLVETRQITKHVAQILDSRMNTKYDENDKLIREVKVITLKSKLVSDFRKDFQFYKVREINNYHHAHDAYLNAVVGTALIKKYPKLESEFVYGDYKVYDVRKMIAKSEQEIGKATAKYFFYSNIMNFFKTEITLANGEIRKRPLIETNGETGEIVWDKGRDFATVRKVLSMPQVNIVKKTEVQTGGFSKESILPKRNSDKLIARKKDWDPKKYGGFDSPTVAYSVLVVAKVEKGKSKKLKSVKELLGITIMERSSFEKNPIDFLEAKGYKEVKKDLIIKLPKYSLFELENGRKRMLASAGELQKGNELALPSKYVNFLYLASHYEKLKGSPEDNEQKQLFVEQHKHYLDEIIEQISEFSKRVILADANLDKVLSAYNKHRDKPIREQAENIIHLFTLTNLGAPAAFKYFDTTIDRKRYTSTKEVLDATLIHQSITGLYETRIDLSQLGGDGGGGSGGTLNIEDEYRLHETSKEPDVPLGSTWLSDFPQAWAETGGMGLAVRQAPLIIPLKATSTPVSIKQYPMSQEARLGIKPHIQRLLDQGILVPCQSPWNTPLLPVKKPGTNDYRPVQDLREVNKRVEDIHPTVPNPYNLLSGLPPSHQWYTVLDLKDAFFCLRLHPTSQPLFAFEWRDPEMGISGQLTWTRLPQGFKNSPTLFNEALHRDLADFRIQHPDLILLQYVDDLLLAATSEQDCQRGTRALLQTLGNLGYRASAKKAQICQKQVKYLGYLLKEGQRWLTEARKETVMGQPTPKTPRQLREFLGTAGFCRLWIPGFAEMAAPLYPLTKPGTLFNWGPDQQKAYQEIKQALLTAPALGLPDLTKPFELFVDEKQGYAKGVLTQKLGPWRRPVAYLSKKLDPVAAGWPPCLRMVAAIAVLTKDAGKLTMGQPLVILAPHAVEALVKQPPDRWLSNARMTHYQAMLLDTDRVQFGPVVALNPATLLPLPEKEAPHDCLEILAETHGTRPDLTDQPIPDADYTWYTDGSSFLQEGQRRAGAAVTTETEVIWARALPAGTSAQRAELIALTQALKMAEGKKLNVYTDSRYAFATAHVHGEIYRRRGWLTSEGREIKNKNEILALLKALFLPKRLSIIHCPGHQKGNSAEARGNRMADQAAREAAMKAVLETSTLLAGKRTADGSEFEKRTADGSEFESPKKKAKVE

SEQ ID NO: 1004 - protein, 2094 aa, synthetic construct
MPAAKRVKLDGGDKKYSIGLDIGTNSVGWAVITDEYKVPSKKFKVLGNTDRHSIKKNLIGALLFDSGETAEATRLKRTARRRYTRRKNRICYLQEIFSNEMAKVDDSFFHRLEESFLVEEDKKHERHPIFGNIVDEVAYHEKYPTIYHLRKKLVDSTDKADLRLIYLALAHMIKFRGHFLIEGDLNPDNSDVDKLFIQLVQTYNQLFEENPINASGVDAKAILSARLSKSRRLENLIAQLPGEKKNGLFGNLIALSLGLTPNFKSNFDLAEDAKLQLSKDTYDDDLDNLLAQIGDQYADLFLAAKNLSDAILLSDILRVNTEITKAPLSASMIKRYDEHHQDLTLLKALVRQQLPEKYKEIFFDQSKNGYAGYIDGGASQEEFYKFIKPILEKMDGTEELLVKLNREDLLRKQRTFDNGSIPHQIHLGELHAILRRQEDFYPFLKDNREKIEKILTFRIPYYVGPLARGNSRFAWMTRKSEETITPWNFEEVVDKGASAQSFIERMTNFDKNLPNEKVLPKHSLLYEYFTVYNELTKVKYVTEGMRKPAFLSGEQKKAIVDLLFKTNRKVTVKQLKEDYFKKIECFDSVEISGVEDRFNASLGTYHDLLKIIKDKDFLDNEENEDILEDIVLTLTLFEDREMIEERLKTYAHLFDDKVMKQLKRRRYTGWGRLSRKLINGIRDKQSGKTILDFLKSDGFANRNFMQLIHDDSLTFKEDIQKAQVSGQGDSLHEHIANLAGSPAIKKGILQTVKVVDELVKVMGRHKPENIVIEMARENQTTQKGQKNSRERMKRIEEGIKELGSQILKEHPVENTQLQNEKLYLYYLQNGRDMYVDQELDINRLSDYDVDHIVPQSFLKDDSIDNKVLTRSDKARGKSDNVPSEEVVKKMKNYWRQLLNAKLITQRKFDNLTKAERGGLSELDKAGFIKRQLVETRQITKHVAQILDSRMNTKYDENDKLIREVKVITLKSKLVSDFRKDFQFYKVREINNYHHAHDAYLNAVVGTALIKKYPKLESEFVYGDYKVYDVRKMIAKSEQEIGKATAKYFFYSNIMNFFKTEITLANGEIRKRPLIETNGETGEIVWDKGRDFATVRKVLSMPQVNIVKKTEVQTGGFSKESILPKRNSDKLIARKKDWDPKKYGGFDSPTVAYSVLVVAKVEKGKSKKLKSVKELLGITIMERSSFEKNPIDFLEAKGYKEVKKDLIIKLPKYSLFELENGRKRMLASAGELQKGNELALPSKYVNFLYLASHYEKLKGSPEDNEQKQLFVEQHKHYLDEIIEQISEFSKRVILADANLDKVLSAYNKHRDKPIREQAENIIHLFTLTNLGAPAAFKYFDTTIDRKRYTSTKEVLDATLIHQSITGLYETRIDLSQLGGDGGGSSGGSGGGGGTLNIEDEYRLHETSKEPDVPLGSTWLSDFPQAWAETGGMGLAVRQAPLIIPLKATSTPVSIKQYPMSQEARLGIKPHIQRLLDQGILVPCQSPWNTPLLPVKKPGTNDYRPVQDLREVNKRVEDIHPTVPNPYNLLSGLPPSHQWYTVLDLKDAFFCLRLHPTSQPLFAFEWRDPEMGISGQLTWTRLPQGFKNSPTLFNEALHRDLADFRIQHPDLILLQYVDDLLLAATSEQDCQRGTRALLQTLGNLGYRASAKKAQICQKQVKYLGYLLKEGQRWLTEARKETVMGQPTPKTPRQLREFLGTAGFCRLWIPGFAEMAAPLYPLTKPGTLFNWGPDQQKAYQEIKQALLTAPALGLPDLTKPFELFVDEKQGYAKGVLTQKLGPWRRPVAYLSKKLDPVAAGWPPCLRMVAAIAVLTKDAGKLTMGQPLVILAPHAVEALVKQPPDRWLSNARMTHYQAMLLDTDRVQFGPVVALNPATLLPLPEKEAPHDCLEILAETHGTRPDLTDQPIPDADYTWYTDGSSFLQEGQRRAGAAVTTETEVIWARALPAGTSAQRAELIALTQALKMAEGKKLNVYTDSRYAFATAHVHGEIYRRRGWLTSEGREIKNKNEILALLKALFLPKRLSIIHCPGHQKGNSAEARGNRMADQAAREAAMKAVLETSTLLAGKRTADGSEFEKRTADGSEFESPKKKAKVE

SEQ ID NO: 1005 - protein, 2096 aa, synthetic construct
MPAAKRVKLDGGDKKYSIGLDIGTNSVGWAVITDEYKVPSKKFKVLGNTDRHSIKKNLIGALLFDSGETAEATRLKRTARRRYTRRKNRICYLQEIFSNEMAKVDDSFFHRLEESFLVEEDKKHERHPIFGNIVDEVAYHEKYPTIYHLRKKLVDSTDKADLRLIYLALAHMIKFRGHFLIEGDLNPDNSDVDKLFIQLVQTYNQLFEENPINASGVDAKAILSARLSKSRRLENLIAQLPGEKKNGLFGNLIALSLGLTPNFKSNFDLAEDAKLQLSKDTYDDDLDNLLAQIGDQYADLFLAAKNLSDAILLSDILRVNTEITKAPLSASMIKRYDEHHQDLTLLKALVRQQLPEKYKEIFFDQSKNGYAGYIDGGASQEEFYKFIKPILEKMDGTEELLVKLNREDLLRKQRTFDNGSIPHQIHLGELHAILRRQEDFYPFLKDNREKIEKILTFRIPYYVGPLARGNSRFAWMTRKSEETITPWNFEEVVDKGASAQSFIERMTNFDKNLPNEKVLPKHSLLYEYFTVYNELTKVKYVTEGMRKPAFLSGEQKKAIVDLLFKTNRKVTVKQLKEDYFKKIECFDSVEISGVEDRFNASLGTYHDLLKIIKDKDFLDNEENEDILEDIVLTLTLFEDREMIEERLKTYAHLFDDKVMKQLKRRRYTGWGRLSRKLINGIRDKQSGKTILDFLKSDGFANRNFMQLIHDDSLTFKEDIQKAQVSGQGDSLHEHIANLAGSPAIKKGILQTVKVVDELVKVMGRHKPENIVIEMARENQTTQKGQKNSRERMKRIEEGIKELGSQILKEHPVENTQLQNEKLYLYYLQNGRDMYVDQELDINRLSDYDVDHIVPQSFLKDDSIDNKVLTRSDKARGKSDNVPSEEVVKKMKNYWRQLLNAKLITQRKFDNLTKAERGGLSELDKAGFIKRQLVETRQITKHVAQILDSRMNTKYDENDKLIREVKVITLKSKLVSDFRKDFQFYKVREINNYHHAHDAYLNAVVGTALIKKYPKLESEFVYGDYKVYDVRKMIAKSEQEIGKATAKYFFYSNIMNFFKTEITLANGEIRKRPLIETNGETGEIVWDKGRDFATVRKVLSMPQVNIVKKTEVQTGGFSKESILPKRNSDKLIARKKDWDPKKYGGFDSPTVAYSVLVVAKVEKGKSKKLKSVKELLGITIMERSSFEKNPIDFLEAKGYKEVKKDLIIKLPKYSLFELENGRKRMLASAGELQKGNELALPSKYVNFLYLASHYEKLKGSPEDNEQKQLFVEQHKHYLDEIIEQISEFSKRVILADANLDKVLSAYNKHRDKPIREQAENIIHLFTLTNLGAPAAFKYFDTTIDRKRYTSTKEVLDATLIHQSITGLYETRIDLSQLGGDGGGGSGSSEAAAKGGTLNIEDEYRLHETSKEPDVPLGSTWLSDFPQAWAETGGMGLAVRQAPLIIPLKATSTPVSIKQYPMSQEARLGIKPHIQRLLDQGILVPCQSPWNTPLLPVKKPGTNDYRPVQDLREVNKRVEDIHPTVPNPYNLLSGLPPSHQWYTVLDLKDAFFCLRLHPTSQPLFAFEWRDPEMGISGQLTWTRLPQGFKNSPTLFNEALHRDLADFRIQHPDLILLQYVDDLLLAATSEQDCQRGTRALLQTLGNLGYRASAKKAQICQKQVKYLGYLLKEGQRWLTEARKETVMGQPTPKTPRQLREFLGTAGFCRLWIPGFAEMAAPLYPLTKPGTLFNWGPDQQKAYQEIKQALLTAPALGLPDLTKPFELFVDEKQGYAKGVLTQKLGPWRRPVAYLSKKLDPVAAGWPPCLRMVAAIAVLTKDAGKLTMGQPLVILAPHAVEALVKQPPDRWLSNARMTHYQAMLLDTDRVQFGPVVALNPATLLPLPEKEAPHDCLEILAETHGTRPDLTDQPIPDADYTWYTDGSSFLQEGQRRAGAAVTTETEVIWARALPAGTSAQRAELIALTQALKMAEGKKLNVYTDSRYAFATAHVHGEIYRRRGWLTSEGREIKNKNEILALLKALFLPKRLSIIHCPGHQKGNSAEARGNRMADQAAREAAMKAVLETSTLLAGKRTADGSEFEKRTADGSEFESPKKKAKVE

SEQ ID NO: 1006 - protein, 2131 aa, synthetic construct
MPAAKRVKLDGGDKKYSIGLDIGTNSVGWAVITDEYKVPSKKFKVLGNTDRHSIKKNLIGALLFDSGETAEATRLKRTARRRYTRRKNRICYLQEIFSNEMAKVDDSFFHRLEESFLVEEDKKHERHPIFGNIVDEVAYHEKYPTIYHLRKKLVDSTDKADLRLIYLALAHMIKFRGHFLIEGDLNPDNSDVDKLFIQLVQTYNQLFEENPINASGVDAKAILSARLSKSRRLENLIAQLPGEKKNGLFGNLIALSLGLTPNFKSNFDLAEDAKLQLSKDTYDDDLDNLLAQIGDQYADLFLAAKNLSDAILLSDILRVNTEITKAPLSASMIKRYDEHHQDLTLLKALVRQQLPEKYKEIFFDQSKNGYAGYIDGGASQEEFYKFIKPILEKMDGTEELLVKLNREDLLRKQRTFDNGSIPHQIHLGELHAILRRQEDFYPFLKDNREKIEKILTFRIPYYVGPLARGNSRFAWMTRKSEETITPWNFEEVVDKGASAQSFIERMTNFDKNLPNEKVLPKHSLLYEYFTVYNELTKVKYVTEGMRKPAFLSGEQKKAIVDLLFKTNRKVTVKQLKEDYFKKIECFDSVEISGVEDRFNASLGTYHDLLKIIKDKDFLDNEENEDILEDIVLTLTLFEDREMIEERLKTYAHLFDDKVMKQLKRRRYTGWGRLSRKLINGIRDKQSGKTILDFLKSDGFANRNFMQLIHDDSLTFKEDIQKAQVSGQGDSLHEHIANLAGSPAIKKGILQTVKVVDELVKVMGRHKPENIVIEMARENQTTQKGQKNSRERMKRIEEGIKELGSQILKEHPVENTQLQNEKLYLYYLQNGRDMYVDQELDINRLSDYDVDHIVPQSFLKDDSIDNKVLTRSDKARGKSDNVPSEEVVKKMKNYWRQLLNAKLITQRKFDNLTKAERGGLSELDKAGFIKRQLVETRQITKHVAQILDSRMNTKYDENDKLIREVKVITLKSKLVSDFRKDFQFYKVREINNYHHAHDAYLNAVVGTALIKKYPKLESEFVYGDYKVYDVRKMIAKSEQEIGKATAKYFFYSNIMNFFKTEITLANGEIRKRPLIETNGETGEIVWDKGRDFATVRKVLSMPQVNIVKKTEVQTGGFSKESILPKRNSDKLIARKKDWDPKKYGGFDSPTVAYSVLVVAKVEKGKSKKLKSVKELLGITIMERSSFEKNPIDFLEAKGYKEVKKDLIIKLPKYSLFELENGRKRMLASAGELQKGNELALPSKYVNFLYLASHYEKLKGSPEDNEQKQLFVEQHKHYLDEIIEQISEFSKRVILADANLDKVLSAYNKHRDKPIREQAENIIHLFTLTNLGAPAAFKYFDTTIDRKRYTSTKEVLDATLIHQSITGLYETRIDLSQLGGDGGAEAAAKEAAAKEAAAKEAAAKALEAEAAAKEAAAKEAAAKEAAAKAGGTLNIEDEYRLHETSKEPDVPLGSTWLSDFPQAWAETGGMGLAVRQAPLIIPLKATSTPVSIKQYPMSQEARLGIKPHIQRLLDQGILVPCQSPWNTPLLPVKKPGTNDYRPVQDLREVNKRVEDIHPTVPNPYNLLSGLPPSHQWYTVLDLKDAFFCLRLHPTSQPLFAFEWRDPEMGISGQLTWTRLPQGFKNSPTLFNEALHRDLADFRIQHPDLILLQYVDDLLLAATSEQDCQRGTRALLQTLGNLGYRASAKKAQICQKQVKYLGYLLKEGQRWLTEARKETVMGQPTPKTPRQLREFLGKAGFCRLFIPGFAEMAAPLYPLTKPGTLFNWGPDQQKAYQEIKQALLTAPALGLPDLTKPFELFVDEKQGYAKGVLTQKLGPWRRPVAYLSKKLDPVAAGWPPCLRMVAAIAVLTKDAGKLTMGQPLVILAPHAVEALVKQPPDRWLSNARMTHYQAMLLDTDRVQFGPVVALNPATLLPLPEKEAPHDCLEILAETHGTRPDLTDQPIPDADYTWYTDGSSFLQEGQRRAGAAVTTETEVIWARALPAGTSAQRAELIALTQALKMAEGKKLNVYTDSRYAFATAHVHGEIYRRRGWLTSEGREIKNKNEILALLKALFLPKRLSIIHCPGHQKGNSAEARGNRMADQAAREAAMKAVLETSTLLAGKRTADGSEFEKRTADGSEFESPKKKAKVE

SEQ ID NO: 1007 - protein, 2096 aa, synthetic construct
MPAAKRVKLDGGDKKYSIGLDIGTNSVGWAVITDEYKVPSKKFKVLGNTDRHSIKKNLIGALLFDSGETAEATRLKRTARRRYTRRKNRICYLQEIFSNEMAKVDDSFFHRLEESFLVEEDKKHERHPIFGNIVDEVAYHEKYPTIYHLRKKLVDSTDKADLRLIYLALAHMIKFRGHFLIEGDLNPDNSDVDKLFIQLVQTYNQLFEENPINASGVDAKAILSARLSKSRRLENLIAQLPGEKKNGLFGNLIALSLGLTPNFKSNFDLAEDAKLQLSKDTYDDDLDNLLAQIGDQYADLFLAAKNLSDAILLSDILRVNTEITKAPLSASMIKRYDEHHQDLTLLKALVRQQLPEKYKEIFFDQSKNGYAGYIDGGASQEEFYKFIKPILEKMDGTEELLVKLNREDLLRKQRTFDNGSIPHQIHLGELHAILRRQEDFYPFLKDNREKIEKILTFRIPYYVGPLARGNSRFAWMTRKSEETITPWNFEEVVDKGASAQSFIERMTNFDKNLPNEKVLPKHSLLYEYFTVYNELTKVKYVTEGMRKPAFLSGEQKKAIVDLLFKTNRKVTVKQLKEDYFKKIECFDSVEISGVEDRFNASLGTYHDLLKIIKDKDFLDNEENEDILEDIVLTLTLFEDREMIEERLKTYAHLFDDKVMKQLKRRRYTGWGRLSRKLINGIRDKQSGKTILDFLKSDGFANRNFMQLIHDDSLTFKEDIQKAQVSGQGDSLHEHIANLAGSPAIKKGILQTVKVVDELVKVMGRHKPENIVIEMARENQTTQKGQKNSRERMKRIEEGIKELGSQILKEHPVENTQLQNEKLYLYYLQNGRDMYVDQELDINRLSDYDVDHIVPQSFLKDDSIDNKVLTRSDKARGKSDNVPSEEVVKKMKNYWRQLLNAKLITQRKFDNLTKAERGGLSELDKAGFIKRQLVETRQITKHVAQILDSRMNTKYDENDKLIREVKVITLKSKLVSDFRKDFQFYKVREINNYHHAHDAYLNAVVGTALIKKYPKLESEFVYGDYKVYDVRKMIAKSEQEIGKATAKYFFYSNIMNFFKTEITLANGEIRKRPLIETNGETGEIVWDKGRDFATVRKVLSMPQVNIVKKTEVQTGGFSKESILPKRNSDKLIARKKDWDPKKYGGFDSPTVAYSVLVVAKVEKGKSKKLKSVKELLGITIMERSSFEKNPIDFLEAKGYKEVKKDLIIKLPKYSLFELENGRKRMLASAGELQKGNELALPSKYVNFLYLASHYEKLKGSPEDNEQKQLFVEQHKHYLDEIIEQISEFSKRVILADANLDKVLSAYNKHRDKPIREQAENIIHLFTLTNLGAPAAFKYFDTTIDRKRYTSTKEVLDATLIHQSITGLYETRIDLSQLGGDGGPAPEAAAKGSSGGTLNIEDEYRLHETSKEPDVPLGSTWLSDFPQAWAETGGMGLAVRQAPLIIPLKATSTPVSIKQYPMSQEARLGIKPHIQRLLDQGILVPCQSPWNTPLLPVKKPGTNDYRPVQDLREVNKRVEDIHPTVPNPYNLLSGLPPSHQWYTVLDLKDAFFCLRLHPTSQPLFAFEWRDPEMGISGQLTWTRLPQGFKNSPTLFNEALHRDLADFRIQHPDLILLQYVDDLLLAATSEQDCQRGTRALLQTLGNLGYRASAKKAQICQKQVKYLGYLLKEGQRWLTEARKETVMGQPTPKTPRQLREFLGKAGFCRLFIPGFAEMAAPLYPLTKPGTLFNWGPDQQKAYQEIKQALLTAPALGLPDLTKPFELFVDEKQGYAKGVLTQKLGPWRRPVAYLSKKLDPVAAGWPPCLRMVAAIAVLTKDAGKLTMGQPLVILAPHAVEALVKQPPDRWLSNARMTHYQAMLLDTDRVQFGPVVALNPATLLPLPEKEAPHDCLEILAETHGTRPDLTDQPIPDADYTWYTDGSSFLQEGQRRAGAAVTTETEVIWARALPAGTSAQRAELIALTQALKMAEGKKLNVYTDSRYAFATAHVHGEIYRRRGWLTSEGREIKNKNEILALLKALFLPKRLSIIHCPGHQKGNSAEARGNRMADQAAREAAMKAVLETSTLLAGKRTADGSEFEKRTADGSEFESPKKKAKVE

SEQ ID NO: 1008 - protein, 2105 aa, synthetic construct
MPAAKRVKLDGGDKKYSIGLDIGTNSVGWAVITDEYKVPSKKFKVLGNTDRHSIKKNLIGALLFDSGETAEATRLKRTARRRYTRRKNRICYLQEIFSNEMAKVDDSFFHRLEESFLVEEDKKHERHPIFGNIVDEVAYHEKYPTIYHLRKKLVDSTDKADLRLIYLALAHMIKFRGHFLIEGDLNPDNSDVDKLFIQLVQTYNQLFEENPINASGVDAKAILSARLSKSRRLENLIAQLPGEKKNGLFGNLIALSLGLTPNFKSNFDLAEDAKLQLSKDTYDDDLDNLLAQIGDQYADLFLAAKNLSDAILLSDILRVNTEITKAPLSASMIKRYDEHHQDLTLLKALVRQQLPEKYKEIFFDQSKNGYAGYIDGGASQEEFYKFIKPILEKMDGTEELLVKLNREDLLRKQRTFDNGSIPHQIHLGELHAILRRQEDFYPFLKDNREKIEKILTFRIPYYVGPLARGNSRFAWMTRKSEETITPWNFEEVVDKGASAQSFIERMTNFDKNLPNEKVLPKHSLLYEYFTVYNELTKVKYVTEGMRKPAFLSGEQKKAIVDLLFKTNRKVTVKQLKEDYFKKIECFDSVEISGVEDRFNASLGTYHDLLKIIKDKDFLDNEENEDILEDIVLTLTLFEDREMIEERLKTYAHLFDDKVMKQLKRRRYTGWGRLSRKLINGIRDKQSGKTILDFLKSDGFANRNFMQLIHDDSLTFKEDIQKAQVSGQGDSLHEHIANLAGSPAIKKGILQTVKVVDELVKVMGRHKPENIVIEMARENQTTQKGQKNSRERMKRIEEGIKELGSQILKEHPVENTQLQNEKLYLYYLQNGRDMYVDQELDINRLSDYDVDHIVPQSFLKDDSIDNKVLTRSDKARGKSDNVPSEEVVKKMKNYWRQLLNAKLITQRKFDNLTKAERGGLSELDKAGFIKRQLVETRQITKHVAQILDSRMNTKYDENDKLIREVKVITLKSKLVSDFRKDFQFYKVREINNYHHAHDAYLNAVVGTALIKKYPKLESEFVYGDYKVYDVRKMIAKSEQEIGKATAKYFFYSNIMNFFKTEITLANGEIRKRPLIETNGETGEIVWDKGRDFATVRKVLSMPQVNIVKKTEVQTGGFSKESILPKRNSDKLIARKKDWDPKKYGGFDSPTVAYSVLVVAKVEKGKSKKLKSVKELLGITIMERSSFEKNPIDFLEAKGYKEVKKDLIIKLPKYSLFELENGRKRMLASAGELQKGNELALPSKYVNFLYLASHYEKLKGSPEDNEQKQLFVEQHKHYLDEIIEQISEFSKRVILADANLDKVLSAYNKHRDKPIREQAENIIHLFTLTNLGAPAAFKYFDTTIDRKRYTSTKEVLDATLIHQSITGLYETRIDLSQLGGDGGEAAAKEAAAKEAAAKEAAAKGGTLNIEDEYRLHETSKEPDVPLGSTWLSDFPQAWAETGGMGLAVRQAPLIIPLKATSTPVSIKQYPMSQEARLGIKPHIQRLLDQGILVPCQSPWNTPLLPVKKPGTNDYRPVQDLREVNKRVEDIHPTVPNPYNLLSGLPPSHQWYTVLDLKDAFFCLRLHPTSQPLFAFEWRDPEMGISGQLTWTRLPQGFKNSPTLFNEALHRDLADFRIQHPDLILLQYVDDLLLAATSEQDCQRGTRALLQTLGNLGYRASAKKAQICQKQVKYLGYLLKEGQRWLTEARKETVMGQPTPKTPRQLREFLGKAGFCRLFIPGFAEMAAPLYPLTKPGTLFNWGPDQQKAYQEIKQALLTAPALGLPDLTKPFELFVDEKQGYAKGVLTQKLGPWRRPVAYLSKKLDPVAAGWPPCLRMVAAIAVLTKDAGKLTMGQPLVILAPHAVEALVKQPPDRWLSNARMTHYQAMLLDTDRVQFGPVVALNPATLLPLPEKEAPHDCLEILAETHGTRPDLTDQPIPDADYTWYTDGSSFLQEGQRRAGAAVTTETEVIWARALPAGTSAQRAELIALTQALKMAEGKKLNVYTDSRYAFATAHVHGEIYRRRGWLTSEGREIKNKNEILALLKALFLPKRLSIIHCPGHQKGNSAEARGNRMADQAAREAAMKAVLETSTLLAGKRTADGSEFEKRTADGSEFESPKKKAKVE

SEQ ID NO: 1009 - protein, 2090 aa, synthetic construct
MPAAKRVKLDGGDKKYSIGLDIGTNSVGWAVITDEYKVPSKKFKVLGNTDRHSIKKNLIGALLFDSGETAEATRLKRTARRRYTRRKNRICYLQEIFSNEMAKVDDSFFHRLEESFLVEEDKKHERHPIFGNIVDEVAYHEKYPTIYHLRKKLVDSTDKADLRLIYLALAHMIKFRGHFLIEGDLNPDNSDVDKLFIQLVQTYNQLFEENPINASGVDAKAILSARLSKSRRLENLIAQLPGEKKNGLFGNLIALSLGLTPNFKSNFDLAEDAKLQLSKDTYDDDLDNLLAQIGDQYADLFLAAKNLSDAILLSDILRVNTEITKAPLSASMIKRYDEHHQDLTLLKALVRQQLPEKYKEIFFDQSKNGYAGYIDGGASQEEFYKFIKPILEKMDGTEELLVKLNREDLLRKQRTFDNGSIPHQIHLGELHAILRRQEDFYPFLKDNREKIEKILTFRIPYYVGPLARGNSRFAWMTRKSEETITPWNFEEVVDKGASAQSFIERMTNFDKNLPNEKVLPKHSLLYEYFTVYNELTKVKYVTEGMRKPAFLSGEQKKAIVDLLFKTNRKVTVKQLKEDYFKKIECFDSVEISGVEDRFNASLGTYHDLLKIIKDKDFLDNEENEDILEDIVLTLTLFEDREMIEERLKTYAHLFDDKVMKQLKRRRYTGWGRLSRKLINGIRDKQSGKTILDFLKSDGFANRNFMQLIHDDSLTFKEDIQKAQVSGQGDSLHEHIANLAGSPAIKKGILQTVKVVDELVKVMGRHKPENIVIEMARENQTTQKGQKNSRERMKRIEEGIKELGSQILKEHPVENTQLQNEKLYLYYLQNGRDMYVDQELDINRLSDYDVDHIVPQSFLKDDSIDNKVLTRSDKARGKSDNVPSEEVVKKMKNYWRQLLNAKLITQRKFDNLTKAERGGLSELDKAGFIKRQLVETRQITKHVAQILDSRMNTKYDENDKLIREVKVITLKSKLVSDFRKDFQFYKVREINNYHHAHDAYLNAVVGTALIKKYPKLESEFVYGDYKVYDVRKMIAKSEQEIGKATAKYFFYSNIMNFFKTEITLANGEIRKRPLIETNGETGEIVWDKGRDFATVRKVLSMPQVNIVKKTEVQTGGFSKESILPKRNSDKLIARKKDWDPKKYGGFDSPTVAYSVLVVAKVEKGKSKKLKSVKELLGITIMERSSFEKNPIDFLEAKGYKEVKKDLIIKLPKYSLFELENGRKRMLASAGELQKGNELALPSKYVNFLYLASHYEKLKGSPEDNEQKQLFVEQHKHYLDEIIEQISEFSKRVILADANLDKVLSAYNKHRDKPIREQAENIIHLFTLTNLGAPAAFKYFDTTIDRKRYTSTKEVLDATLIHQSITGLYETRIDLSQLGGDGGEAAAKGGTLNIEDEYRLHETSKEPDVPLGSTWLSDFPQAWAETGGMGLAVRQAPLIIPLKATSTPVSIKQYPMSQEARLGIKPHIQRLLDQGILVPCQSPWNTPLLPVKKPGTNDYRPVQDLREVNKRVEDIHPTVPNPYNLLSGLPPSHQWYTVLDLKDAFFCLRLHPTSQPLFAFEWRDPEMGISGQLTWTRLPQGFKNSPTLFNEALHRDLADFRIQHPDLILLQYVDDLLLAATSEQDCQRGTRALLQTLGNLGYRASAKKAQICQKQVKYLGYLLKEGQRWLTEARKETVMGQPTPKTPRQLREFLGKAGFCRLFIPGFAEMAAPLYPLTKPGTLFNWGPDQQKAYQEIKQALLTAPALGLPDLTKPFELFVDEKQGYAKGVLTQKLGPWRRPVAYLSKKLDPVAAGWPPCLRMVAAIAVLTKDAGKLTMGQPLVILAPHAVEALVKQPPDRWLSNARMTHYQAMLLDTDRVQFGPVVALNPATLLPLPEKEAPHDCLEILAETHGTRPDLTDQPIPDADYTWYTDGSSFLQEGQRRAGAAVTTETEVIWARALPAGTSAQRAELIALTQALKMAEGKKLNVYTDSRYAFATAHVHGEIYRRRGWLTSEGREIKNKNEILALLKALFLPKRLSIIHCPGHQKGNSAEARGNRMADQAAREAAMKAVLETSTLLAGKRTADGSEFEKRTADGSEFESPKKKAKVE

SEQ ID NO: 1010 - protein, 2096 aa, synthetic construct
MPAAKRVKLDGGDKKYSIGLDIGTNSVGWAVITDEYKVPSKKFKVLGNTDRHSIKKNLIGALLFDSGETAEATRLKRTARRRYTRRKNRICYLQEIFSNEMAKVDDSFFHRLEESFLVEEDKKHERHPIFGNIVDEVAYHEKYPTIYHLRKKLVDSTDKADLRLIYLALAHMIKFRGHFLIEGDLNPDNSDVDKLFIQLVQTYNQLFEENPINASGVDAKAILSARLSKSRRLENLIAQLPGEKKNGLFGNLIALSLGLTPNFKSNFDLAEDAKLQLSKDTYDDDLDNLLAQIGDQYADLFLAAKNLSDAILLSDILRVNTEITKAPLSASMIKRYDEHHQDLTLLKALVRQQLPEKYKEIFFDQSKNGYAGYIDGGASQEEFYKFIKPILEKMDGTEELLVKLNREDLLRKQRTFDNGSIPHQIHLGELHAILRRQEDFYPFLKDNREKIEKILTFRIPYYVGPLARGNSRFAWMTRKSEETITPWNFEEVVDKGASAQSFIERMTNFDKNLPNEKVLPKHSLLYEYFTVYNELTKVKYVTEGMRKPAFLSGEQKKAIVDLLFKTNRKVTVKQLKEDYFKKIECFDSVEISGVEDRFNASLGTYHDLLKIIKDKDFLDNEENEDILEDIVLTLTLFEDREMIEERLKTYAHLFDDKVMKQLKRRRYTGWGRLSRKLINGIRDKQSGKTILDFLKSDGFANRNFMQLIHDDSLTFKEDIQKAQVSGQGDSLHEHIANLAGSPAIKKGILQTVKVVDELVKVMGRHKPENIVIEMARENQTTQKGQKNSRERMKRIEEGIKELGSQILKEHPVENTQLQNEKLYLYYLQNGRDMYVDQELDINRLSDYDVDHIVPQSFLKDDSIDNKVLTRSDKARGKSDNVPSEEVVKKMKNYWRQLLNAKLITQRKFDNLTKAERGGLSELDKAGFIKRQLVETRQITKHVAQILDSRMNTKYDENDKLIREVKVITLKSKLVSDFRKDFQFYKVREINNYHHAHDAYLNAVVGTALIKKYPKLESEFVYGDYKVYDVRKMIAKSEQEIGKATAKYFFYSNIMNFFKTEITLANGEIRKRPLIETNGETGEIVWDKGRDFATVRKVLSMPQVNIVKKTEVQTGGFSKESILPKRNSDKLIARKKDWDPKKYGGFDSPTVAYSVLVVAKVEKGKSKKLKSVKELLGITIMERSSFEKNPIDFLEAKGYKEVKKDLIIKLPKYSLFELENGRKRMLASAGELQKGNELALPSKYVNFLYLASHYEKLKGSPEDNEQKQLFVEQHKHYLDEIIEQISEFSKRVILADANLDKVLSAYNKHRDKPIREQAENIIHLFTLTNLGAPAAFKYFDTTIDRKRYTSTKEVLDATLIHQSITGLYETRIDLSQLGGDGGGSSPAPEAAAKGGTLNIEDEYRLHETSKEPDVPLGSTWLSDFPQAWAETGGMGLAVRQAPLIIPLKATSTPVSIKQYPMSQEARLGIKPHIQRLLDQGILVPCQSPWNTPLLPVKKPGTNDYRPVQDLREVNKRVEDIHPTVPNPYNLLSGLPPSHQWYTVLDLKDAFFCLRLHPTSQPLFAFEWRDPEMGISGQLTWTRLPQGFKNSPTLFNEALHRDLADFRIQHPDLILLQYVDDLLLAATSEQDCQRGTRALLQTLGNLGYRASAKKAQICQKQVKYLGYLLKEGQRWLTEARKETVMGQPTPKTPRQLREFLGKAGFCRLFIPGFAEMAAPLYPLTKPGTLFNWGPDQQKAYQEIKQALLTAPALGLPDLTKPFELFVDEKQGYAKGVLTQKLGPWRRPVAYLSKKLDPVAAGWPPCLRMVAAIAVLTKDAGKLTMGQPLVILAPHAVEALVKQPPDRWLSNARMTHYQAMLLDTDRVQFGPVVALNPATLLPLPEKEAPHDCLEILAETHGTRPDLTDQPIPDADYTWYTDGSSFLQEGQRRAGAAVTTETEVIWARALPAGTSAQRAELIALTQALKMAEGKKLNVYTDSRYAFATAHVHGEIYRRRGWLTSEGREIKNKNEILALLKALFLPKRLSIIHCPGHQKGNSAEARGNRMADQAAREAAMKAVLETSTLLAGKRTADGSEFEKRTADGSEFESPKKKAKVE

SEQ ID NO: 1011 - protein, 2088 aa, synthetic construct
MPAAKRVKLDGGDKKYSIGLDIGTNSVGWAVITDEYKVPSKKFKVLGNTDRHSIKKNLIGALLFDSGETAEATRLKRTARRRYTRRKNRICYLQEIFSNEMAKVDDSFFHRLEESFLVEEDKKHERHPIFGNIVDEVAYHEKYPTIYHLRKKLVDSTDKADLRLIYLALAHMIKFRGHFLIEGDLNPDNSDVDKLFIQLVQTYNQLFEENPINASGVDAKAILSARLSKSRRLENLIAQLPGEKKNGLFGNLIALSLGLTPNFKSNFDLAEDAKLQLSKDTYDDDLDNLLAQIGDQYADLFLAAKNLSDAILLSDILRVNTEITKAPLSASMIKRYDEHHQDLTLLKALVRQQLPEKYKEIFFDQSKNGYAGYIDGGASQEEFYKFIKPILEKMDGTEELLVKLNREDLLRKQRTFDNGSIPHQIHLGELHAILRRQEDFYPFLKDNREKIEKILTFRIPYYVGPLARGNSRFAWMTRKSEETITPWNFEEVVDKGASAQSFIERMTNFDKNLPNEKVLPKHSLLYEYFTVYNELTKVKYVTEGMRKPAFLSGEQKKAIVDLLFKTNRKVTVKQLKEDYFKKIECFDSVEISGVEDRFNASLGTYHDLLKIIKDKDFLDNEENEDILEDIVLTLTLFEDREMIEERLKTYAHLFDDKVMKQLKRRRYTGWGRLSRKLINGIRDKQSGKTILDFLKSDGFANRNFMQLIHDDSLTFKEDIQKAQVSGQGDSLHEHIANLAGSPAIKKGILQTVKVVDELVKVMGRHKPENIVIEMARENQTTQKGQKNSRERMKRIEEGIKELGSQILKEHPVENTQLQNEKLYLYYLQNGRDMYVDQELDINRLSDYDVDHIVPQSFLKDDSIDNKVLTRSDKARGKSDNVPSEEVVKKMKNYWRQLLNAKLITQRKFDNLTKAERGGLSELDKAGFIKRQLVETRQITKHVAQILDSRMNTKYDENDKLIREVKVITLKSKLVSDFRKDFQFYKVREINNYHHAHDAYLNAVVGTALIKKYPKLESEFVYGDYKVYDVRKMIAKSEQEIGKATAKYFFYSNIMNFFKTEITLANGEIRKRPLIETNGETGEIVWDKGRDFATVRKVLSMPQVNIVKKTEVQTGGFSKESILPKRNSDKLIARKKDWDPKKYGGFDSPTVAYSVLVVAKVEKGKSKKLKSVKELLGITIMERSSFEKNPIDFLEAKGYKEVKKDLIIKLPKYSLFELENGRKRMLASAGELQKGNELALPSKYVNFLYLASHYEKLKGSPEDNEQKQLFVEQHKHYLDEIIEQISEFSKRVILADANLDKVLSAYNKHRDKPIREQAENIIHLFTLTNLGAPAAFKYFDTTIDRKRYTSTKEVLDATLIHQSITGLYETRIDLSQLGGDGGGSSGGTLNIEDEYRLHETSKEPDVPLGSTWLSDFPQAWAETGGMGLAVRQAPLIIPLKATSTPVSIKQYPMSQEARLGIKPHIQRLLDQGILVPCQSPWNTPLLPVKKPGTNDYRPVQDLREVNKRVEDIHPTVPNPYNLLSGLPPSHQWYTVLDLKDAFFCLRLHPTSQPLFAFEWRDPEMGISGQLTWTRLPQGFKNSPTLFNEALHRDLADFRIQHPDLILLQYVDDLLLAATSEQDCQRGTRALLQTLGNLGYRASAKKAQICQKQVKYLGYLLKEGQRWLTEARKETVMGQPTPKTPRQLREFLGKAGFCRLFIPGFAEMAAPLYPLTKPGTLFNWGPDQQKAYQEIKQALLTAPALGLPDLTKPFELFVDEKQGYAKGVLTQKLGPWRRPVAYLSKKLDPVAAGWPPCLRMVAAIAVLTKDAGKLTMGQPLVILAPHAVEALVKQPPDRWLSNARMTHYQAMLLDTDRVQFGPVVALNPATLLPLPEKEAPHDCLEILAETHGTRPDLTDQPIPDADYTWYTDGSSFLQEGQRRAGAAVTTETEVIWARALPAGTSAQRAELIALTQALKMAEGKKLNVYTDSRYAFATAHVHGEIYRRRGWLTSEGREIKNKNEILALLKALFLPKRLSIIHCPGHQKGNSAEARGNRMADQAAREAAMKAVLETSTLLAGKRTADGSEFEKRTADGSEFESPKKKAKVE

SEQ ID NO: 1012 - protein, 2096 aa, synthetic construct
MPAAKRVKLDGGDKKYSIGLDIGTNSVGWAVITDEYKVPSKKFKVLGNTDRHSIKKNLIGALLFDSGETAEATRLKRTARRRYTRRKNRICYLQEIFSNEMAKVDDSFFHRLEESFLVEEDKKHERHPIFGNIVDEVAYHEKYPTIYHLRKKLVDSTDKADLRLIYLALAHMIKFRGHFLIEGDLNPDNSDVDKLFIQLVQTYNQLFEENPINASGVDAKAILSARLSKSRRLENLIAQLPGEKKNGLFGNLIALSLGLTPNFKSNFDLAEDAKLQLSKDTYDDDLDNLLAQIGDQYADLFLAAKNLSDAILLSDILRVNTEITKAPLSASMIKRYDEHHQDLTLLKALVRQQLPEKYKEIFFDQSKNGYAGYIDGGASQEEFYKFIKPILEKMDGTEELLVKLNREDLLRKQRTFDNGSIPHQIHLGELHAILRRQEDFYPFLKDNREKIEKILTFRIPYYVGPLARGNSRFAWMTRKSEETITPWNFEEVVDKGASAQSFIERMTNFDKNLPNEKVLPKHSLLYEYFTVYNELTKVKYVTEGMRKPAFLSGEQKKAIVDLLFKTNRKVTVKQLKEDYFKKIECFDSVEISGVEDRFNASLGTYHDLLKIIKDKDFLDNEENEDILEDIVLTLTLFEDREMIEERLKTYAHLFDDKVMKQLKRRRYTGWGRLSRKLINGIRDKQSGKTILDFLKSDGFANRNFMQLIHDDSLTFKEDIQKAQVSGQGDSLHEHIANLAGSPAIKKGILQTVKVVDELVKVMGRHKPENIVIEMARENQTTQKGQKNSRERMKRIEEGIKELGSQILKEHPVENTQLQNEKLYLYYLQNGRDMYVDQELDINRLSDYDVDHIVPQSFLKDDSIDNKVLTRSDKARGKSDNVPSEEVVKKMKNYWRQLLNAKLITQRKFDNLTKAERGGLSELDKAGFIKRQLVETRQITKHVAQILDSRMNTKYDENDKLIREVKVITLKSKLVSDFRKDFQFYKVREINNYHHAHDAYLNAVVGTALIKKYPKLESEFVYGDYKVYDVRKMIAKSEQEIGKATAKYFFYSNIMNFFKTEITLANGEIRKRPLIETNGETGEIVWDKGRDFATVRKVLSMPQVNIVKKTEVQTGGFSKESILPKRNSDKLIARKKDWDPKKYGGFDSPTVAYSVLVVAKVEKGKSKKLKSVKELLGITIMERSSFEKNPIDFLEAKGYKEVKKDLIIKLPKYSLFELENGRKRMLASAGELQKGNELALPSKYVNFLYLASHYEKLKGSPEDNEQKQLFVEQHKHYLDEIIEQISEFSKRVILADANLDKVLSAYNKHRDKPIREQAENIIHLFTLTNLGAPAAFKYFDTTIDRKRYTSTKEVLDATLIHQSITGLYETRIDLSQLGGDGGEAAAKGSSGGGGGTLNIEDEYRLHETSKEPDVPLGSTWLSDFPQAWAETGGMGLAVRQAPLIIPLKATSTPVSIKQYPMSQEARLGIKPHIQRLLDQGILVPCQSPWNTPLLPVKKPGTNDYRPVQDLREVNKRVEDIHPTVPNPYNLLSGLPPSHQWYTVLDLKDAFFCLRLHPTSQPLFAFEWRDPEMGISGQLTWTRLPQGFKNSPTLFNEALHRDLADFRIQHPDLILLQYVDDLLLAATSEQDCQRGTRALLQTLGNLGYRASAKKAQICQKQVKYLGYLLKEGQRWLTEARKETVMGQPTPKTPRQLREFLGKAGFCRLFIPGFAEMAAPLYPLTKPGTLFNWGPDQQKAYQEIKQALLTAPALGLPDLTKPFELFVDEKQGYAKGVLTQKLGPWRRPVAYLSKKLDPVAAGWPPCLRMVAAIAVLTKDAGKLTMGQPLVILAPHAVEALVKQPPDRWLSNARMTHYQAMLLDTDRVQFGPVVALNPATLLPLPEKEAPHDCLEILAETHGTRPDLTDQPIPDADYTWYTDGSSFLQEGQRRAGAAVTTETEVIWARALPAGTSAQRAELIALTQALKMAEGKKLNVYTDSRYAFATAHVHGEIYRRRGWLTSEGREIKNKNEILALLKALFLPKRLSIIHCPGHQKGNSAEARGNRMADQAAREAAMKAVLETSTLLAGKRTADGSEFEKRTADGSEFESPKKKAKVE

SEQ ID NO: 1013 - protein, 2094 aa, synthetic construct
MPAAKRVKLDGGDKKYSIGLDIGTNSVGWAVITDEYKVPSKKFKVLGNTDRHSIKKNLIGALLFDSGETAEATRLKRTARRRYTRRKNRICYLQEIFSNEMAKVDDSFFHRLEESFLVEEDKKHERHPIFGNIVDEVAYHEKYPTIYHLRKKLVDSTDKADLRLIYLALAHMIKFRGHFLIEGDLNPDNSDVDKLFIQLVQTYNQLFEENPINASGVDAKAILSARLSKSRRLENLIAQLPGEKKNGLFGNLIALSLGLTPNFKSNFDLAEDAKLQLSKDTYDDDLDNLLAQIGDQYADLFLAAKNLSDAILLSDILRVNTEITKAPLSASMIKRYDEHHQDLTLLKALVRQQLPEKYKEIFFDQSKNGYAGYIDGGASQEEFYKFIKPILEKMDGTEELLVKLNREDLLRKQRTFDNGSIPHQIHLGELHAILRRQEDFYPFLKDNREKIEKILTFRIPYYVGPLARGNSRFAWMTRKSEETITPWNFEEVVDKGASAQSFIERMTNFDKNLPNEKVLPKHSLLYEYFTVYNELTKVKYVTEGMRKPAFLSGEQKKAIVDLLFKTNRKVTVKQLKEDYFKKIECFDSVEISGVEDRFNASLGTYHDLLKIIKDKDFLDNEENEDILEDIVLTLTLFEDREMIEERLKTYAHLFDDKVMKQLKRRRYTGWGRLSRKLINGIRDKQSGKTILDFLKSDGFANRNFMQLIHDDSLTFKEDIQKAQVSGQGDSLHEHIANLAGSPAIKKGILQTVKVVDELVKVMGRHKPENIVIEMARENQTTQKGQKNSRERMKRIEEGIKELGSQILKEHPVENTQLQNEKLYLYYLQNGRDMYVDQELDINRLSDYDVDHIVPQSFLKDDSIDNKVLTRSDKARGKSDNVPSEEVVKKMKNYWRQLLNAKLITQRKFDNLTKAERGGLSELDKAGFIKRQLVETRQITKHVAQILDSRMNTKYDENDKLIREVKVITLKSKLVSDFRKDFQFYKVREINNYHHAHDAYLNAVVGTALIKKYPKLESEFVYGDYKVYDVRKMIAKSEQEIGKATAKYFFYSNIMNFFKTEITLANGEIRKRPLIETNGETGEIVWDKGRDFATVRKVLSMPQVNIVKKTEVQTGGFSKESILPKRNSDKLIARKKDWDPKKYGGFDSPTVAYSVLVVAKVEKGKSKKLKSVKELLGITIMERSSFEKNPIDFLEAKGYKEVKKDLIIKLPKYSLFELENGRKRMLASAGELQKGNELALPSKYVNFLYLASHYEKLKGSPEDNEQKQLFVEQHKHYLDEIIEQISEFSKRVILADANLDKVLSAYNKHRDKPIREQAENIIHLFTLTNLGAPAAFKYFDTTIDRKRYTSTKEVLDATLIHQSITGLYETRIDLSQLGGDGGGGGPAPGSSGGTLNIEDEYRLHETSKEPDVPLGSTWLSDFPQAWAETGGMGLAVRQAPLIIPLKATSTPVSIKQYPMSQEARLGIKPHIQRLLDQGILVPCQSPWNTPLLPVKKPGTNDYRPVQDLREVNKRVEDIHPTVPNPYNLLSGLPPSHQWYTVLDLKDAFFCLRLHPTSQPLFAFEWRDPEMGISGQLTWTRLPQGFKNSPTLFNEALHRDLADFRIQHPDLILLQYVDDLLLAATSEQDCQRGTRALLQTLGNLGYRASAKKAQICQKQVKYLGYLLKEGQRWLTEARKETVMGQPTPKTPRQLREFLGKAGFCRLFIPGFAEMAAPLYPLTKPGTLFNWGPDQQKAYQEIKQALLTAPALGLPDLTKPFELFVDEKQGYAKGVLTQKLGPWRRPVAYLSKKLDPVAAGWPPCLRMVAAIAVLTKDAGKLTMGQPLVILAPHAVEALVKQPPDRWLSNARMTHYQAMLLDTDRVQFGPVVALNPATLLPLPEKEAPHDCLEILAETHGTRPDLTDQPIPDADYTWYTDGSSFLQEGQRRAGAAVTTETEVIWARALPAGTSAQRAELIALTQALKMAEGKKLNVYTDSRYAFATAHVHGEIYRRRGWLTSEGREIKNKNEILALLKALFLPKRLSIIHCPGHQKGNSAEARGNRMADQAAREAAMKAVLETSTLLAGKRTADGSEFEKRTADGSEFESPKKKAKVE

SEQ ID NO: 1014 - protein, 2094 aa, synthetic construct
MPAAKRVKLDGGDKKYSIGLDIGTNSVGWAVITDEYKVPSKKFKVLGNTDRHSIKKNLIGALLFDSGETAEATRLKRTARRRYTRRKNRICYLQEIFSNEMAKVDDSFFHRLEESFLVEEDKKHERHPIFGNIVDEVAYHEKYPTIYHLRKKLVDSTDKADLRLIYLALAHMIKFRGHFLIEGDLNPDNSDVDKLFIQLVQTYNQLFEENPINASGVDAKAILSARLSKSRRLENLIAQLPGEKKNGLFGNLIALSLGLTPNFKSNFDLAEDAKLQLSKDTYDDDLDNLLAQIGDQYADLFLAAKNLSDAILLSDILRVNTEITKAPLSASMIKRYDEHHQDLTLLKALVRQQLPEKYKEIFFDQSKNGYAGYIDGGASQEEFYKFIKPILEKMDGTEELLVKLNREDLLRKQRTFDNGSIPHQIHLGELHAILRRQEDFYPFLKDNREKIEKILTFRIPYYVGPLARGNSRFAWMTRKSEETITPWNFEEVVDKGASAQSFIERMTNFDKNLPNEKVLPKHSLLYEYFTVYNELTKVKYVTEGMRKPAFLSGEQKKAIVDLLFKTNRKVTVKQLKEDYFKKIECFDSVEISGVEDRFNASLGTYHDLLKIIKDKDFLDNEENEDILEDIVLTLTLFEDREMIEERLKTYAHLFDDKVMKQLKRRRYTGWGRLSRKLINGIRDKQSGKTILDFLKSDGFANRNFMQLIHDDSLTFKEDIQKAQVSGQGDSLHEHIANLAGSPAIKKGILQTVKVVDELVKVMGRHKPENIVIEMARENQTTQKGQKNSRERMKRIEEGIKELGSQILKEHPVENTQLQNEKLYLYYLQNGRDMYVDQELDINRLSDYDVDHIVPQSFLKDDSIDNKVLTRSDKARGKSDNVPSEEVVKKMKNYWRQLLNAKLITQRKFDNLTKAERGGLSELDKAGFIKRQLVETRQITKHVAQILDSRMNTKYDENDKLIREVKVITLKSKLVSDFRKDFQFYKVREINNYHHAHDAYLNAVVGTALIKKYPKLESEFVYGDYKVYDVRKMIAKSEQEIGKATAKYFFYSNIMNFFKTEITLANGEIRKRPLIETNGETGEIVWDKGRDFATVRKVLSMPQVNIVKKTEVQTGGFSKESILPKRNSDKLIARKKDWDPKKYGGFDSPTVAYSVLVVAKVEKGKSKKLKSVKELLGITIMERSSFEKNPIDFLEAKGYKEVKKDLIIKLPKYSLFELENGRKRMLASAGELQKGNELALPSKYVNFLYLASHYEKLKGSPEDNEQKQLFVEQHKHYLDEIIEQISEFSKRVILADANLDKVLSAYNKHRDKPIREQAENIIHLFTLTNLGAPAAFKYFDTTIDRKRYTSTKEVLDATLIHQSITGLYETRIDLSQLGGDGGGSSPAPGGSGGTLNIEDEYRLHETSKEPDVPLGSTWLSDFPQAWAETGGMGLAVRQAPLIIPLKATSTPVSIKQYPMSQEARLGIKPHIQRLLDQGILVPCQSPWNTPLLPVKKPGTNDYRPVQDLREVNKRVEDIHPTVPNPYNLLSGLPPSHQWYTVLDLKDAFFCLRLHPTSQPLFAFEWRDPEMGISGQLTWTRLPQGFKNSPTLFNEALHRDLADFRIQHPDLILLQYVDDLLLAATSEQDCQRGTRALLQTLGNLGYRASAKKAQICQKQVKYLGYLLKEGQRWLTEARKETVMGQPTPKTPRQLREFLGKAGFCRLFIPGFAEMAAPLYPLTKPGTLFNWGPDQQKAYQEIKQALLTAPALGLPDLTKPFELFVDEKQGYAKGVLTQKLGPWRRPVAYLSKKLDPVAAGWPPCLRMVAAIAVLTKDAGKLTMGQPLVILAPHAVEALVKQPPDRWLSNARMTHYQAMLLDTDRVQFGPVVALNPATLLPLPEKEAPHDCLEILAETHGTRPDLTDQPIPDADYTWYTDGSSFLQEGQRRAGAAVTTETEVIWARALPAGTSAQRAELIALTQALKMAEGKKLNVYTDSRYAFATAHVHGEIYRRRGWLTSEGREIKNKNEILALLKALFLPKRLSIIHCPGHQKGNSAEARGNRMADQAAREAAMKAVLETSTLLAGKRTADGSEFEKRTADGSEFESPKKKAKVE

SEQ ID NO: 1015 - protein, 2094 aa, synthetic construct
MPAAKRVKLDGGDKKYSIGLDIGTNSVGWAVITDEYKVPSKKFKVLGNTDRHSIKKNLIGALLFDSGETAEATRLKRTARRRYTRRKNRICYLQEIFSNEMAKVDDSFFHRLEESFLVEEDKKHERHPIFGNIVDEVAYHEKYPTIYHLRKKLVDSTDKADLRLIYLALAHMIKFRGHFLIEGDLNPDNSDVDKLFIQLVQTYNQLFEENPINASGVDAKAILSARLSKSRRLENLIAQLPGEKKNGLFGNLIALSLGLTPNFKSNFDLAEDAKLQLSKDTYDDDLDNLLAQIGDQYADLFLAAKNLSDAILLSDILRVNTEITKAPLSASMIKRYDEHHQDLTLLKALVRQQLPEKYKEIFFDQSKNGYAGYIDGGASQEEFYKFIKPILEKMDGTEELLVKLNREDLLRKQRTFDNGSIPHQIHLGELHAILRRQEDFYPFLKDNREKIEKILTFRIPYYVGPLARGNSRFAWMTRKSEETITPWNFEEVVDKGASAQSFIERMTNFDKNLPNEKVLPKHSLLYEYFTVYNELTKVKYVTEGMRKPAFLSGEQKKAIVDLLFKTNRKVTVKQLKEDYFKKIECFDSVEISGVEDRFNASLGTYHDLLKIIKDKDFLDNEENEDILEDIVLTLTLFEDREMIEERLKTYAHLFDDKVMKQLKRRRYTGWGRLSRKLINGIRDKQSGKTILDFLKSDGFANRNFMQLIHDDSLTFKEDIQKAQVSGQGDSLHEHIANLAGSPAIKKGILQTVKVVDELVKVMGRHKPENIVIEMARENQTTQKGQKNSRERMKRIEEGIKELGSQILKEHPVENTQLQNEKLYLYYLQNGRDMYVDQELDINRLSDYDVDHIVPQSFLKDDSIDNKVLTRSDKARGKSDNVPSEEVVKKMKNYWRQLLNAKLITQRKFDNLTKAERGGLSELDKAGFIKRQLVETRQITKHVAQILDSRMNTKYDENDKLIREVKVITLKSKLVSDFRKDFQFYKVREINNYHHAHDAYLNAVVGTALIKKYPKLESEFVYGDYKVYDVRKMIAKSEQEIGKATAKYFFYSNIMNFFKTEITLANGEIRKRPLIETNGETGEIVWDKGRDFATVRKVLSMPQVNIVKKTEVQTGGFSKESILPKRNSDKLIARKKDWDPKKYGGFDSPTVAYSVLVVAKVEKGKSKKLKSVKELLGITIMERSSFEKNPIDFLEAKGYKEVKKDLIIKLPKYSLFELENGRKRMLASAGELQKGNELALPSKYVNFLYLASHYEKLKGSPEDNEQKQLFVEQHKHYLDEIIEQISEFSKRVILADANLDKVLSAYNKHRDKPIREQAENIIHLFTLTNLGAPAAFKYFDTTIDRKRYTSTKEVLDATLIHQSITGLYETRIDLSQLGGDGGGGGGGSPAPGGTLNIEDEYRLHETSKEPDVPLGSTWLSDFPQAWAETGGMGLAVRQAPLIIPLKATSTPVSIKQYPMSQEARLGIKPHIQRLLDQGILVPCQSPWNTPLLPVKKPGTNDYRPVQDLREVNKRVEDIHPTVPNPYNLLSGLPPSHQWYTVLDLKDAFFCLRLHPTSQPLFAFEWRDPEMGISGQLTWTRLPQGFKNSPTLFNEALHRDLADFRIQHPDLILLQYVDDLLLAATSEQDCQRGTRALLQTLGNLGYRASAKKAQICQKQVKYLGYLLKEGQRWLTEARKETVMGQPTPKTPRQLREFLGKAGFCRLFIPGFAEMAAPLYPLTKPGTLFNWGPDQQKAYQEIKQALLTAPALGLPDLTKPFELFVDEKQGYAKGVLTQKLGPWRRPVAYLSKKLDPVAAGWPPCLRMVAAIAVLTKDAGKLTMGQPLVILAPHAVEALVKQPPDRWLSNARMTHYQAMLLDTDRVQFGPVVALNPATLLPLPEKEAPHDCLEILAETHGTRPDLTDQPIPDADYTWYTDGSSFLQEGQRRAGAAVTTETEVIWARALPAGTSAQRAELIALTQALKMAEGKKLNVYTDSRYAFATAHVHGEIYRRRGWLTSEGREIKNKNEILALLKALFLPKRLSIIHCPGHQKGNSAEARGNRMADQAAREAAMKAVLETSTLLAGKRTADGSEFEKRTADGSEFESPKKKAKVE

SEQ ID NO: 1016 - protein, 2091 aa, synthetic construct
MPAAKRVKLDGGDKKYSIGLDIGTNSVGWAVITDEYKVPSKKFKVLGNTDRHSIKKNLIGALLFDSGETAEATRLKRTARRRYTRRKNRICYLQEIFSNEMAKVDDSFFHRLEESFLVEEDKKHERHPIFGNIVDEVAYHEKYPTIYHLRKKLVDSTDKADLRLIYLALAHMIKFRGHFLIEGDLNPDNSDVDKLFIQLVQTYNQLFEENPINASGVDAKAILSARLSKSRRLENLIAQLPGEKKNGLFGNLIALSLGLTPNFKSNFDLAEDAKLQLSKDTYDDDLDNLLAQIGDQYADLFLAAKNLSDAILLSDILRVNTEITKAPLSASMIKRYDEHHQDLTLLKALVRQQLPEKYKEIFFDQSKNGYAGYIDGGASQEEFYKFIKPILEKMDGTEELLVKLNREDLLRKQRTFDNGSIPHQIHLGELHAILRRQEDFYPFLKDNREKIEKILTFRIPYYVGPLARGNSRFAWMTRKSEETITPWNFEEVVDKGASAQSFIERMTNFDKNLPNEKVLPKHSLLYEYFTVYNELTKVKYVTEGMRKPAFLSGEQKKAIVDLLFKTNRKVTVKQLKEDYFKKIECFDSVEISGVEDRFNASLGTYHDLLKIIKDKDFLDNEENEDILEDIVLTLTLFEDREMIEERLKTYAHLFDDKVMKQLKRRRYTGWGRLSRKLINGIRDKQSGKTILDFLKSDGFANRNFMQLIHDDSLTFKEDIQKAQVSGQGDSLHEHIANLAGSPAIKKGILQTVKVVDELVKVMGRHKPENIVIEMARENQTTQKGQKNSRERMKRIEEGIKELGSQILKEHPVENTQLQNEKLYLYYLQNGRDMYVDQELDINRLSDYDVDHIVPQSFLKDDSIDNKVLTRSDKARGKSDNVPSEEVVKKMKNYWRQLLNAKLITQRKFDNLTKAERGGLSELDKAGFIKRQLVETRQITKHVAQILDSRMNTKYDENDKLIREVKVITLKSKLVSDFRKDFQFYKVREINNYHHAHDAYLNAVVGTALIKKYPKLESEFVYGDYKVYDVRKMIAKSEQEIGKATAKYFFYSNIMNFFKTEITLANGEIRKRPLIETNGETGEIVWDKGRDFATVRKVLSMPQVNIVKKTEVQTGGFSKESILPKRNSDKLIARKKDWDPKKYGGFDSPTVAYSVLVVAKVEKGKSKKLKSVKELLGITIMERSSFEKNPIDFLEAKGYKEVKKDLIIKLPKYSLFELENGRKRMLASAGELQKGNELALPSKYVNFLYLASHYEKLKGSPEDNEQKQLFVEQHKHYLDEIIEQISEFSKRVILADANLDKVLSAYNKHRDKPIREQAENIIHLFTLTNLGAPAAFKYFDTTIDRKRYTSTKEVLDATLIHQSITGLYETRIDLSQLGGDGGGGSGSSGGTLNIEDEYRLHETSKEPDVPLGSTWLSDFPQAWAETGGMGLAVRQAPLIIPLKATSTPVSIKQYPMSQEARLGIKPHIQRLLDQGILVPCQSPWNTPLLPVKKPGTNDYRPVQDLREVNKRVEDIHPTVPNPYNLLSGLPPSHQWYTVLDLKDAFFCLRLHPTSQPLFAFEWRDPEMGISGQLTWTRLPQGFKNSPTLFNEALHRDLADFRIQHPDLILLQYVDDLLLAATSEQDCQRGTRALLQTLGNLGYRASAKKAQICQKQVKYLGYLLKEGQRWLTEARKETVMGQPTPKTPRQLREFLGKAGFCRLFIPGFAEMAAPLYPLTKPGTLFNWGPDQQKAYQEIKQALLTAPALGLPDLTKPFELFVDEKQGYAKGVLTQKLGPWRRPVAYLSKKLDPVAAGWPPCLRMVAAIAVLTKDAGKLTMGQPLVILAPHAVEALVKQPPDRWLSNARMTHYQAMLLDTDRVQFGPVVALNPATLLPLPEKEAPHDCLEILAETHGTRPDLTDQPIPDADYTWYTDGSSFLQEGQRRAGAAVTTETEVIWARALPAGTSAQRAELIALTQALKMAEGKKLNVYTDSRYAFATAHVHGEIYRRRGWLTSEGREIKNKNEILALLKALFLPKRLSIIHCPGHQKGNSAEARGNRMADQAAREAAMKAVLETSTLLAGKRTADGSEFEKRTADGSEFESPKKKAKVE

SEQ ID NO: 1017 - protein, 2091 aa, synthetic construct
MPAAKRVKLDGGDKKYSIGLDIGTNSVGWAVITDEYKVPSKKFKVLGNTDRHSIKKNLIGALLFDSGETAEATRLKRTARRRYTRRKNRICYLQEIFSNEMAKVDDSFFHRLEESFLVEEDKKHERHPIFGNIVDEVAYHEKYPTIYHLRKKLVDSTDKADLRLIYLALAHMIKFRGHFLIEGDLNPDNSDVDKLFIQLVQTYNQLFEENPINASGVDAKAILSARLSKSRRLENLIAQLPGEKKNGLFGNLIALSLGLTPNFKSNFDLAEDAKLQLSKDTYDDDLDNLLAQIGDQYADLFLAAKNLSDAILLSDILRVNTEITKAPLSASMIKRYDEHHQDLTLLKALVRQQLPEKYKEIFFDQSKNGYAGYIDGGASQEEFYKFIKPILEKMDGTEELLVKLNREDLLRKQRTFDNGSIPHQIHLGELHAILRRQEDFYPFLKDNREKIEKILTFRIPYYVGPLARGNSRFAWMTRKSEETITPWNFEEVVDKGASAQSFIERMTNFDKNLPNEKVLPKHSLLYEYFTVYNELTKVKYVTEGMRKPAFLSGEQKKAIVDLLFKTNRKVTVKQLKEDYFKKIECFDSVEISGVEDRFNASLGTYHDLLKIIKDKDFLDNEENEDILEDIVLTLTLFEDREMIEERLKTYAHLFDDKVMKQLKRRRYTGWGRLSRKLINGIRDKQSGKTILDFLKSDGFANRNFMQLIHDDSLTFKEDIQKAQVSGQGDSLHEHIANLAGSPAIKKGILQTVKVVDELVKVMGRHKPENIVIEMARENQTTQKGQKNSRERMKRIEEGIKELGSQILKEHPVENTQLQNEKLYLYYLQNGRDMYVDQELDINRLSDYDVDHIVPQSFLKDDSIDNKVLTRSDKARGKSDNVPSEEVVKKMKNYWRQLLNAKLITQRKFDNLTKAERGGLSELDKAGFIKRQLVETRQITKHVAQILDSRMNTKYDENDKLIREVKVITLKSKLVSDFRKDFQFYKVREINNYHHAHDAYLNAVVGTALIKKYPKLESEFVYGDYKVYDVRKMIAKSEQEIGKATAKYFFYSNIMNFFKTEITLANGEIRKRPLIETNGETGEIVWDKGRDFATVRKVLSMPQVNIVKKTEVQTGGFSKESILPKRNSDKLIARKKDWDPKKYGGFDSPTVAYSVLVVAKVEKGKSKKLKSVKELLGITIMERSSFEKNPIDFLEAKGYKEVKKDLIIKLPKYSLFELENGRKRMLASAGELQKGNELALPSKYVNFLYLASHYEKLKGSPEDNEQKQLFVEQHKHYLDEIIEQISEFSKRVILADANLDKVLSAYNKHRDKPIREQAENIIHLFTLTNLGAPAAFKYFDTTIDRKRYTSTKEVLDATLIHQSITGLYETRIDLSQLGGDGGGGSPAPGGTLNIEDEYRLHETSKEPDVPLGSTWLSDFPQAWAETGGMGLAVRQAPLIIPLKATSTPVSIKQYPMSQEARLGIKPHIQRLLDQGILVPCQSPWNTPLLPVKKPGTNDYRPVQDLREVNKRVEDIHPTVPNPYNLLSGLPPSHQWYTVLDLKDAFFCLRLHPTSQPLFAFEWRDPEMGISGQLTWTRLPQGFKNSPTLFNEALHRDLADFRIQHPDLILLQYVDDLLLAATSEQDCQRGTRALLQTLGNLGYRASAKKAQICQKQVKYLGYLLKEGQRWLTEARKETVMGQPTPKTPRQLREFLGKAGFCRLFIPGFAEMAAPLYPLTKPGTLFNWGPDQQKAYQEIKQALLTAPALGLPDLTKPFELFVDEKQGYAKGVLTQKLGPWRRPVAYLSKKLDPVAAGWPPCLRMVAAIAVLTKDAGKLTMGQPLVILAPHAVEALVKQPPDRWLSNARMTHYQAMLLDTDRVQFGPVVALNPATLLPLPEKEAPHDCLEILAETHGTRPDLTDQPIPDADYTWYTDGSSFLQEGQRRAGAAVTTETEVIWARALPAGTSAQRAELIALTQALKMAEGKKLNVYTDSRYAFATAHVHGEIYRRRGWLTSEGREIKNKNEILALLKALFLPKRLSIIHCPGHQKGNSAEARGNRMADQAAREAAMKAVLETSTLLAGKRTADGSEFEKRTADGSEFESPKKKAKVE

SEQ ID NO: 1018 - protein, 2096 aa, synthetic construct
MPAAKRVKLDGGDKKYSIGLDIGTNSVGWAVITDEYKVPSKKFKVLGNTDRHSIKKNLIGALLFDSGETAEATRLKRTARRRYTRRKNRICYLQEIFSNEMAKVDDSFFHRLEESFLVEEDKKHERHPIFGNIVDEVAYHEKYPTIYHLRKKLVDSTDKADLRLIYLALAHMIKFRGHFLIEGDLNPDNSDVDKLFIQLVQTYNQLFEENPINASGVDAKAILSARLSKSRRLENLIAQLPGEKKNGLFGNLIALSLGLTPNFKSNFDLAEDAKLQLSKDTYDDDLDNLLAQIGDQYADLFLAAKNLSDAILLSDILRVNTEITKAPLSASMIKRYDEHHQDLTLLKALVRQQLPEKYKEIFFDQSKNGYAGYIDGGASQEEFYKFIKPILEKMDGTEELLVKLNREDLLRKQRTFDNGSIPHQIHLGELHAILRRQEDFYPFLKDNREKIEKILTFRIPYYVGPLARGNSRFAWMTRKSEETITPWNFEEVVDKGASAQSFIERMTNFDKNLPNEKVLPKHSLLYEYFTVYNELTKVKYVTEGMRKPAFLSGEQKKAIVDLLFKTNRKVTVKQLKEDYFKKIECFDSVEISGVEDRFNASLGTYHDLLKIIKDKDFLDNEENEDILEDIVLTLTLFEDREMIEERLKTYAHLFDDKVMKQLKRRRYTGWGRLSRKLINGIRDKQSGKTILDFLKSDGFANRNFMQLIHDDSLTFKEDIQKAQVSGQGDSLHEHIANLAGSPAIKKGILQTVKVVDELVKVMGRHKPENIVIEMARENQTTQKGQKNSRERMKRIEEGIKELGSQILKEHPVENTQLQNEKLYLYYLQNGRDMYVDQELDINRLSDYDVDHIVPQSFLKDDSIDNKVLTRSDKARGKSDNVPSEEVVKKMKNYWRQLLNAKLITQRKFDNLTKAERGGLSELDKAGFIKRQLVETRQITKHVAQILDSRMNTKYDENDKLIREVKVITLKSKLVSDFRKDFQFYKVREINNYHHAHDAYLNAVVGTALIKKYPKLESEFVYGDYKVYDVRKMIAKSEQEIGKATAKYFFYSNIMNFFKTEITLANGEIRKRPLIETNGETGEIVWDKGRDFATVRKVLSMPQVNIVKKTEVQTGGFSKESILPKRNSDKLIARKKDWDPKKYGGFDSPTVAYSVLVVAKVEKGKSKKLKSVKELLGITIMERSSFEKNPIDFLEAKGYKEVKKDLIIKLPKYSLFELENGRKRMLASAGELQKGNELALPSKYVNFLYLASHYEKLKGSPEDNEQKQLFVEQHKHYLDEIIEQISEFSKRVILADANLDKVLSAYNKHRDKPIREQAENIIHLFTLTNLGAPAAFKYFDTTIDRKRYTSTKEVLDATLIHQSITGLYETRIDLSQLGGDGGGGGEAAAKGGSGGTLNIEDEYRLHETSKEPDVPLGSTWLSDFPQAWAETGGMGLAVRQAPLIIPLKATSTPVSIKQYPMSQEARLGIKPHIQRLLDQGILVPCQSPWNTPLLPVKKPGTNDYRPVQDLREVNKRVEDIHPTVPNPYNLLSGLPPSHQWYTVLDLKDAFFCLRLHPTSQPLFAFEWRDPEMGISGQLTWTRLPQGFKNSPTLFNEALHRDLADFRIQHPDLILLQYVDDLLLAATSEQDCQRGTRALLQTLGNLGYRASAKKAQICQKQVKYLGYLLKEGQRWLTEARKETVMGQPTPKTPRQLREFLGKAGFCRLFIPGFAEMAAPLYPLTKPGTLFNWGPDQQKAYQEIKQALLTAPALGLPDLTKPFELFVDEKQGYAKGVLTQKLGPWRRPVAYLSKKLDPVAAGWPPCLRMVAAIAVLTKDAGKLTMGQPLVILAPHAVEALVKQPPDRWLSNARMTHYQAMLLDTDRVQFGPVVALNPATLLPLPEKEAPHDCLEILAETHGTRPDLTDQPIPDADYTWYTDGSSFLQEGQRRAGAAVTTETEVIWARALPAGTSAQRAELIALTQALKMAEGKKLNVYTDSRYAFATAHVHGEIYRRRGWLTSEGREIKNKNEILALLKALFLPKRLSIIHCPGHQKGNSAEARGNRMADQAAREAAMKAVLETSTLLAGKRTADGSEFEKRTADGSEFESPKKKAKVE

SEQ ID NO: 1019 - protein, 2097 aa, synthetic construct
MPAAKRVKLDGGDKKYSIGLDIGTNSVGWAVITDEYKVPSKKFKVLGNTDRHSIKKNLIGALLFDSGETAEATRLKRTARRRYTRRKNRICYLQEIFSNEMAKVDDSFFHRLEESFLVEEDKKHERHPIFGNIVDEVAYHEKYPTIYHLRKKLVDSTDKADLRLIYLALAHMIKFRGHFLIEGDLNPDNSDVDKLFIQLVQTYNQLFEENPINASGVDAKAILSARLSKSRRLENLIAQLPGEKKNGLFGNLIALSLGLTPNFKSNFDLAEDAKLQLSKDTYDDDLDNLLAQIGDQYADLFLAAKNLSDAILLSDILRVNTEITKAPLSASMIKRYDEHHQDLTLLKALVRQQLPEKYKEIFFDQSKNGYAGYIDGGASQEEFYKFIKPILEKMDGTEELLVKLNREDLLRKQRTFDNGSIPHQIHLGELHAILRRQEDFYPFLKDNREKIEKILTFRIPYYVGPLARGNSRFAWMTRKSEETITPWNFEEVVDKGASAQSFIERMTNFDKNLPNEKVLPKHSLLYEYFTVYNELTKVKYVTEGMRKPAFLSGEQKKAIVDLLFKTNRKVTVKQLKEDYFKKIECFDSVEISGVEDRFNASLGTYHDLLKIIKDKDFLDNEENEDILEDIVLTLTLFEDREMIEERLKTYAHLFDDKVMKQLKRRRYTGWGRLSRKLINGIRDKQSGKTILDFLKSDGFANRNFMQLIHDDSLTFKEDIQKAQVSGQGDSLHEHIANLAGSPAIKKGILQTVKVVDELVKVMGRHKPENIVIEMARENQTTQKGQKNSRERMKRIEEGIKELGSQILKEHPVENTQLQNEKLYLYYLQNGRDMYVDQELDINRLSDYDVDHIVPQSFLKDDSIDNKVLTRSDKARGKSDNVPSEEVVKKMKNYWRQLLNAKLITQRKFDNLTKAERGGLSELDKAGFIKRQLVETRQITKHVAQILDSRMNTKYDENDKLIREVKVITLKSKLVSDFRKDFQFYKVREINNYHHAHDAYLNAVVGTALIKKYPKLESEFVYGDYKVYDVRKMIAKSEQEIGKATAKYFFYSNIMNFFKTEITLANGEIRKRPLIETNGETGEIVWDKGRDFATVRKVLSMPQVNIVKKTEVQTGGFSKESILPKRNSDKLIARKKDWDPKKYGGFDSPTVAYSVLVVAKVEKGKSKKLKSVKELLGITIMERSSFEKNPIDFLEAKGYKEVKKDLIIKLPKYSLFELENGRKRMLASAGELQKGNELALPSKYVNFLYLASHYEKLKGSPEDNEQKQLFVEQHKHYLDEIIEQISEFSKRVILADANLDKVLSAYNKHRDKPIREQAENIIHLFTLTNLGAPAAFKYFDTTIDRKRYTSTKEVLDATLIHQSITGLYETRIDLSQLGGDGGGGSGGSGGSGGSGGTLNIEDEYRLHETSKEPDVPLGSTWLSDFPQAWAETGGMGLAVRQAPLIIPLKATSTPVSIKQYPMSQEARLGIKPHIQRLLDQGILVPCQSPWNTPLLPVKKPGTNDYRPVQDLREVNKRVEDIHPTVPNPYNLLSGLPPSHQWYTVLDLKDAFFCLRLHPTSQPLFAFEWRDPEMGISGQLTWTRLPQGFKNSPTLFNEALHRDLADFRIQHPDLILLQYVDDLLLAATSEQDCQRGTRALLQTLGNLGYRASAKKAQICQKQVKYLGYLLKEGQRWLTEARKETVMGQPTPKTPRQLREFLGKAGFCRLFIPGFAEMAAPLYPLTKPGTLFNWGPDQQKAYQEIKQALLTAPALGLPDLTKPFELFVDEKQGYAKGVLTQKLGPWRRPVAYLSKKLDPVAAGWPPCLRMVAAIAVLTKDAGKLTMGQPLVILAPHAVEALVKQPPDRWLSNARMTHYQAMLLDTDRVQFGPVVALNPATLLPLPEKEAPHDCLEILAETHGTRPDLTDQPIPDADYTWYTDGSSFLQEGQRRAGAAVTTETEVIWARALPAGTSAQRAELIALTQALKMAEGKKLNVYTDSRYAFATAHVHGEIYRRRGWLTSEGREIKNKNEILALLKALFLPKRLSIIHCPGHQKGNSAEARGNRMADQAAREAAMKAVLETSTLLAGKRTADGSEFEKRTADGSEFESPKKKAKVE

SEQ ID NO: 1020 - protein, 2098 aa, synthetic construct
MPAAKRVKLDGGDKKYSIGLDIGTNSVGWAVITDEYKVPSKKFKVLGNTDRHSIKKNLIGALLFDSGETAEATRLKRTARRRYTRRKNRICYLQEIFSNEMAKVDDSFFHRLEESFLVEEDKKHERHPIFGNIVDEVAYHEKYPTIYHLRKKLVDSTDKADLRLIYLALAHMIKFRGHFLIEGDLNPDNSDVDKLFIQLVQTYNQLFEENPINASGVDAKAILSARLSKSRRLENLIAQLPGEKKNGLFGNLIALSLGLTPNFKSNFDLAEDAKLQLSKDTYDDDLDNLLAQIGDQYADLFLAAKNLSDAILLSDILRVNTEITKAPLSASMIKRYDEHHQDLTLLKALVRQQLPEKYKEIFFDQSKNGYAGYIDGGASQEEFYKFIKPILEKMDGTEELLVKLNREDLLRKQRTFDNGSIPHQIHLGELHAILRRQEDFYPFLKDNREKIEKILTFRIPYYVGPLARGNSRFAWMTRKSEETITPWNFEEVVDKGASAQSFIERMTNFDKNLPNEKVLPKHSLLYEYFTVYNELTKVKYVTEGMRKPAFLSGEQKKAIVDLLFKTNRKVTVKQLKEDYFKKIECFDSVEISGVEDRFNASLGTYHDLLKIIKDKDFLDNEENEDILEDIVLTLTLFEDREMIEERLKTYAHLFDDKVMKQLKRRRYTGWGRLSRKLINGIRDKQSGKTILDFLKSDGFANRNFMQLIHDDSLTFKEDIQKAQVSGQGDSLHEHIANLAGSPAIKKGILQTVKVVDELVKVMGRHKPENIVIEMARENQTTQKGQKNSRERMKRIEEGIKELGSQILKEHPVENTQLQNEKLYLYYLQNGRDMYVDQELDINRLSDYDVDHIVPQSFLKDDSIDNKVLTRSDKARGKSDNVPSEEVVKKMKNYWRQLLNAKLITQRKFDNLTKAERGGLSELDKAGFIKRQLVETRQITKHVAQILDSRMNTKYDENDKLIREVKVITLKSKLVSDFRKDFQFYKVREINNYHHAHDAYLNAVVGTALIKKYPKLESEFVYGDYKVYDVRKMIAKSEQEIGKATAKYFFYSNIMNFFKTEITLANGEIRKRPLIETNGETGEIVWDKGRDFATVRKVLSMPQVNIVKKTEVQTGGFSKESILPKRNSDKLIARKKDWDPKKYGGFDSPTVAYSVLVVAKVEKGKSKKLKSVKELLGITIMERSSFEKNPIDFLEAKGYKEVKKDLIIKLPKYSLFELENGRKRMLASAGELQKGNELALPSKYVNFLYLASHYEKLKGSPEDNEQKQLFVEQHKHYLDEIIEQISEFSKRVILADANLDKVLSAYNKHRDKPIREQAENIIHLFTLTNLGAPAAFKYFDTTIDRKRYTSTKEVLDATLIHQSITGLYETRIDLSQLGGDGGPAPAPAPAPAPAPGGTLNIEDEYRLHETSKEPDVPLGSTWLSDFPQAWAETGGMGLAVRQAPLIIPLKATSTPVSIKQYPMSQEARLGIKPHIQRLLDQGILVPCQSPWNTPLLPVKKPGTNDYRPVQDLREVNKRVEDIHPTVPNPYNLLSGLPPSHQWYTVLDLKDAFFCLRLHPTSQPLFAFEWRDPEMGISGQLTWTRLPQGFKNSPTLFNEALHRDLADFRIQHPDLILLQYVDDLLLAATSEQDCQRGTRALLQTLGNLGYRASAKKAQICQKQVKYLGYLLKEGQRWLTEARKETVMGQPTPKTPRQLREFLGKAGFCRLFIPGFAEMAAPLYPLTKPGTLFNWGPDQQKAYQEIKQALLTAPALGLPDLTKPFELFVDEKQGYAKGVLTQKLGPWRRPVAYLSKKLDPVAAGWPPCLRMVAAIAVLTKDAGKLTMGQPLVILAPHAVEALVKQPPDRWLSNARMTHYQAMLLDTDRVQFGPVVALNPATLLPLPEKEAPHDCLEILAETHGTRPDLTDQPIPDADYTWYTDGSSFLQEGQRRAGAAVTTETEVIWARALPAGTSAQRAELIALTQALKMAEGKKLNVYTDSRYAFATAHVHGEIYRRRGWLTSEGREIKNKNEILALLKALFLPKRLSIIHCPGHQKGNSAEARGNRMADQAAREAAMKAVLETSTLLAGKRTADGSEFEKRTADGSEFESPKKKAKVE

SEQ ID NO: 1021 - protein, 2115 aa, synthetic construct
MPAAKRVKLDGGDKKYSIGLDIGTNSVGWAVITDEYKVPSKKFKVLGNTDRHSIKKNLIGALLFDSGETAEATRLKRTARRRYTRRKNRICYLQEIFSNEMAKVDDSFFHRLEESFLVEEDKKHERHPIFGNIVDEVAYHEKYPTIYHLRKKLVDSTDKADLRLIYLALAHMIKFRGHFLIEGDLNPDNSDVDKLFIQLVQTYNQLFEENPINASGVDAKAILSARLSKSRRLENLIAQLPGEKKNGLFGNLIALSLGLTPNFKSNFDLAEDAKLQLSKDTYDDDLDNLLAQIGDQYADLFLAAKNLSDAILLSDILRVNTEITKAPLSASMIKRYDEHHQDLTLLKALVRQQLPEKYKEIFFDQSKNGYAGYIDGGASQEEFYKFIKPILEKMDGTEELLVKLNREDLLRKQRTFDNGSIPHQIHLGELHAILRRQEDFYPFLKDNREKIEKILTFRIPYYVGPLARGNSRFAWMTRKSEETITPWNFEEVVDKGASAQSFIERMTNFDKNLPNEKVLPKHSLLYEYFTVYNELTKVKYVTEGMRKPAFLSGEQKKAIVDLLFKTNRKVTVKQLKEDYFKKIECFDSVEISGVEDRFNASLGTYHDLLKIIKDKDFLDNEENEDILEDIVLTLTLFEDREMIEERLKTYAHLFDDKVMKQLKRRRYTGWGRLSRKLINGIRDKQSGKTILDFLKSDGFANRNFMQLIHDDSLTFKEDIQKAQVSGQGDSLHEHIANLAGSPAIKKGILQTVKVVDELVKVMGRHKPENIVIEMARENQTTQKGQKNSRERMKRIEEGIKELGSQILKEHPVENTQLQNEKLYLYYLQNGRDMYVDQELDINRLSDYDVDHIVPQSFLKDDSIDNKVLTRSDKARGKSDNVPSEEVVKKMKNYWRQLLNAKLITQRKFDNLTKAERGGLSELDKAGFIKRQLVETRQITKHVAQILDSRMNTKYDENDKLIREVKVITLKSKLVSDFRKDFQFYKVREINNYHHAHDAYLNAVVGTALIKKYPKLESEFVYGDYKVYDVRKMIAKSEQEIGKATAKYFFYSNIMNFFKTEITLANGEIRKRPLIETNGETGEIVWDKGRDFATVRKVLSMPQVNIVKKTEVQTGGFSKESILPKRNSDKLIARKKDWDPKKYGGFDSPTVAYSVLVVAKVEKGKSKKLKSVKELLGITIMERSSFEKNPIDFLEAKGYKEVKKDLIIKLPKYSLFELENGRKRMLASAGELQKGNELALPSKYVNFLYLASHYEKLKGSPEDNEQKQLFVEQHKHYLDEIIEQISEFSKRVILADANLDKVLSAYNKHRDKPIREQAENIIHLFTLTNLGAPAAFKYFDTTIDRKRYTSTKEVLDATLIHQSITGLYETRIDLSQLGGDGGGGGGSGGGGSGGGGSGGGGSGGGGSGGGGSGGTLNIEDEYRLHETSKEPDVPLGSTWLSDFPQAWAETGGMGLAVRQAPLIIPLKATSTPVSIKQYPMSQEARLGIKPHIQRLLDQGILVPCQSPWNTPLLPVKKPGTNDYRPVQDLREVNKRVEDIHPTVPNPYNLLSGLPPSHQWYTVLDLKDAFFCLRLHPTSQPLFAFEWRDPEMGISGQLTWTRLPQGFKNSPTLFNEALHRDLADFRIQHPDLILLQYVDDLLLAATSEQDCQRGTRALLQTLGNLGYRASAKKAQICQKQVKYLGYLLKEGQRWLTEARKETVMGQPTPKTPRQLREFLGKAGFCRLFIPGFAEMAAPLYPLTKPGTLFNWGPDQQKAYQEIKQALLTAPALGLPDLTKPFELFVDEKQGYAKGVLTQKLGPWRRPVAYLSKKLDPVAAGWPPCLRMVAAIAVLTKDAGKLTMGQPLVILAPHAVEALVKQPPDRWLSNARMTHYQAMLLDTDRVQFGPVVALNPATLLPLPEKEAPHDCLEILAETHGTRPDLTDQPIPDADYTWYTDGSSFLQEGQRRAGAAVTTETEVIWARALPAGTSAQRAELIALTQALKMAEGKKLNVYTDSRYAFATAHVHGEIYRRRGWLTSEGREIKNKNEILALLKALFLPKRLSIIHCPGHQKGNSAEARGNRMADQAAREAAMKAVLETSTLLAGKRTADGSEFEKRTADGSEFESPKKKAKVE

SEQ ID NO: 1022 - protein, 2094 aa, synthetic construct
MPAAKRVKLDGGDKKYSIGLDIGTNSVGWAVITDEYKVPSKKFKVLGNTDRHSIKKNLIGALLFDSGETAEATRLKRTARRRYTRRKNRICYLQEIFSNEMAKVDDSFFHRLEESFLVEEDKKHERHPIFGNIVDEVAYHEKYPTIYHLRKKLVDSTDKADLRLIYLALAHMIKFRGHFLIEGDLNPDNSDVDKLFIQLVQTYNQLFEENPINASGVDAKAILSARLSKSRRLENLIAQLPGEKKNGLFGNLIALSLGLTPNFKSNFDLAEDAKLQLSKDTYDDDLDNLLAQIGDQYADLFLAAKNLSDAILLSDILRVNTEITKAPLSASMIKRYDEHHQDLTLLKALVRQQLPEKYKEIFFDQSKNGYAGYIDGGASQEEFYKFIKPILEKMDGTEELLVKLNREDLLRKQRTFDNGSIPHQIHLGELHAILRRQEDFYPFLKDNREKIEKILTFRIPYYVGPLARGNSRFAWMTRKSEETITPWNFEEVVDKGASAQSFIERMTNFDKNLPNEKVLPKHSLLYEYFTVYNELTKVKYVTEGMRKPAFLSGEQKKAIVDLLFKTNRKVTVKQLKEDYFKKIECFDSVEISGVEDRFNASLGTYHDLLKIIKDKDFLDNEENEDILEDIVLTLTLFEDREMIEERLKTYAHLFDDKVMKQLKRRRYTGWGRLSRKLINGIRDKQSGKTILDFLKSDGFANRNFMQLIHDDSLTFKEDIQKAQVSGQGDSLHEHIANLAGSPAIKKGILQTVKVVDELVKVMGRHKPENIVIEMARENQTTQKGQKNSRERMKRIEEGIKELGSQILKEHPVENTQLQNEKLYLYYLQNGRDMYVDQELDINRLSDYDVDHIVPQSFLKDDSIDNKVLTRSDKARGKSDNVPSEEVVKKMKNYWRQLLNAKLITQRKFDNLTKAERGGLSELDKAGFIKRQLVETRQITKHVAQILDSRMNTKYDENDKLIREVKVITLKSKLVSDFRKDFQFYKVREINNYHHAHDAYLNAVVGTALIKKYPKLESEFVYGDYKVYDVRKMIAKSEQEIGKATAKYFFYSNIMNFFKTEITLANGEIRKRPLIETNGETGEIVWDKGRDFATVRKVLSMPQVNIVKKTEVQTGGFSKESILPKRNSDKLIARKKDWDPKKYGGFDSPTVAYSVLVVAKVEKGKSKKLKSVKELLGITIMERSSFEKNPIDFLEAKGYKEVKKDLIIKLPKYSLFELENGRKRMLASAGELQKGNELALPSKYVNFLYLASHYEKLKGSPEDNEQKQLFVEQHKHYLDEIIEQISEFSKRVILADANLDKVLSAYNKHRDKPIREQAENIIHLFTLTNLGAPAAFKYFDTTIDRKRYTSTKEVLDATLIHQSITGLYETRIDLSQLGGDGGGGSGSSGGGGGTLNIEDEYRLHETSKEPDVPLGSTWLSDFPQAWAETGGMGLAVRQAPLIIPLKATSTPVSIKQYPMSQEARLGIKPHIQRLLDQGILVPCQSPWNTPLLPVKKPGTNDYRPVQDLREVNKRVEDIHPTVPNPYNLLSGLPPSHQWYTVLDLKDAFFCLRLHPTSQPLFAFEWRDPEMGISGQLTWTRLPQGFKNSPTLFNEALHRDLADFRIQHPDLILLQYVDDLLLAATSEQDCQRGTRALLQTLGNLGYRASAKKAQICQKQVKYLGYLLKEGQRWLTEARKETVMGQPTPKTPRQLREFLGKAGFCRLFIPGFAEMAAPLYPLTKPGTLFNWGPDQQKAYQEIKQALLTAPALGLPDLTKPFELFVDEKQGYAKGVLTQKLGPWRRPVAYLSKKLDPVAAGWPPCLRMVAAIAVLTKDAGKLTMGQPLVILAPHAVEALVKQPPDRWLSNARMTHYQAMLLDTDRVQFGPVVALNPATLLPLPEKEAPHDCLEILAETHGTRPDLTDQPIPDADYTWYTDGSSFLQEGQRRAGAAVTTETEVIWARALPAGTSAQRAELIALTQALKMAEGKKLNVYTDSRYAFATAHVHGEIYRRRGWLTSEGREIKNKNEILALLKALFLPKRLSIIHCPGHQKGNSAEARGNRMADQAAREAAMKAVLETSTLLAGKRTADGSEFEKRTADGSEFESPKKKAKVE

SEQ ID NO: 1023 - protein, 2093 aa, synthetic construct
MPAAKRVKLDGGDKKYSIGLDIGTNSVGWAVITDEYKVPSKKFKVLGNTDRHSIKKNLIGALLFDSGETAEATRLKRTARRRYTRRKNRICYLQEIFSNEMAKVDDSFFHRLEESFLVEEDKKHERHPIFGNIVDEVAYHEKYPTIYHLRKKLVDSTDKADLRLIYLALAHMIKFRGHFLIEGDLNPDNSDVDKLFIQLVQTYNQLFEENPINASGVDAKAILSARLSKSRRLENLIAQLPGEKKNGLFGNLIALSLGLTPNFKSNFDLAEDAKLQLSKDTYDDDLDNLLAQIGDQYADLFLAAKNLSDAILLSDILRVNTEITKAPLSASMIKRYDEHHQDLTLLKALVRQQLPEKYKEIFFDQSKNGYAGYIDGGASQEEFYKFIKPILEKMDGTEELLVKLNREDLLRKQRTFDNGSIPHQIHLGELHAILRRQEDFYPFLKDNREKIEKILTFRIPYYVGPLARGNSRFAWMTRKSEETITPWNFEEVVDKGASAQSFIERMTNFDKNLPNEKVLPKHSLLYEYFTVYNELTKVKYVTEGMRKPAFLSGEQKKAIVDLLFKTNRKVTVKQLKEDYFKKIECFDSVEISGVEDRFNASLGTYHDLLKIIKDKDFLDNEENEDILEDIVLTLTLFEDREMIEERLKTYAHLFDDKVMKQLKRRRYTGWGRLSRKLINGIRDKQSGKTILDFLKSDGFANRNFMQLIHDDSLTFKEDIQKAQVSGQGDSLHEHIANLAGSPAIKKGILQTVKVVDELVKVMGRHKPENIVIEMARENQTTQKGQKNSRERMKRIEEGIKELGSQILKEHPVENTQLQNEKLYLYYLQNGRDMYVDQELDINRLSDYDVDHIVPQSFLKDDSIDNKVLTRSDKARGKSDNVPSEEVVKKMKNYWRQLLNAKLITQRKFDNLTKAERGGLSELDKAGFIKRQLVETRQITKHVAQILDSRMNTKYDENDKLIREVKVITLKSKLVSDFRKDFQFYKVREINNYHHAHDAYLNAVVGTALIKKYPKLESEFVYGDYKVYDVRKMIAKSEQEIGKATAKYFFYSNIMNFFKTEITLANGEIRKRPLIETNGETGEIVWDKGRDFATVRKVLSMPQVNIVKKTEVQTGGFSKESILPKRNSDKLIARKKDWDPKKYGGFDSPTVAYSVLVVAKVEKGKSKKLKSVKELLGITIMERSSFEKNPIDFLEAKGYKEVKKDLIIKLPKYSLFELENGRKRMLASAGELQKGNELALPSKYVNFLYLASHYEKLKGSPEDNEQKQLFVEQHKHYLDEIIEQISEFSKRVILADANLDKVLSAYNKHRDKPIREQAENIIHLFTLTNLGAPAAFKYFDTTIDRKRYTSTKEVLDATLIHQSITGLYETRIDLSQLGGDGGEAAAKGGSGGTLNIEDEYRLHETSKEPDVPLGSTWLSDFPQAWAETGGMGLAVRQAPLIIPLKATSTPVSIKQYPMSQEARLGIKPHIQRLLDQGILVPCQSPWNTPLLPVKKPGTNDYRPVQDLREVNKRVEDIHPTVPNPYNLLSGLPPSHQWYTVLDLKDAFFCLRLHPTSQPLFAFEWRDPEMGISGQLTWTRLPQGFKNSPTLFNEALHRDLADFRIQHPDLILLQYVDDLLLAATSEQDCQRGTRALLQTLGNLGYRASAKKAQICQKQVKYLGYLLKEGQRWLTEARKETVMGQPTPKTPRQLREFLGKAGFCRLFIPGFAEMAAPLYPLTKPGTLFNWGPDQQKAYQEIKQALLTAPALGLPDLTKPFELFVDEKQGYAKGVLTQKLGPWRRPVAYLSKKLDPVAAGWPPCLRMVAAIAVLTKDAGKLTMGQPLVILAPHAVEALVKQPPDRWLSNARMTHYQAMLLDTDRVQFGPVVALNPATLLPLPEKEAPHDCLEILAETHGTRPDLTDQPIPDADYTWYTDGSSFLQEGQRRAGAAVTTETEVIWARALPAGTSAQRAELIALTQALKMAEGKKLNVYTDSRYAFATAHVHGEIYRRRGWLTSEGREIKNKNEILALLKALFLPKRLSIIHCPGHQKGNSAEARGNRMADQAAREAAMKAVLETSTLLAGKRTADGSEFEKRTADGSEFESPKKKAKVE

SEQ ID NO: 1024 - protein, 2094 aa, synthetic construct
MPAAKRVKLDGGDKKYSIGLDIGTNSVGWAVITDEYKVPSKKFKVLGNTDRHSIKKNLIGALLFDSGETAEATRLKRTARRRYTRRKNRICYLQEIFSNEMAKVDDSFFHRLEESFLVEEDKKHERHPIFGNIVDEVAYHEKYPTIYHLRKKLVDSTDKADLRLIYLALAHMIKFRGHFLIEGDLNPDNSDVDKLFIQLVQTYNQLFEENPINASGVDAKAILSARLSKSRRLENLIAQLPGEKKNGLFGNLIALSLGLTPNFKSNFDLAEDAKLQLSKDTYDDDLDNLLAQIGDQYADLFLAAKNLSDAILLSDILRVNTEITKAPLSASMIKRYDEHHQDLTLLKALVRQQLPEKYKEIFFDQSKNGYAGYIDGGASQEEFYKFIKPILEKMDGTEELLVKLNREDLLRKQRTFDNGSIPHQIHLGELHAILRRQEDFYPFLKDNREKIEKILTFRIPYYVGPLARGNSRFAWMTRKSEETITPWNFEEVVDKGASAQSFIERMTNFDKNLPNEKVLPKHSLLYEYFTVYNELTKVKYVTEGMRKPAFLSGEQKKAIVDLLFKTNRKVTVKQLKEDYFKKIECFDSVEISGVEDRFNASLGTYHDLLKIIKDKDFLDNEENEDILEDIVLTLTLFEDREMIEERLKTYAHLFDDKVMKQLKRRRYTGWGRLSRKLINGIRDKQSGKTILDFLKSDGFANRNFMQLIHDDSLTFKEDIQKAQVSGQGDSLHEHIANLAGSPAIKKGILQTVKVVDELVKVMGRHKPENIVIEMARENQTTQKGQKNSRERMKRIEEGIKELGSQILKEHPVENTQLQNEKLYLYYLQNGRDMYVDQELDINRLSDYDVDHIVPQSFLKDDSIDNKVLTRSDKARGKSDNVPSEEVVKKMKNYWRQLLNAKLITQRKFDNLTKAERGGLSELDKAGFIKRQLVETRQITKHVAQILDSRMNTKYDENDKLIREVKVITLKSKLVSDFRKDFQFYKVREINNYHHAHDAYLNAVVGTALIKKYPKLESEFVYGDYKVYDVRKMIAKSEQEIGKATAKYFFYSNIMNFFKTEITLANGEIRKRPLIETNGETGEIVWDKGRDFATVRKVLSMPQVNIVKKTEVQTGGFSKESILPKRNSDKLIARKKDWDPKKYGGFDSPTVAYSVLVVAKVEKGKSKKLKSVKELLGITIMERSSFEKNPIDFLEAKGYKEVKKDLIIKLPKYSLFELENGRKRMLASAGELQKGNELALPSKYVNFLYLASHYEKLKGSPEDNEQKQLFVEQHKHYLDEIIEQISEFSKRVILADANLDKVLSAYNKHRDKPIREQAENIIHLFTLTNLGAPAAFKYFDTTIDRKRYTSTKEVLDATLIHQSITGLYETRIDLSQLGGDGGGGGGGSGSSGGTLNIEDEYRLHETSKEPDVPLGSTWLSDFPQAWAETGGMGLAVRQAPLIIPLKATSTPVSIKQYPMSQEARLGIKPHIQRLLDQGILVPCQSPWNTPLLPVKKPGTNDYRPVQDLREVNKRVEDIHPTVPNPYNLLSGLPPSHQWYTVLDLKDAFFCLRLHPTSQPLFAFEWRDPEMGISGQLTWTRLPQGFKNSPTLFNEALHRDLADFRIQHPDLILLQYVDDLLLAATSEQDCQRGTRALLQTLGNLGYRASAKKAQICQKQVKYLGYLLKEGQRWLTEARKETVMGQPTPKTPRQLREFLGKAGFCRLFIPGFAEMAAPLYPLTKPGTLFNWGPDQQKAYQEIKQALLTAPALGLPDLTKPFELFVDEKQGYAKGVLTQKLGPWRRPVAYLSKKLDPVAAGWPPCLRMVAAIAVLTKDAGKLTMGQPLVILAPHAVEALVKQPPDRWLSNARMTHYQAMLLDTDRVQFGPVVALNPATLLPLPEKEAPHDCLEILAETHGTRPDLTDQPIPDADYTWYTDGSSFLQEGQRRAGAAVTTETEVIWARALPAGTSAQRAELIALTQALKMAEGKKLNVYTDSRYAFATAHVHGEIYRRRGWLTSEGREIKNKNEILALLKALFLPKRLSIIHCPGHQKGNSAEARGNRMADQAAREAAMKAVLETSTLLAGKRTADGSEFEKRTADGSEFESPKKKAKVE

SEQ ID NO: 1025 - protein, 2094 aa, synthetic construct
MPAAKRVKLDGGDKKYSIGLDIGTNSVGWAVITDEYKVPSKKFKVLGNTDRHSIKKNLIGALLFDSGETAEATRLKRTARRRYTRRKNRICYLQEIFSNEMAKVDDSFFHRLEESFLVEEDKKHERHPIFGNIVDEVAYHEKYPTIYHLRKKLVDSTDKADLRLIYLALAHMIKFRGHFLIEGDLNPDNSDVDKLFIQLVQTYNQLFEENPINASGVDAKAILSARLSKSRRLENLIAQLPGEKKNGLFGNLIALSLGLTPNFKSNFDLAEDAKLQLSKDTYDDDLDNLLAQIGDQYADLFLAAKNLSDAILLSDILRVNTEITKAPLSASMIKRYDEHHQDLTLLKALVRQQLPEKYKEIFFDQSKNGYAGYIDGGASQEEFYKFIKPILEKMDGTEELLVKLNREDLLRKQRTFDNGSIPHQIHLGELHAILRRQEDFYPFLKDNREKIEKILTFRIPYYVGPLARGNSRFAWMTRKSEETITPWNFEEVVDKGASAQSFIERMTNFDKNLPNEKVLPKHSLLYEYFTVYNELTKVKYVTEGMRKPAFLSGEQKKAIVDLLFKTNRKVTVKQLKEDYFKKIECFDSVEISGVEDRFNASLGTYHDLLKIIKDKDFLDNEENEDILEDIVLTLTLFEDREMIEERLKTYAHLFDDKVMKQLKRRRYTGWGRLSRKLINGIRDKQSGKTILDFLKSDGFANRNFMQLIHDDSLTFKEDIQKAQVSGQGDSLHEHIANLAGSPAIKKGILQTVKVVDELVKVMGRHKPENIVIEMARENQTTQKGQKNSRERMKRIEEGIKELGSQILKEHPVENTQLQNEKLYLYYLQNGRDMYVDQELDINRLSDYDVDHIVPQSFLKDDSIDNKVLTRSDKARGKSDNVPSEEVVKKMKNYWRQLLNAKLITQRKFDNLTKAERGGLSELDKAGFIKRQLVETRQITKHVAQILDSRMNTKYDENDKLIREVKVITLKSKLVSDFRKDFQFYKVREINNYHHAHDAYLNAVVGTALIKKYPKLESEFVYGDYKVYDVRKMIAKSEQEIGKATAKYFFYSNIMNFFKTEITLANGEIRKRPLIETNGETGEIVWDKGRDFATVRKVLSMPQVNIVKKTEVQTGGFSKESILPKRNSDKLIARKKDWDPKKYGGFDSPTVAYSVLVVAKVEKGKSKKLKSVKELLGITIMERSSFEKNPIDFLEAKGYKEVKKDLIIKLPKYSLFELENGRKRMLASAGELQKGNELALPSKYVNFLYLASHYEKLKGSPEDNEQKQLFVEQHKHYLDEIIEQISEFSKRVILADANLDKVLSAYNKHRDKPIREQAENIIHLFTLTNLGAPAAFKYFDTTIDRKRYTSTKEVLDATLIHQSITGLYETRIDLSQLGGDGGGGGPAPGGSGGTLNIEDEYRLHETSKEPDVPLGSTWLSDFPQAWAETGGMGLAVRQAPLIIPLKATSTPVSIKQYPMSQEARLGIKPHIQRLLDQGILVPCQSPWNTPLLPVKKPGTNDYRPVQDLREVNKRVEDIHPTVPNPYNLLSGLPPSHQWYTVLDLKDAFFCLRLHPTSQPLFAFEWRDPEMGISGQLTWTRLPQGFKNSPTLFNEALHRDLADFRIQHPDLILLQYVDDLLLAATSEQDCQRGTRALLQTLGNLGYRASAKKAQICQKQVKYLGYLLKEGQRWLTEARKETVMGQPTPKTPRQLREFLGKAGFCRLFIPGFAEMAAPLYPLTKPGTLFNWGPDQQKAYQEIKQALLTAPALGLPDLTKPFELFVDEKQGYAKGVLTQKLGPWRRPVAYLSKKLDPVAAGWPPCLRMVAAIAVLTKDAGKLTMGQPLVILAPHAVEALVKQPPDRWLSNARMTHYQAMLLDTDRVQFGPVVALNPATLLPLPEKEAPHDCLEILAETHGTRPDLTDQPIPDADYTWYTDGSSFLQEGQRRAGAAVTTETEVIWARALPAGTSAQRAELIALTQALKMAEGKKLNVYTDSRYAFATAHVHGEIYRRRGWLTSEGREIKNKNEILALLKALFLPKRLSIIHCPGHQKGNSAEARGNRMADQAAREAAMKAVLETSTLLAGKRTADGSEFEKRTADGSEFESPKKKAKVE

SEQ ID NO: 1026 - protein, 2110 aa, synthetic construct
MPAAKRVKLDGGDKKYSIGLDIGTNSVGWAVITDEYKVPSKKFKVLGNTDRHSIKKNLIGALLFDSGETAEATRLKRTARRRYTRRKNRICYLQEIFSNEMAKVDDSFFHRLEESFLVEEDKKHERHPIFGNIVDEVAYHEKYPTIYHLRKKLVDSTDKADLRLIYLALAHMIKFRGHFLIEGDLNPDNSDVDKLFIQLVQTYNQLFEENPINASGVDAKAILSARLSKSRRLENLIAQLPGEKKNGLFGNLIALSLGLTPNFKSNFDLAEDAKLQLSKDTYDDDLDNLLAQIGDQYADLFLAAKNLSDAILLSDILRVNTEITKAPLSASMIKRYDEHHQDLTLLKALVRQQLPEKYKEIFFDQSKNGYAGYIDGGASQEEFYKFIKPILEKMDGTEELLVKLNREDLLRKQRTFDNGSIPHQIHLGELHAILRRQEDFYPFLKDNREKIEKILTFRIPYYVGPLARGNSRFAWMTRKSEETITPWNFEEVVDKGASAQSFIERMTNFDKNLPNEKVLPKHSLLYEYFTVYNELTKVKYVTEGMRKPAFLSGEQKKAIVDLLFKTNRKVTVKQLKEDYFKKIECFDSVEISGVEDRFNASLGTYHDLLKIIKDKDFLDNEENEDILEDIVLTLTLFEDREMIEERLKTYAHLFDDKVMKQLKRRRYTGWGRLSRKLINGIRDKQSGKTILDFLKSDGFANRNFMQLIHDDSLTFKEDIQKAQVSGQGDSLHEHIANLAGSPAIKKGILQTVKVVDELVKVMGRHKPENIVIEMARENQTTQKGQKNSRERMKRIEEGIKELGSQILKEHPVENTQLQNEKLYLYYLQNGRDMYVDQELDINRLSDYDVDHIVPQSFLKDDSIDNKVLTRSDKARGKSDNVPSEEVVKKMKNYWRQLLNAKLITQRKFDNLTKAERGGLSELDKAGFIKRQLVETRQITKHVAQILDSRMNTKYDENDKLIREVKVITLKSKLVSDFRKDFQFYKVREINNYHHAHDAYLNAVVGTALIKKYPKLESEFVYGDYKVYDVRKMIAKSEQEIGKATAKYFFYSNIMNFFKTEITLANGEIRKRPLIETNGETGEIVWDKGRDFATVRKVLSMPQVNIVKKTEVQTGGFSKESILPKRNSDKLIARKKDWDPKKYGGFDSPTVAYSVLVVAKVEKGKSKKLKSVKELLGITIMERSSFEKNPIDFLEAKGYKEVKKDLIIKLPKYSLFELENGRKRMLASAGELQKGNELALPSKYVNFLYLASHYEKLKGSPEDNEQKQLFVEQHKHYLDEIIEQISEFSKRVILADANLDKVLSAYNKHRDKPIREQAENIIHLFTLTNLGAPAAFKYFDTTIDRKRYTSTKEVLDATLIHQSITGLYETRIDLSQLGGDGGGGGGSGGGGSGGGGSGGGGSGGGGSGGTLNIEDEYRLHETSKEPDVPLGSTWLSDFPQAWAETGGMGLAVRQAPLIIPLKATSTPVSIKQYPMSQEARLGIKPHIQRLLDQGILVPCQSPWNTPLLPVKKPGTNDYRPVQDLREVNKRVEDIHPTVPNPYNLLSGLPPSHQWYTVLDLKDAFFCLRLHPTSQPLFAFEWRDPEMGISGQLTWTRLPQGFKNSPTLFNEALHRDLADFRIQHPDLILLQYVDDLLLAATSEQDCQRGTRALLQTLGNLGYRASAKKAQICQKQVKYLGYLLKEGQRWLTEARKETVMGQPTPKTPRQLREFLGKAGFCRLFIPGFAEMAAPLYPLTKPGTLFNWGPDQQKAYQEIKQALLTAPALGLPDLTKPFELFVDEKQGYAKGVLTQKLGPWRRPVAYLSKKLDPVAAGWPPCLRMVAAIAVLTKDAGKLTMGQPLVILAPHAVEALVKQPPDRWLSNARMTHYQAMLLDTDRVQFGPVVALNPATLLPLPEKEAPHDCLEILAETHGTRPDLTDQPIPDADYTWYTDGSSFLQEGQRRAGAAVTTETEVIWARALPAGTSAQRAELIALTQALKMAEGKKLNVYTDSRYAFATAHVHGEIYRRRGWLTSEGREIKNKNEILALLKALFLPKRLSIIHCPGHQKGNSAEARGNRMADQAAREAAMKAVLETSTLLAGKRTADGSEFEKRTADGSEFESPKKKAKVE

SEQ ID NO: 1027 - protein, 2096 aa, synthetic construct
MPAAKRVKLDGGDKKYSIGLDIGTNSVGWAVITDEYKVPSKKFKVLGNTDRHSIKKNLIGALLFDSGETAEATRLKRTARRRYTRRKNRICYLQEIFSNEMAKVDDSFFHRLEESFLVEEDKKHERHPIFGNIVDEVAYHEKYPTIYHLRKKLVDSTDKADLRLIYLALAHMIKFRGHFLIEGDLNPDNSDVDKLFIQLVQTYNQLFEENPINASGVDAKAILSARLSKSRRLENLIAQLPGEKKNGLFGNLIALSLGLTPNFKSNFDLAEDAKLQLSKDTYDDDLDNLLAQIGDQYADLFLAAKNLSDAILLSDILRVNTEITKAPLSASMIKRYDEHHQDLTLLKALVRQQLPEKYKEIFFDQSKNGYAGYIDGGASQEEFYKFIKPILEKMDGTEELLVKLNREDLLRKQRTFDNGSIPHQIHLGELHAILRRQEDFYPFLKDNREKIEKILTFRIPYYVGPLARGNSRFAWMTRKSEETITPWNFEEVVDKGASAQSFIERMTNFDKNLPNEKVLPKHSLLYEYFTVYNELTKVKYVTEGMRKPAFLSGEQKKAIVDLLFKTNRKVTVKQLKEDYFKKIECFDSVEISGVEDRFNASLGTYHDLLKIIKDKDFLDNEENEDILEDIVLTLTLFEDREMIEERLKTYAHLFDDKVMKQLKRRRYTGWGRLSRKLINGIRDKQSGKTILDFLKSDGFANRNFMQLIHDDSLTFKEDIQKAQVSGQGDSLHEHIANLAGSPAIKKGILQTVKVVDELVKVMGRHKPENIVIEMARENQTTQKGQKNSRERMKRIEEGIKELGSQILKEHPVENTQLQNEKLYLYYLQNGRDMYVDQELDINRLSDYDVDHIVPQSFLKDDSIDNKVLTRSDKARGKSDNVPSEEVVKKMKNYWRQLLNAKLITQRKFDNLTKAERGGLSELDKAGFIKRQLVETRQITKHVAQILDSRMNTKYDENDKLIREVKVITLKSKLVSDFRKDFQFYKVREINNYHHAHDAYLNAVVGTALIKKYPKLESEFVYGDYKVYDVRKMIAKSEQEIGKATAKYFFYSNIMNFFKTEITLANGEIRKRPLIETNGETGEIVWDKGRDFATVRKVLSMPQVNIVKKTEVQTGGFSKESILPKRNSDKLIARKKDWDPKKYGGFDSPTVAYSVLVVAKVEKGKSKKLKSVKELLGITIMERSSFEKNPIDFLEAKGYKEVKKDLIIKLPKYSLFELENGRKRMLASAGELQKGNELALPSKYVNFLYLASHYEKLKGSPEDNEQKQLFVEQHKHYLDEIIEQISEFSKRVILADANLDKVLSAYNKHRDKPIREQAENIIHLFTLTNLGAPAAFKYFDTTIDRKRYTSTKEVLDATLIHQSITGLYETRIDLSQLGGDGGGSSEAAAKPAPGGTLNIEDEYRLHETSKEPDVPLGSTWLSDFPQAWAETGGMGLAVRQAPLIIPLKATSTPVSIKQYPMSQEARLGIKPHIQRLLDQGILVPCQSPWNTPLLPVKKPGTNDYRPVQDLREVNKRVEDIHPTVPNPYNLLSGLPPSHQWYTVLDLKDAFFCLRLHPTSQPLFAFEWRDPEMGISGQLTWTRLPQGFKNSPTLFNEALHRDLADFRIQHPDLILLQYVDDLLLAATSEQDCQRGTRALLQTLGNLGYRASAKKAQICQKQVKYLGYLLKEGQRWLTEARKETVMGQPTPKTPRQLREFLGKAGFCRLFIPGFAEMAAPLYPLTKPGTLFNWGPDQQKAYQEIKQALLTAPALGLPDLTKPFELFVDEKQGYAKGVLTQKLGPWRRPVAYLSKKLDPVAAGWPPCLRMVAAIAVLTKDAGKLTMGQPLVILAPHAVEALVKQPPDRWLSNARMTHYQAMLLDTDRVQFGPVVALNPATLLPLPEKEAPHDCLEILAETHGTRPDLTDQPIPDADYTWYTDGSSFLQEGQRRAGAAVTTETEVIWARALPAGTSAQRAELIALTQALKMAEGKKLNVYTDSRYAFATAHVHGEIYRRRGWLTSEGREIKNKNEILALLKALFLPKRLSIIHCPGHQKGNSAEARGNRMADQAAREAAMKAVLETSTLLAGKRTADGSEFEKRTADGSEFESPKKKAKVE

SEQ ID NO: 1028 - protein, 2101 aa, synthetic construct
MPAAKRVKLDGGDKKYSIGLDIGTNSVGWAVITDEYKVPSKKFKVLGNTDRHSIKKNLIGALLFDSGETAEATRLKRTARRRYTRRKNRICYLQEIFSNEMAKVDDSFFHRLEESFLVEEDKKHERHPIFGNIVDEVAYHEKYPTIYHLRKKLVDSTDKADLRLIYLALAHMIKFRGHFLIEGDLNPDNSDVDKLFIQLVQTYNQLFEENPINASGVDAKAILSARLSKSRRLENLIAQLPGEKKNGLFGNLIALSLGLTPNFKSNFDLAEDAKLQLSKDTYDDDLDNLLAQIGDQYADLFLAAKNLSDAILLSDILRVNTEITKAPLSASMIKRYDEHHQDLTLLKALVRQQLPEKYKEIFFDQSKNGYAGYIDGGASQEEFYKFIKPILEKMDGTEELLVKLNREDLLRKQRTFDNGSIPHQIHLGELHAILRRQEDFYPFLKDNREKIEKILTFRIPYYVGPLARGNSRFAWMTRKSEETITPWNFEEVVDKGASAQSFIERMTNFDKNLPNEKVLPKHSLLYEYFTVYNELTKVKYVTEGMRKPAFLSGEQKKAIVDLLFKTNRKVTVKQLKEDYFKKIECFDSVEISGVEDRFNASLGTYHDLLKIIKDKDFLDNEENEDILEDIVLTLTLFEDREMIEERLKTYAHLFDDKVMKQLKRRRYTGWGRLSRKLINGIRDKQSGKTILDFLKSDGFANRNFMQLIHDDSLTFKEDIQKAQVSGQGDSLHEHIANLAGSPAIKKGILQTVKVVDELVKVMGRHKPENIVIEMARENQTTQKGQKNSRERMKRIEEGIKELGSQILKEHPVENTQLQNEKLYLYYLQNGRDMYVDQELDINRLSDYDVDHIVPQSFLKDDSIDNKVLTRSDKARGKSDNVPSEEVVKKMKNYWRQLLNAKLITQRKFDNLTKAERGGLSELDKAGFIKRQLVETRQITKHVAQILDSRMNTKYDENDKLIREVKVITLKSKLVSDFRKDFQFYKVREINNYHHAHDAYLNAVVGTALIKKYPKLESEFVYGDYKVYDVRKMIAKSEQEIGKATAKYFFYSNIMNFFKTEITLANGEIRKRPLIETNGETGEIVWDKGRDFATVRKVLSMPQVNIVKKTEVQTGGFSKESILPKRNSDKLIARKKDWDPKKYGGFDSPTVAYSVLVVAKVEKGKSKKLKSVKELLGITIMERSSFEKNPIDFLEAKGYKEVKKDLIIKLPKYSLFELENGRKRMLASAGELQKGNELALPSKYVNFLYLASHYEKLKGSPEDNEQKQLFVEQHKHYLDEIIEQISEFSKRVILADANLDKVLSAYNKHRDKPIREQAENIIHLFTLTNLGAPAAFKYFDTTIDRKRYTSTKEVLDATLIHQSITGLYETRIDLSQLGGDGGSGSETPGTSESATPESGGTLNIEDEYRLHETSKEPDVPLGSTWLSDFPQAWAETGGMGLAVRQAPLIIPLKATSTPVSIKQYPMSQEARLGIKPHIQRLLDQGILVPCQSPWNTPLLPVKKPGTNDYRPVQDLREVNKRVEDIHPTVPNPYNLLSGLPPSHQWYTVLDLKDAFFCLRLHPTSQPLFAFEWRDPEMGISGQLTWTRLPQGFKNSPTLFNEALHRDLADFRIQHPDLILLQYVDDLLLAATSEQDCQRGTRALLQTLGNLGYRASAKKAQICQKQVKYLGYLLKEGQRWLTEARKETVMGQPTPKTPRQLREFLGKAGFCRLFIPGFAEMAAPLYPLTKPGTLFNWGPDQQKAYQEIKQALLTAPALGLPDLTKPFELFVDEKQGYAKGVLTQKLGPWRRPVAYLSKKLDPVAAGWPPCLRMVAAIAVLTKDAGKLTMGQPLVILAPHAVEALVKQPPDRWLSNARMTHYQAMLLDTDRVQFGPVVALNPATLLPLPEKEAPHDCLEILAETHGTRPDLTDQPIPDADYTWYTDGSSFLQEGQRRAGAAVTTETEVIWARALPAGTSAQRAELIALTQALKMAEGKKLNVYTDSRYAFATAHVHGEIYRRRGWLTSEGREIKNKNEILALLKALFLPKRLSIIHCPGHQKGNSAEARGNRMADQAAREAAMKAVLETSTLLAGKRTADGSEFEKRTADGSEFESPKKKAKVE

SEQ ID NO: 1029 - protein, 2110 aa, synthetic construct
MPAAKRVKLDGGDKKYSIGLDIGTNSVGWAVITDEYKVPSKKFKVLGNTDRHSIKKNLIGALLFDSGETAEATRLKRTARRRYTRRKNRICYLQEIFSNEMAKVDDSFFHRLEESFLVEEDKKHERHPIFGNIVDEVAYHEKYPTIYHLRKKLVDSTDKADLRLIYLALAHMIKFRGHFLIEGDLNPDNSDVDKLFIQLVQTYNQLFEENPINASGVDAKAILSARLSKSRRLENLIAQLPGEKKNGLFGNLIALSLGLTPNFKSNFDLAEDAKLQLSKDTYDDDLDNLLAQIGDQYADLFLAAKNLSDAILLSDILRVNTEITKAPLSASMIKRYDEHHQDLTLLKALVRQQLPEKYKEIFFDQSKNGYAGYIDGGASQEEFYKFIKPILEKMDGTEELLVKLNREDLLRKQRTFDNGSIPHQIHLGELHAILRRQEDFYPFLKDNREKIEKILTFRIPYYVGPLARGNSRFAWMTRKSEETITPWNFEEVVDKGASAQSFIERMTNFDKNLPNEKVLPKHSLLYEYFTVYNELTKVKYVTEGMRKPAFLSGEQKKAIVDLLFKTNRKVTVKQLKEDYFKKIECFDSVEISGVEDRFNASLGTYHDLLKIIKDKDFLDNEENEDILEDIVLTLTLFEDREMIEERLKTYAHLFDDKVMKQLKRRRYTGWGRLSRKLINGIRDKQSGKTILDFLKSDGFANRNFMQLIHDDSLTFKEDIQKAQVSGQGDSLHEHIANLAGSPAIKKGILQTVKVVDELVKVMGRHKPENIVIEMARENQTTQKGQKNSRERMKRIEEGIKELGSQILKEHPVENTQLQNEKLYLYYLQNGRDMYVDQELDINRLSDYDVDHIVPQSFLKDDSIDNKVLTRSDKARGKSDNVPSEEVVKKMKNYWRQLLNAKLITQRKFDNLTKAERGGLSELDKAGFIKRQLVETRQITKHVAQILDSRMNTKYDENDKLIREVKVITLKSKLVSDFRKDFQFYKVREINNYHHAHDAYLNAVVGTALIKKYPKLESEFVYGDYKVYDVRKMIAKSEQEIGKATAKYFFYSNIMNFFKTEITLANGEIRKRPLIETNGETGEIVWDKGRDFATVRKVLSMPQVNIVKKTEVQTGGFSKESILPKRNSDKLIARKKDWDPKKYGGFDSPTVAYSVLVVAKVEKGKSKKLKSVKELLGITIMERSSFEKNPIDFLEAKGYKEVKKDLIIKLPKYSLFELENGRKRMLASAGELQKGNELALPSKYVNFLYLASHYEKLKGSPEDNEQKQLFVEQHKHYLDEIIEQISEFSKRVILADANLDKVLSAYNKHRDKPIREQAENIIHLFTLTNLGAPAAFKYFDTTIDRKRYTSTKEVLDATLIHQSITGLYETRIDLSQLGGDGGEAAAKEAAAKEAAAKEAAAKEAAAKGGTLNIEDEYRLHETSKEPDVPLGSTWLSDFPQAWAETGGMGLAVRQAPLIIPLKATSTPVSIKQYPMSQEARLGIKPHIQRLLDQGILVPCQSPWNTPLLPVKKPGTNDYRPVQDLREVNKRVEDIHPTVPNPYNLLSGLPPSHQWYTVLDLKDAFFCLRLHPTSQPLFAFEWRDPEMGISGQLTWTRLPQGFKNSPTLFNEALHRDLADFRIQHPDLILLQYVDDLLLAATSEQDCQRGTRALLQTLGNLGYRASAKKAQICQKQVKYLGYLLKEGQRWLTEARKETVMGQPTPKTPRQLREFLGKAGFCRLFIPGFAEMAAPLYPLTKPGTLFNWGPDQQKAYQEIKQALLTAPALGLPDLTKPFELFVDEKQGYAKGVLTQKLGPWRRPVAYLSKKLDPVAAGWPPCLRMVAAIAVLTKDAGKLTMGQPLVILAPHAVEALVKQPPDRWLSNARMTHYQAMLLDTDRVQFGPVVALNPATLLPLPEKEAPHDCLEILAETHGTRPDLTDQPIPDADYTWYTDGSSFLQEGQRRAGAAVTTETEVIWARALPAGTSAQRAELIALTQALKMAEGKKLNVYTDSRYAFATAHVHGEIYRRRGWLTSEGREIKNKNEILALLKALFLPKRLSIIHCPGHQKGNSAEARGNRMADQAAREAAMKAVLETSTLLAGKRTADGSEFEKRTADGSEFESPKKKAKVE

SEQ ID NO: 1030 - protein, 2091 aa, synthetic construct
MPAAKRVKLDGGDKKYSIGLDIGTNSVGWAVITDEYKVPSKKFKVLGNTDRHSIKKNLIGALLFDSGETAEATRLKRTARRRYTRRKNRICYLQEIFSNEMAKVDDSFFHRLEESFLVEEDKKHERHPIFGNIVDEVAYHEKYPTIYHLRKKLVDSTDKADLRLIYLALAHMIKFRGHFLIEGDLNPDNSDVDKLFIQLVQTYNQLFEENPINASGVDAKAILSARLSKSRRLENLIAQLPGEKKNGLFGNLIALSLGLTPNFKSNFDLAEDAKLQLSKDTYDDDLDNLLAQIGDQYADLFLAAKNLSDAILLSDILRVNTEITKAPLSASMIKRYDEHHQDLTLLKALVRQQLPEKYKEIFFDQSKNGYAGYIDGGASQEEFYKFIKPILEKMDGTEELLVKLNREDLLRKQRTFDNGSIPHQIHLGELHAILRRQEDFYPFLKDNREKIEKILTFRIPYYVGPLARGNSRFAWMTRKSEETITPWNFEEVVDKGASAQSFIERMTNFDKNLPNEKVLPKHSLLYEYFTVYNELTKVKYVTEGMRKPAFLSGEQKKAIVDLLFKTNRKVTVKQLKEDYFKKIECFDSVEISGVEDRFNASLGTYHDLLKIIKDKDFLDNEENEDILEDIVLTLTLFEDREMIEERLKTYAHLFDDKVMKQLKRRRYTGWGRLSRKLINGIRDKQSGKTILDFLKSDGFANRNFMQLIHDDSLTFKEDIQKAQVSGQGDSLHEHIANLAGSPAIKKGILQTVKVVDELVKVMGRHKPENIVIEMARENQTTQKGQKNSRERMKRIEEGIKELGSQILKEHPVENTQLQNEKLYLYYLQNGRDMYVDQELDINRLSDYDVDHIVPQSFLKDDSIDNKVLTRSDKARGKSDNVPSEEVVKKMKNYWRQLLNAKLITQRKFDNLTKAERGGLSELDKAGFIKRQLVETRQITKHVAQILDSRMNTKYDENDKLIREVKVITLKSKLVSDFRKDFQFYKVREINNYHHAHDAYLNAVVGTALIKKYPKLESEFVYGDYKVYDVRKMIAKSEQEIGKATAKYFFYSNIMNFFKTEITLANGEIRKRPLIETNGETGEIVWDKGRDFATVRKVLSMPQVNIVKKTEVQTGGFSKESILPKRNSDKLIARKKDWDPKKYGGFDSPTVAYSVLVVAKVEKGKSKKLKSVKELLGITIMERSSFEKNPIDFLEAKGYKEVKKDLIIKLPKYSLFELENGRKRMLASAGELQKGNELALPSKYVNFLYLASHYEKLKGSPEDNEQKQLFVEQHKHYLDEIIEQISEFSKRVILADANLDKVLSAYNKHRDKPIREQAENIIHLFTLTNLGAPAAFKYFDTTIDRKRYTSTKEVLDATLIHQSITGLYETRIDLSQLGGDGGPAPGGSGGTLNIEDEYRLHETSKEPDVPLGSTWLSDFPQAWAETGGMGLAVRQAPLIIPLKATSTPVSIKQYPMSQEARLGIKPHIQRLLDQGILVPCQSPWNTPLLPVKKPGTNDYRPVQDLREVNKRVEDIHPTVPNPYNLLSGLPPSHQWYTVLDLKDAFFCLRLHPTSQPLFAFEWRDPEMGISGQLTWTRLPQGFKNSPTLFNEALHRDLADFRIQHPDLILLQYVDDLLLAATSEQDCQRGTRALLQTLGNLGYRASAKKAQICQKQVKYLGYLLKEGQRWLTEARKETVMGQPTPKTPRQLREFLGKAGFCRLFIPGFAEMAAPLYPLTKPGTLFNWGPDQQKAYQEIKQALLTAPALGLPDLTKPFELFVDEKQGYAKGVLTQKLGPWRRPVAYLSKKLDPVAAGWPPCLRMVAAIAVLTKDAGKLTMGQPLVILAPHAVEALVKQPPDRWLSNARMTHYQAMLLDTDRVQFGPVVALNPATLLPLPEKEAPHDCLEILAETHGTRPDLTDQPIPDADYTWYTDGSSFLQEGQRRAGAAVTTETEVIWARALPAGTSAQRAELIALTQALKMAEGKKLNVYTDSRYAFATAHVHGEIYRRRGWLTSEGREIKNKNEILALLKALFLPKRLSIIHCPGHQKGNSAEARGNRMADQAAREAAMKAVLETSTLLAGKRTADGSEFEKRTADGSEFESPKKKAKVE

SEQ ID NO: 1031 - protein, 2091 aa, synthetic construct
MPAAKRVKLDGGDKKYSIGLDIGTNSVGWAVITDEYKVPSKKFKVLGNTDRHSIKKNLIGALLFDSGETAEATRLKRTARRRYTRRKNRICYLQEIFSNEMAKVDDSFFHRLEESFLVEEDKKHERHPIFGNIVDEVAYHEKYPTIYHLRKKLVDSTDKADLRLIYLALAHMIKFRGHFLIEGDLNPDNSDVDKLFIQLVQTYNQLFEENPINASGVDAKAILSARLSKSRRLENLIAQLPGEKKNGLFGNLIALSLGLTPNFKSNFDLAEDAKLQLSKDTYDDDLDNLLAQIGDQYADLFLAAKNLSDAILLSDILRVNTEITKAPLSASMIKRYDEHHQDLTLLKALVRQQLPEKYKEIFFDQSKNGYAGYIDGGASQEEFYKFIKPILEKMDGTEELLVKLNREDLLRKQRTFDNGSIPHQIHLGELHAILRRQEDFYPFLKDNREKIEKILTFRIPYYVGPLARGNSRFAWMTRKSEETITPWNFEEVVDKGASAQSFIERMTNFDKNLPNEKVLPKHSLLYEYFTVYNELTKVKYVTEGMRKPAFLSGEQKKAIVDLLFKTNRKVTVKQLKEDYFKKIECFDSVEISGVEDRFNASLGTYHDLLKIIKDKDFLDNEENEDILEDIVLTLTLFEDREMIEERLKTYAHLFDDKVMKQLKRRRYTGWGRLSRKLINGIRDKQSGKTILDFLKSDGFANRNFMQLIHDDSLTFKEDIQKAQVSGQGDSLHEHIANLAGSPAIKKGILQTVKVVDELVKVMGRHKPENIVIEMARENQTTQKGQKNSRERMKRIEEGIKELGSQILKEHPVENTQLQNEKLYLYYLQNGRDMYVDQELDINRLSDYDVDHIVPQSFLKDDSIDNKVLTRSDKARGKSDNVPSEEVVKKMKNYWRQLLNAKLITQRKFDNLTKAERGGLSELDKAGFIKRQLVETRQITKHVAQILDSRMNTKYDENDKLIREVKVITLKSKLVSDFRKDFQFYKVREINNYHHAHDAYLNAVVGTALIKKYPKLESEFVYGDYKVYDVRKMIAKSEQEIGKATAKYFFYSNIMNFFKTEITLANGEIRKRPLIETNGETGEIVWDKGRDFATVRKVLSMPQVNIVKKTEVQTGGFSKESILPKRNSDKLIARKKDWDPKKYGGFDSPTVAYSVLVVAKVEKGKSKKLKSVKELLGITIMERSSFEKNPIDFLEAKGYKEVKKDLIIKLPKYSLFELENGRKRMLASAGELQKGNELALPSKYVNFLYLASHYEKLKGSPEDNEQKQLFVEQHKHYLDEIIEQISEFSKRVILADANLDKVLSAYNKHRDKPIREQAENIIHLFTLTNLGAPAAFKYFDTTIDRKRYTSTKEVLDATLIHQSITGLYETRIDLSQLGGDGGGGGGSSGGTLNIEDEYRLHETSKEPDVPLGSTWLSDFPQAWAETGGMGLAVRQAPLIIPLKATSTPVSIKQYPMSQEARLGIKPHIQRLLDQGILVPCQSPWNTPLLPVKKPGTNDYRPVQDLREVNKRVEDIHPTVPNPYNLLSGLPPSHQWYTVLDLKDAFFCLRLHPTSQPLFAFEWRDPEMGISGQLTWTRLPQGFKNSPTLFNEALHRDLADFRIQHPDLILLQYVDDLLLAATSEQDCQRGTRALLQTLGNLGYRASAKKAQICQKQVKYLGYLLKEGQRWLTEARKETVMGQPTPKTPRQLREFLGKAGFCRLFIPGFAEMAAPLYPLTKPGTLFNWGPDQQKAYQEIKQALLTAPALGLPDLTKPFELFVDEKQGYAKGVLTQKLGPWRRPVAYLSKKLDPVAAGWPPCLRMVAAIAVLTKDAGKLTMGQPLVILAPHAVEALVKQPPDRWLSNARMTHYQAMLLDTDRVQFGPVVALNPATLLPLPEKEAPHDCLEILAETHGTRPDLTDQPIPDADYTWYTDGSSFLQEGQRRAGAAVTTETEVIWARALPAGTSAQRAELIALTQALKMAEGKKLNVYTDSRYAFATAHVHGEIYRRRGWLTSEGREIKNKNEILALLKALFLPKRLSIIHCPGHQKGNSAEARGNRMADQAAREAAMKAVLETSTLLAGKRTADGSEFEKRTADGSEFESPKKKAKVE

SEQ ID NO: 1032 - protein, 2094 aa, synthetic construct
MPAAKRVKLDGGDKKYSIGLDIGTNSVGWAVITDEYKVPSKKFKVLGNTDRHSIKKNLIGALLFDSGETAEATRLKRTARRRYTRRKNRICYLQEIFSNEMAKVDDSFFHRLEESFLVEEDKKHERHPIFGNIVDEVAYHEKYPTIYHLRKKLVDSTDKADLRLIYLALAHMIKFRGHFLIEGDLNPDNSDVDKLFIQLVQTYNQLFEENPINASGVDAKAILSARLSKSRRLENLIAQLPGEKKNGLFGNLIALSLGLTPNFKSNFDLAEDAKLQLSKDTYDDDLDNLLAQIGDQYADLFLAAKNLSDAILLSDILRVNTEITKAPLSASMIKRYDEHHQDLTLLKALVRQQLPEKYKEIFFDQSKNGYAGYIDGGASQEEFYKFIKPILEKMDGTEELLVKLNREDLLRKQRTFDNGSIPHQIHLGELHAILRRQEDFYPFLKDNREKIEKILTFRIPYYVGPLARGNSRFAWMTRKSEETITPWNFEEVVDKGASAQSFIERMTNFDKNLPNEKVLPKHSLLYEYFTVYNELTKVKYVTEGMRKPAFLSGEQKKAIVDLLFKTNRKVTVKQLKEDYFKKIECFDSVEISGVEDRFNASLGTYHDLLKIIKDKDFLDNEENEDILEDIVLTLTLFEDREMIEERLKTYAHLFDDKVMKQLKRRRYTGWGRLSRKLINGIRDKQSGKTILDFLKSDGFANRNFMQLIHDDSLTFKEDIQKAQVSGQGDSLHEHIANLAGSPAIKKGILQTVKVVDELVKVMGRHKPENIVIEMARENQTTQKGQKNSRERMKRIEEGIKELGSQILKEHPVENTQLQNEKLYLYYLQNGRDMYVDQELDINRLSDYDVDHIVPQSFLKDDSIDNKVLTRSDKARGKSDNVPSEEVVKKMKNYWRQLLNAKLITQRKFDNLTKAERGGLSELDKAGFIKRQLVETRQITKHVAQILDSRMNTKYDENDKLIREVKVITLKSKLVSDFRKDFQFYKVREINNYHHAHDAYLNAVVGTALIKKYPKLESEFVYGDYKVYDVRKMIAKSEQEIGKATAKYFFYSNIMNFFKTEITLANGEIRKRPLIETNGETGEIVWDKGRDFATVRKVLSMPQVNIVKKTEVQTGGFSKESILPKRNSDKLIARKKDWDPKKYGGFDSPTVAYSVLVVAKVEKGKSKKLKSVKELLGITIMERSSFEKNPIDFLEAKGYKEVKKDLIIKLPKYSLFELENGRKRMLASAGELQKGNELALPSKYVNFLYLASHYEKLKGSPEDNEQKQLFVEQHKHYLDEIIEQISEFSKRVILADANLDKVLSAYNKHRDKPIREQAENIIHLFTLTNLGAPAAFKYFDTTIDRKRYTSTKEVLDATLIHQSITGLYETRIDLSQLGGDGGPAPAPAPAPGGTLNIEDEYRLHETSKEPDVPLGSTWLSDFPQAWAETGGMGLAVRQAPLIIPLKATSTPVSIKQYPMSQEARLGIKPHIQRLLDQGILVPCQSPWNTPLLPVKKPGTNDYRPVQDLREVNKRVEDIHPTVPNPYNLLSGLPPSHQWYTVLDLKDAFFCLRLHPTSQPLFAFEWRDPEMGISGQLTWTRLPQGFKNSPTLFNEALHRDLADFRIQHPDLILLQYVDDLLLAATSEQDCQRGTRALLQTLGNLGYRASAKKAQICQKQVKYLGYLLKEGQRWLTEARKETVMGQPTPKTPRQLREFLGKAGFCRLFIPGFAEMAAPLYPLTKPGTLFNWGPDQQKAYQEIKQALLTAPALGLPDLTKPFELFVDEKQGYAKGVLTQKLGPWRRPVAYLSKKLDPVAAGWPPCLRMVAAIAVLTKDAGKLTMGQPLVILAPHAVEALVKQPPDRWLSNARMTHYQAMLLDTDRVQFGPVVALNPATLLPLPEKEAPHDCLEILAETHGTRPDLTDQPIPDADYTWYTDGSSFLQEGQRRAGAAVTTETEVIWARALPAGTSAQRAELIALTQALKMAEGKKLNVYTDSRYAFATAHVHGEIYRRRGWLTSEGREIKNKNEILALLKALFLPKRLSIIHCPGHQKGNSAEARGNRMADQAAREAAMKAVLETSTLLAGKRTADGSEFEKRTADGSEFESPKKKAKVE

SEQ ID NO: 1033 - protein, 2094 aa, synthetic construct
MPAAKRVKLDGGDKKYSIGLDIGTNSVGWAVITDEYKVPSKKFKVLGNTDRHSIKKNLIGALLFDSGETAEATRLKRTARRRYTRRKNRICYLQEIFSNEMAKVDDSFFHRLEESFLVEEDKKHERHPIFGNIVDEVAYHEKYPTIYHLRKKLVDSTDKADLRLIYLALAHMIKFRGHFLIEGDLNPDNSDVDKLFIQLVQTYNQLFEENPINASGVDAKAILSARLSKSRRLENLIAQLPGEKKNGLFGNLIALSLGLTPNFKSNFDLAEDAKLQLSKDTYDDDLDNLLAQIGDQYADLFLAAKNLSDAILLSDILRVNTEITKAPLSASMIKRYDEHHQDLTLLKALVRQQLPEKYKEIFFDQSKNGYAGYIDGGASQEEFYKFIKPILEKMDGTEELLVKLNREDLLRKQRTFDNGSIPHQIHLGELHAILRRQEDFYPFLKDNREKIEKILTFRIPYYVGPLARGNSRFAWMTRKSEETITPWNFEEVVDKGASAQSFIERMTNFDKNLPNEKVLPKHSLLYEYFTVYNELTKVKYVTEGMRKPAFLSGEQKKAIVDLLFKTNRKVTVKQLKEDYFKKIECFDSVEISGVEDRFNASLGTYHDLLKIIKDKDFLDNEENEDILEDIVLTLTLFEDREMIEERLKTYAHLFDDKVMKQLKRRRYTGWGRLSRKLINGIRDKQSGKTILDFLKSDGFANRNFMQLIHDDSLTFKEDIQKAQVSGQGDSLHEHIANLAGSPAIKKGILQTVKVVDELVKVMGRHKPENIVIEMARENQTTQKGQKNSRERMKRIEEGIKELGSQILKEHPVENTQLQNEKLYLYYLQNGRDMYVDQELDINRLSDYDVDHIVPQSFLKDDSIDNKVLTRSDKARGKSDNVPSEEVVKKMKNYWRQLLNAKLITQRKFDNLTKAERGGLSELDKAGFIKRQLVETRQITKHVAQILDSRMNTKYDENDKLIREVKVITLKSKLVSDFRKDFQFYKVREINNYHHAHDAYLNAVVGTALIKKYPKLESEFVYGDYKVYDVRKMIAKSEQEIGKATAKYFFYSNIMNFFKTEITLANGEIRKRPLIETNGETGEIVWDKGRDFATVRKVLSMPQVNIVKKTEVQTGGFSKESILPKRNSDKLIARKKDWDPKKYGGFDSPTVAYSVLVVAKVEKGKSKKLKSVKELLGITIMERSSFEKNPIDFLEAKGYKEVKKDLIIKLPKYSLFELENGRKRMLASAGELQKGNELALPSKYVNFLYLASHYEKLKGSPEDNEQKQLFVEQHKHYLDEIIEQISEFSKRVILADANLDKVLSAYNKHRDKPIREQAENIIHLFTLTNLGAPAAFKYFDTTIDRKRYTSTKEVLDATLIHQSITGLYETRIDLSQLGGDGGPAPGSSGGGGGTLNIEDEYRLHETSKEPDVPLGSTWLSDFPQAWAETGGMGLAVRQAPLIIPLKATSTPVSIKQYPMSQEARLGIKPHIQRLLDQGILVPCQSPWNTPLLPVKKPGTNDYRPVQDLREVNKRVEDIHPTVPNPYNLLSGLPPSHQWYTVLDLKDAFFCLRLHPTSQPLFAFEWRDPEMGISGQLTWTRLPQGFKNSPTLFNEALHRDLADFRIQHPDLILLQYVDDLLLAATSEQDCQRGTRALLQTLGNLGYRASAKKAQICQKQVKYLGYLLKEGQRWLTEARKETVMGQPTPKTPRQLREFLGKAGFCRLFIPGFAEMAAPLYPLTKPGTLFNWGPDQQKAYQEIKQALLTAPALGLPDLTKPFELFVDEKQGYAKGVLTQKLGPWRRPVAYLSKKLDPVAAGWPPCLRMVAAIAVLTKDAGKLTMGQPLVILAPHAVEALVKQPPDRWLSNARMTHYQAMLLDTDRVQFGPVVALNPATLLPLPEKEAPHDCLEILAETHGTRPDLTDQPIPDADYTWYTDGSSFLQEGQRRAGAAVTTETEVIWARALPAGTSAQRAELIALTQALKMAEGKKLNVYTDSRYAFATAHVHGEIYRRRGWLTSEGREIKNKNEILALLKALFLPKRLSIIHCPGHQKGNSAEARGNRMADQAAREAAMKAVLETSTLLAGKRTADGSEFEKRTADGSEFESPKKKAKVE

SEQ ID NO: 1034 - protein, 2096 aa, synthetic construct
MPAAKRVKLDGGDKKYSIGLDIGTNSVGWAVITDEYKVPSKKFKVLGNTDRHSIKKNLIGALLFDSGETAEATRLKRTARRRYTRRKNRICYLQEIFSNEMAKVDDSFFHRLEESFLVEEDKKHERHPIFGNIVDEVAYHEKYPTIYHLRKKLVDSTDKADLRLIYLALAHMIKFRGHFLIEGDLNPDNSDVDKLFIQLVQTYNQLFEENPINASGVDAKAILSARLSKSRRLENLIAQLPGEKKNGLFGNLIALSLGLTPNFKSNFDLAEDAKLQLSKDTYDDDLDNLLAQIGDQYADLFLAAKNLSDAILLSDILRVNTEITKAPLSASMIKRYDEHHQDLTLLKALVRQQLPEKYKEIFFDQSKNGYAGYIDGGASQEEFYKFIKPILEKMDGTEELLVKLNREDLLRKQRTFDNGSIPHQIHLGELHAILRRQEDFYPFLKDNREKIEKILTFRIPYYVGPLARGNSRFAWMTRKSEETITPWNFEEVVDKGASAQSFIERMTNFDKNLPNEKVLPKHSLLYEYFTVYNELTKVKYVTEGMRKPAFLSGEQKKAIVDLLFKTNRKVTVKQLKEDYFKKIECFDSVEISGVEDRFNASLGTYHDLLKIIKDKDFLDNEENEDILEDIVLTLTLFEDREMIEERLKTYAHLFDDKVMKQLKRRRYTGWGRLSRKLINGIRDKQSGKTILDFLKSDGFANRNFMQLIHDDSLTFKEDIQKAQVSGQGDSLHEHIANLAGSPAIKKGILQTVKVVDELVKVMGRHKPENIVIEMARENQTTQKGQKNSRERMKRIEEGIKELGSQILKEHPVENTQLQNEKLYLYYLQNGRDMYVDQELDINRLSDYDVDHIVPQSFLKDDSIDNKVLTRSDKARGKSDNVPSEEVVKKMKNYWRQLLNAKLITQRKFDNLTKAERGGLSELDKAGFIKRQLVETRQITKHVAQILDSRMNTKYDENDKLIREVKVITLKSKLVSDFRKDFQFYKVREINNYHHAHDAYLNAVVGTALIKKYPKLESEFVYGDYKVYDVRKMIAKSEQEIGKATAKYFFYSNIMNFFKTEITLANGEIRKRPLIETNGETGEIVWDKGRDFATVRKVLSMPQVNIVKKTEVQTGGFSKESILPKRNSDKLIARKKDWDPKKYGGFDSPTVAYSVLVVAKVEKGKSKKLKSVKELLGITIMERSSFEKNPIDFLEAKGYKEVKKDLIIKLPKYSLFELENGRKRMLASAGELQKGNELALPSKYVNFLYLASHYEKLKGSPEDNEQKQLFVEQHKHYLDEIIEQISEFSKRVILADANLDKVLSAYNKHRDKPIREQAENIIHLFTLTNLGAPAAFKYFDTTIDRKRYTSTKEVLDATLIHQSITGLYETRIDLSQLGGDGGPAPGGSEAAAKGGTLNIEDEYRLHETSKEPDVPLGSTWLSDFPQAWAETGGMGLAVRQAPLIIPLKATSTPVSIKQYPMSQEARLGIKPHIQRLLDQGILVPCQSPWNTPLLPVKKPGTNDYRPVQDLREVNKRVEDIHPTVPNPYNLLSGLPPSHQWYTVLDLKDAFFCLRLHPTSQPLFAFEWRDPEMGISGQLTWTRLPQGFKNSPTLFNEALHRDLADFRIQHPDLILLQYVDDLLLAATSEQDCQRGTRALLQTLGNLGYRASAKKAQICQKQVKYLGYLLKEGQRWLTEARKETVMGQPTPKTPRQLREFLGKAGFCRLFIPGFAEMAAPLYPLTKPGTLFNWGPDQQKAYQEIKQALLTAPALGLPDLTKPFELFVDEKQGYAKGVLTQKLGPWRRPVAYLSKKLDPVAAGWPPCLRMVAAIAVLTKDAGKLTMGQPLVILAPHAVEALVKQPPDRWLSNARMTHYQAMLLDTDRVQFGPVVALNPATLLPLPEKEAPHDCLEILAETHGTRPDLTDQPIPDADYTWYTDGSSFLQEGQRRAGAAVTTETEVIWARALPAGTSAQRAELIALTQALKMAEGKKLNVYTDSRYAFATAHVHGEIYRRRGWLTSEGREIKNKNEILALLKALFLPKRLSIIHCPGHQKGNSAEARGNRMADQAAREAAMKAVLETSTLLAGKRTADGSEFEKRTADGSEFESPKKKAKVE

SEQ ID NO: 1035 - protein, 2096 aa, synthetic construct
MPAAKRVKLDGGDKKYSIGLDIGTNSVGWAVITDEYKVPSKKFKVLGNTDRHSIKKNLIGALLFDSGETAEATRLKRTARRRYTRRKNRICYLQEIFSNEMAKVDDSFFHRLEESFLVEEDKKHERHPIFGNIVDEVAYHEKYPTIYHLRKKLVDSTDKADLRLIYLALAHMIKFRGHFLIEGDLNPDNSDVDKLFIQLVQTYNQLFEENPINASGVDAKAILSARLSKSRRLENLIAQLPGEKKNGLFGNLIALSLGLTPNFKSNFDLAEDAKLQLSKDTYDDDLDNLLAQIGDQYADLFLAAKNLSDAILLSDILRVNTEITKAPLSASMIKRYDEHHQDLTLLKALVRQQLPEKYKEIFFDQSKNGYAGYIDGGASQEEFYKFIKPILEKMDGTEELLVKLNREDLLRKQRTFDNGSIPHQIHLGELHAILRRQEDFYPFLKDNREKIEKILTFRIPYYVGPLARGNSRFAWMTRKSEETITPWNFEEVVDKGASAQSFIERMTNFDKNLPNEKVLPKHSLLYEYFTVYNELTKVKYVTEGMRKPAFLSGEQKKAIVDLLFKTNRKVTVKQLKEDYFKKIECFDSVEISGVEDRFNASLGTYHDLLKIIKDKDFLDNEENEDILEDIVLTLTLFEDREMIEERLKTYAHLFDDKVMKQLKRRRYTGWGRLSRKLINGIRDKQSGKTILDFLKSDGFANRNFMQLIHDDSLTFKEDIQKAQVSGQGDSLHEHIANLAGSPAIKKGILQTVKVVDELVKVMGRHKPENIVIEMARENQTTQKGQKNSRERMKRIEEGIKELGSQILKEHPVENTQLQNEKLYLYYLQNGRDMYVDQELDINRLSDYDVDHIVPQSFLKDDSIDNKVLTRSDKARGKSDNVPSEEVVKKMKNYWRQLLNAKLITQRKFDNLTKAERGGLSELDKAGFIKRQLVETRQITKHVAQILDSRMNTKYDENDKLIREVKVITLKSKLVSDFRKDFQFYKVREINNYHHAHDAYLNAVVGTALIKKYPKLESEFVYGDYKVYDVRKMIAKSEQEIGKATAKYFFYSNIMNFFKTEITLANGEIRKRPLIETNGETGEIVWDKGRDFATVRKVLSMPQVNIVKKTEVQTGGFSKESILPKRNSDKLIARKKDWDPKKYGGFDSPTVAYSVLVVAKVEKGKSKKLKSVKELLGITIMERSSFEKNPIDFLEAKGYKEVKKDLIIKLPKYSLFELENGRKRMLASAGELQKGNELALPSKYVNFLYLASHYEKLKGSPEDNEQKQLFVEQHKHYLDEIIEQISEFSKRVILADANLDKVLSAYNKHRDKPIREQAENIIHLFTLTNLGAPAAFKYFDTTIDRKRYTSTKEVLDATLIHQSITGLYETRIDLSQLGGDGGGGSEAAAKPAPGGTLNIEDEYRLHETSKEPDVPLGSTWLSDFPQAWAETGGMGLAVRQAPLIIPLKATSTPVSIKQYPMSQEARLGIKPHIQRLLDQGILVPCQSPWNTPLLPVKKPGTNDYRPVQDLREVNKRVEDIHPTVPNPYNLLSGLPPSHQWYTVLDLKDAFFCLRLHPTSQPLFAFEWRDPEMGISGQLTWTRLPQGFKNSPTLFNEALHRDLADFRIQHPDLILLQYVDDLLLAATSEQDCQRGTRALLQTLGNLGYRASAKKAQICQKQVKYLGYLLKEGQRWLTEARKETVMGQPTPKTPRQLREFLGKAGFCRLFIPGFAEMAAPLYPLTKPGTLFNWGPDQQKAYQEIKQALLTAPALGLPDLTKPFELFVDEKQGYAKGVLTQKLGPWRRPVAYLSKKLDPVAAGWPPCLRMVAAIAVLTKDAGKLTMGQPLVILAPHAVEALVKQPPDRWLSNARMTHYQAMLLDTDRVQFGPVVALNPATLLPLPEKEAPHDCLEILAETHGTRPDLTDQPIPDADYTWYTDGSSFLQEGQRRAGAAVTTETEVIWARALPAGTSAQRAELIALTQALKMAEGKKLNVYTDSRYAFATAHVHGEIYRRRGWLTSEGREIKNKNEILALLKALFLPKRLSIIHCPGHQKGNSAEARGNRMADQAAREAAMKAVLETSTLLAGKRTADGSEFEKRTADGSEFESPKKKAKVE

SEQ ID NO: 1036 - protein, 2118 aa, synthetic construct
MPAAKRVKLDGGDKKYSIGLDIGTNSVGWAVITDEYKVPSKKFKVLGNTDRHSIKKNLIGALLFDSGETAEATRLKRTARRRYTRRKNRICYLQEIFSNEMAKVDDSFFHRLEESFLVEEDKKHERHPIFGNIVDEVAYHEKYPTIYHLRKKLVDSTDKADLRLIYLALAHMIKFRGHFLIEGDLNPDNSDVDKLFIQLVQTYNQLFEENPINASGVDAKAILSARLSKSRRLENLIAQLPGEKKNGLFGNLIALSLGLTPNFKSNFDLAEDAKLQLSKDTYDDDLDNLLAQIGDQYADLFLAAKNLSDAILLSDILRVNTEITKAPLSASMIKRYDEHHQDLTLLKALVRQQLPEKYKEIFFDQSKNGYAGYIDGGASQEEFYKFIKPILEKMDGTEELLVKLNREDLLRKQRTFDNGSIPHQIHLGELHAILRRQEDFYPFLKDNREKIEKILTFRIPYYVGPLARGNSRFAWMTRKSEETITPWNFEEVVDKGASAQSFIERMTNFDKNLPNEKVLPKHSLLYEYFTVYNELTKVKYVTEGMRKPAFLSGEQKKAIVDLLFKTNRKVTVKQLKEDYFKKIECFDSVEISGVEDRFNASLGTYHDLLKIIKDKDFLDNEENEDILEDIVLTLTLFEDREMIEERLKTYAHLFDDKVMKQLKRRRYTGWGRLSRKLINGIRDKQSGKTILDFLKSDGFANRNFMQLIHDDSLTFKEDIQKAQVSGQGDSLHEHIANLAGSPAIKKGILQTVKVVDELVKVMGRHKPENIVIEMARENQTTQKGQKNSRERMKRIEEGIKELGSQILKEHPVENTQLQNEKLYLYYLQNGRDMYVDQELDINRLSDYDVDHIVPQSFLKDDSIDNKVLTRSDKARGKSDNVPSEEVVKKMKNYWRQLLNAKLITQRKFDNLTKAERGGLSELDKAGFIKRQLVETRQITKHVAQILDSRMNTKYDENDKLIREVKVITLKSKLVSDFRKDFQFYKVREINNYHHAHDAYLNAVVGTALIKKYPKLESEFVYGDYKVYDVRKMIAKSEQEIGKATAKYFFYSNIMNFFKTEITLANGEIRKRPLIETNGETGEIVWDKGRDFATVRKVLSMPQVNIVKKTEVQTGGFSKESILPKRNSDKLIARKKDWDPKKYGGFDSPTVAYSVLVVAKVEKGKSKKLKSVKELLGITIMERSSFEKNPIDFLEAKGYKEVKKDLIIKLPKYSLFELENGRKRMLASAGELQKGNELALPSKYVNFLYLASHYEKLKGSPEDNEQKQLFVEQHKHYLDEIIEQISEFSKRVILADANLDKVLSAYNKHRDKPIREQAENIIHLFTLTNLGAPAAFKYFDTTIDRKRYTSTKEVLDATLIHQSITGLYETRIDLSQLGGDGGSGGSSGGSSGSETPGTSESATPESSGGSSGGSSGGTLNIEDEYRLHETSKEPDVPLGSTWLSDFPQAWAETGGMGLAVRQAPLIIPLKATSTPVSIKQYPMSQEARLGIKPHIQRLLDQGILVPCQSPWNTPLLPVKKPGTNDYRPVQDLREVNKRVEDIHPTVPNPYNLLSGLPPSHQWYTVLDLKDAFFCLRLHPTSQPLFAFEWRDPEMGISGQLTWTRLPQGFKNSPTLFNEALHRDLADFRIQHPDLILLQYVDDLLLAATSEQDCQRGTRALLQTLGNLGYRASAKKAQICQKQVKYLGYLLKEGQRWLTEARKETVMGQPTPKTPRQLREFLGKAGFCRLFIPGFAEMAAPLYPLTKPGTLFNWGPDQQKAYQEIKQALLTAPALGLPDLTKPFELFVDEKQGYAKGVLTQKLGPWRRPVAYLSKKLDPVAAGWPPCLRMVAAIAVLTKDAGKLTMGQPLVILAPHAVEALVKQPPDRWLSNARMTHYQAMLLDTDRVQFGPVVALNPATLLPLPEKEAPHDCLEILAETHGTRPDLTDQPIPDADYTWYTDGSSFLQEGQRRAGAAVTTETEVIWARALPAGTSAQRAELIALTQALKMAEGKKLNVYTDSRYAFATAHVHGEIYRRRGWLTSEGREIKNKNEILALLKALFLPKRLSIIHCPGHQKGNSAEARGNRMADQAAREAAMKAVLETSTLLAGKRTADGSEFEKRTADGSEFESPKKKAKVE

SEQ ID NO: 1037 - protein, 2100 aa, synthetic construct
MPAAKRVKLDGGDKKYSIGLDIGTNSVGWAVITDEYKVPSKKFKVLGNTDRHSIKKNLIGALLFDSGETAEATRLKRTARRRYTRRKNRICYLQEIFSNEMAKVDDSFFHRLEESFLVEEDKKHERHPIFGNIVDEVAYHEKYPTIYHLRKKLVDSTDKADLRLIYLALAHMIKFRGHFLIEGDLNPDNSDVDKLFIQLVQTYNQLFEENPINASGVDAKAILSARLSKSRRLENLIAQLPGEKKNGLFGNLIALSLGLTPNFKSNFDLAEDAKLQLSKDTYDDDLDNLLAQIGDQYADLFLAAKNLSDAILLSDILRVNTEITKAPLSASMIKRYDEHHQDLTLLKALVRQQLPEKYKEIFFDQSKNGYAGYIDGGASQEEFYKFIKPILEKMDGTEELLVKLNREDLLRKQRTFDNGSIPHQIHLGELHAILRRQEDFYPFLKDNREKIEKILTFRIPYYVGPLARGNSRFAWMTRKSEETITPWNFEEVVDKGASAQSFIERMTNFDKNLPNEKVLPKHSLLYEYFTVYNELTKVKYVTEGMRKPAFLSGEQKKAIVDLLFKTNRKVTVKQLKEDYFKKIECFDSVEISGVEDRFNASLGTYHDLLKIIKDKDFLDNEENEDILEDIVLTLTLFEDREMIEERLKTYAHLFDDKVMKQLKRRRYTGWGRLSRKLINGIRDKQSGKTILDFLKSDGFANRNFMQLIHDDSLTFKEDIQKAQVSGQGDSLHEHIANLAGSPAIKKGILQTVKVVDELVKVMGRHKPENIVIEMARENQTTQKGQKNSRERMKRIEEGIKELGSQILKEHPVENTQLQNEKLYLYYLQNGRDMYVDQELDINRLSDYDVDHIVPQSFLKDDSIDNKVLTRSDKARGKSDNVPSEEVVKKMKNYWRQLLNAKLITQRKFDNLTKAERGGLSELDKAGFIKRQLVETRQITKHVAQILDSRMNTKYDENDKLIREVKVITLKSKLVSDFRKDFQFYKVREINNYHHAHDAYLNAVVGTALIKKYPKLESEFVYGDYKVYDVRKMIAKSEQEIGKATAKYFFYSNIMNFFKTEITLANGEIRKRPLIETNGETGEIVWDKGRDFATVRKVLSMPQVNIVKKTEVQTGGFSKESILPKRNSDKLIARKKDWDPKKYGGFDSPTVAYSVLVVAKVEKGKSKKLKSVKELLGITIMERSSFEKNPIDFLEAKGYKEVKKDLIIKLPKYSLFELENGRKRMLASAGELQKGNELALPSKYVNFLYLASHYEKLKGSPEDNEQKQLFVEQHKHYLDEIIEQISEFSKRVILADANLDKVLSAYNKHRDKPIREQAENIIHLFTLTNLGAPAAFKYFDTTIDRKRYTSTKEVLDATLIHQSITGLYETRIDLSQLGGDGGEAAAKGGGGSEAAAKGGTLNIEDEYRLHETSKEPDVPLGSTWLSDFPQAWAETGGMGLAVRQAPLIIPLKATSTPVSIKQYPMSQEARLGIKPHIQRLLDQGILVPCQSPWNTPLLPVKKPGTNDYRPVQDLREVNKRVEDIHPTVPNPYNLLSGLPPSHQWYTVLDLKDAFFCLRLHPTSQPLFAFEWRDPEMGISGQLTWTRLPQGFKNSPTLFNEALHRDLADFRIQHPDLILLQYVDDLLLAATSEQDCQRGTRALLQTLGNLGYRASAKKAQICQKQVKYLGYLLKEGQRWLTEARKETVMGQPTPKTPRQLREFLGKAGFCRLFIPGFAEMAAPLYPLTKPGTLFNWGPDQQKAYQEIKQALLTAPALGLPDLTKPFELFVDEKQGYAKGVLTQKLGPWRRPVAYLSKKLDPVAAGWPPCLRMVAAIAVLTKDAGKLTMGQPLVILAPHAVEALVKQPPDRWLSNARMTHYQAMLLDTDRVQFGPVVALNPATLLPLPEKEAPHDCLEILAETHGTRPDLTDQPIPDADYTWYTDGSSFLQEGQRRAGAAVTTETEVIWARALPAGTSAQRAELIALTQALKMAEGKKLNVYTDSRYAFATAHVHGEIYRRRGWLTSEGREIKNKNEILALLKALFLPKRLSIIHCPGHQKGNSAEARGNRMADQAAREAAMKAVLETSTLLAGKRTADGSEFEKRTADGSEFESPKKKAKVE

SEQ ID NO: 1038 - protein, 2094 aa, synthetic construct
MPAAKRVKLDGGDKKYSIGLDIGTNSVGWAVITDEYKVPSKKFKVLGNTDRHSIKKNLIGALLFDSGETAEATRLKRTARRRYTRRKNRICYLQEIFSNEMAKVDDSFFHRLEESFLVEEDKKHERHPIFGNIVDEVAYHEKYPTIYHLRKKLVDSTDKADLRLIYLALAHMIKFRGHFLIEGDLNPDNSDVDKLFIQLVQTYNQLFEENPINASGVDAKAILSARLSKSRRLENLIAQLPGEKKNGLFGNLIALSLGLTPNFKSNFDLAEDAKLQLSKDTYDDDLDNLLAQIGDQYADLFLAAKNLSDAILLSDILRVNTEITKAPLSASMIKRYDEHHQDLTLLKALVRQQLPEKYKEIFFDQSKNGYAGYIDGGASQEEFYKFIKPILEKMDGTEELLVKLNREDLLRKQRTFDNGSIPHQIHLGELHAILRRQEDFYPFLKDNREKIEKILTFRIPYYVGPLARGNSRFAWMTRKSEETITPWNFEEVVDKGASAQSFIERMTNFDKNLPNEKVLPKHSLLYEYFTVYNELTKVKYVTEGMRKPAFLSGEQKKAIVDLLFKTNRKVTVKQLKEDYFKKIECFDSVEISGVEDRFNASLGTYHDLLKIIKDKDFLDNEENEDILEDIVLTLTLFEDREMIEERLKTYAHLFDDKVMKQLKRRRYTGWGRLSRKLINGIRDKQSGKTILDFLKSDGFANRNFMQLIHDDSLTFKEDIQKAQVSGQGDSLHEHIANLAGSPAIKKGILQTVKVVDELVKVMGRHKPENIVIEMARENQTTQKGQKNSRERMKRIEEGIKELGSQILKEHPVENTQLQNEKLYLYYLQNGRDMYVDQELDINRLSDYDVDHIVPQSFLKDDSIDNKVLTRSDKARGKSDNVPSEEVVKKMKNYWRQLLNAKLITQRKFDNLTKAERGGLSELDKAGFIKRQLVETRQITKHVAQILDSRMNTKYDENDKLIREVKVITLKSKLVSDFRKDFQFYKVREINNYHHAHDAYLNAVVGTALIKKYPKLESEFVYGDYKVYDVRKMIAKSEQEIGKATAKYFFYSNIMNFFKTEITLANGEIRKRPLIETNGETGEIVWDKGRDFATVRKVLSMPQVNIVKKTEVQTGGFSKESILPKRNSDKLIARKKDWDPKKYGGFDSPTVAYSVLVVAKVEKGKSKKLKSVKELLGITIMERSSFEKNPIDFLEAKGYKEVKKDLIIKLPKYSLFELENGRKRMLASAGELQKGNELALPSKYVNFLYLASHYEKLKGSPEDNEQKQLFVEQHKHYLDEIIEQISEFSKRVILADANLDKVLSAYNKHRDKPIREQAENIIHLFTLTNLGAPAAFKYFDTTIDRKRYTSTKEVLDATLIHQSITGLYETRIDLSQLGGDGGGSSPAPGGGGGTLNIEDEYRLHETSKEPDVPLGSTWLSDFPQAWAETGGMGLAVRQAPLIIPLKATSTPVSIKQYPMSQEARLGIKPHIQRLLDQGILVPCQSPWNTPLLPVKKPGTNDYRPVQDLREVNKRVEDIHPTVPNPYNLLSGLPPSHQWYTVLDLKDAFFCLRLHPTSQPLFAFEWRDPEMGISGQLTWTRLPQGFKNSPTLFNEALHRDLADFRIQHPDLILLQYVDDLLLAATSEQDCQRGTRALLQTLGNLGYRASAKKAQICQKQVKYLGYLLKEGQRWLTEARKETVMGQPTPKTPRQLREFLGKAGFCRLFIPGFAEMAAPLYPLTKPGTLFNWGPDQQKAYQEIKQALLTAPALGLPDLTKPFELFVDEKQGYAKGVLTQKLGPWRRPVAYLSKKLDPVAAGWPPCLRMVAAIAVLTKDAGKLTMGQPLVILAPHAVEALVKQPPDRWLSNARMTHYQAMLLDTDRVQFGPVVALNPATLLPLPEKEAPHDCLEILAETHGTRPDLTDQPIPDADYTWYTDGSSFLQEGQRRAGAAVTTETEVIWARALPAGTSAQRAELIALTQALKMAEGKKLNVYTDSRYAFATAHVHGEIYRRRGWLTSEGREIKNKNEILALLKALFLPKRLSIIHCPGHQKGNSAEARGNRMADQAAREAAMKAVLETSTLLAGKRTADGSEFEKRTADGSEFESPKKKAKVE

SEQ ID NO: 1039 - protein, 2096 aa, synthetic construct
MPAAKRVKLDGGDKKYSIGLDIGTNSVGWAVITDEYKVPSKKFKVLGNTDRHSIKKNLIGALLFDSGETAEATRLKRTARRRYTRRKNRICYLQEIFSNEMAKVDDSFFHRLEESFLVEEDKKHERHPIFGNIVDEVAYHEKYPTIYHLRKKLVDSTDKADLRLIYLALAHMIKFRGHFLIEGDLNPDNSDVDKLFIQLVQTYNQLFEENPINASGVDAKAILSARLSKSRRLENLIAQLPGEKKNGLFGNLIALSLGLTPNFKSNFDLAEDAKLQLSKDTYDDDLDNLLAQIGDQYADLFLAAKNLSDAILLSDILRVNTEITKAPLSASMIKRYDEHHQDLTLLKALVRQQLPEKYKEIFFDQSKNGYAGYIDGGASQEEFYKFIKPILEKMDGTEELLVKLNREDLLRKQRTFDNGSIPHQIHLGELHAILRRQEDFYPFLKDNREKIEKILTFRIPYYVGPLARGNSRFAWMTRKSEETITPWNFEEVVDKGASAQSFIERMTNFDKNLPNEKVLPKHSLLYEYFTVYNELTKVKYVTEGMRKPAFLSGEQKKAIVDLLFKTNRKVTVKQLKEDYFKKIECFDSVEISGVEDRFNASLGTYHDLLKIIKDKDFLDNEENEDILEDIVLTLTLFEDREMIEERLKTYAHLFDDKVMKQLKRRRYTGWGRLSRKLINGIRDKQSGKTILDFLKSDGFANRNFMQLIHDDSLTFKEDIQKAQVSGQGDSLHEHIANLAGSPAIKKGILQTVKVVDELVKVMGRHKPENIVIEMARENQTTQKGQKNSRERMKRIEEGIKELGSQILKEHPVENTQLQNEKLYLYYLQNGRDMYVDQELDINRLSDYDVDHIVPQSFLKDDSIDNKVLTRSDKARGKSDNVPSEEVVKKMKNYWRQLLNAKLITQRKFDNLTKAERGGLSELDKAGFIKRQLVETRQITKHVAQILDSRMNTKYDENDKLIREVKVITLKSKLVSDFRKDFQFYKVREINNYHHAHDAYLNAVVGTALIKKYPKLESEFVYGDYKVYDVRKMIAKSEQEIGKATAKYFFYSNIMNFFKTEITLANGEIRKRPLIETNGETGEIVWDKGRDFATVRKVLSMPQVNIVKKTEVQTGGFSKESILPKRNSDKLIARKKDWDPKKYGGFDSPTVAYSVLVVAKVEKGKSKKLKSVKELLGITIMERSSFEKNPIDFLEAKGYKEVKKDLIIKLPKYSLFELENGRKRMLASAGELQKGNELALPSKYVNFLYLASHYEKLKGSPEDNEQKQLFVEQHKHYLDEIIEQISEFSKRVILADANLDKVLSAYNKHRDKPIREQAENIIHLFTLTNLGAPAAFKYFDTTIDRKRYTSTKEVLDATLIHQSITGLYETRIDLSQLGGDGGEAAAKGSSPAPGGTLNIEDEYRLHETSKEPDVPLGSTWLSDFPQAWAETGGMGLAVRQAPLIIPLKATSTPVSIKQYPMSQEARLGIKPHIQRLLDQGILVPCQSPWNTPLLPVKKPGTNDYRPVQDLREVNKRVEDIHPTVPNPYNLLSGLPPSHQWYTVLDLKDAFFCLRLHPTSQPLFAFEWRDPEMGISGQLTWTRLPQGFKNSPTLFNEALHRDLADFRIQHPDLILLQYVDDLLLAATSEQDCQRGTRALLQTLGNLGYRASAKKAQICQKQVKYLGYLLKEGQRWLTEARKETVMGQPTPKTPRQLREFLGKAGFCRLFIPGFAEMAAPLYPLTKPGTLFNWGPDQQKAYQEIKQALLTAPALGLPDLTKPFELFVDEKQGYAKGVLTQKLGPWRRPVAYLSKKLDPVAAGWPPCLRMVAAIAVLTKDAGKLTMGQPLVILAPHAVEALVKQPPDRWLSNARMTHYQAMLLDTDRVQFGPVVALNPATLLPLPEKEAPHDCLEILAETHGTRPDLTDQPIPDADYTWYTDGSSFLQEGQRRAGAAVTTETEVIWARALPAGTSAQRAELIALTQALKMAEGKKLNVYTDSRYAFATAHVHGEIYRRRGWLTSEGREIKNKNEILALLKALFLPKRLSIIHCPGHQKGNSAEARGNRMADQAAREAAMKAVLETSTLLAGKRTADGSEFEKRTADGSEFESPKKKAKVE

SEQ ID NO: 1040 - protein, 2091 aa, synthetic construct
MPAAKRVKLDGGDKKYSIGLDIGTNSVGWAVITDEYKVPSKKFKVLGNTDRHSIKKNLIGALLFDSGETAEATRLKRTARRRYTRRKNRICYLQEIFSNEMAKVDDSFFHRLEESFLVEEDKKHERHPIFGNIVDEVAYHEKYPTIYHLRKKLVDSTDKADLRLIYLALAHMIKFRGHFLIEGDLNPDNSDVDKLFIQLVQTYNQLFEENPINASGVDAKAILSARLSKSRRLENLIAQLPGEKKNGLFGNLIALSLGLTPNFKSNFDLAEDAKLQLSKDTYDDDLDNLLAQIGDQYADLFLAAKNLSDAILLSDILRVNTEITKAPLSASMIKRYDEHHQDLTLLKALVRQQLPEKYKEIFFDQSKNGYAGYIDGGASQEEFYKFIKPILEKMDGTEELLVKLNREDLLRKQRTFDNGSIPHQIHLGELHAILRRQEDFYPFLKDNREKIEKILTFRIPYYVGPLARGNSRFAWMTRKSEETITPWNFEEVVDKGASAQSFIERMTNFDKNLPNEKVLPKHSLLYEYFTVYNELTKVKYVTEGMRKPAFLSGEQKKAIVDLLFKTNRKVTVKQLKEDYFKKIECFDSVEISGVEDRFNASLGTYHDLLKIIKDKDFLDNEENEDILEDIVLTLTLFEDREMIEERLKTYAHLFDDKVMKQLKRRRYTGWGRLSRKLINGIRDKQSGKTILDFLKSDGFANRNFMQLIHDDSLTFKEDIQKAQVSGQGDSLHEHIANLAGSPAIKKGILQTVKVVDELVKVMGRHKPENIVIEMARENQTTQKGQKNSRERMKRIEEGIKELGSQILKEHPVENTQLQNEKLYLYYLQNGRDMYVDQELDINRLSDYDVDHIVPQSFLKDDSIDNKVLTRSDKARGKSDNVPSEEVVKKMKNYWRQLLNAKLITQRKFDNLTKAERGGLSELDKAGFIKRQLVETRQITKHVAQILDSRMNTKYDENDKLIREVKVITLKSKLVSDFRKDFQFYKVREINNYHHAHDAYLNAVVGTALIKKYPKLESEFVYGDYKVYDVRKMIAKSEQEIGKATAKYFFYSNIMNFFKTEITLANGEIRKRPLIETNGETGEIVWDKGRDFATVRKVLSMPQVNIVKKTEVQTGGFSKESILPKRNSDKLIARKKDWDPKKYGGFDSPTVAYSVLVVAKVEKGKSKKLKSVKELLGITIMERSSFEKNPIDFLEAKGYKEVKKDLIIKLPKYSLFELENGRKRMLASAGELQKGNELALPSKYVNFLYLASHYEKLKGSPEDNEQKQLFVEQHKHYLDEIIEQISEFSKRVILADANLDKVLSAYNKHRDKPIREQAENIIHLFTLTNLGAPAAFKYFDTTIDRKRYTSTKEVLDATLIHQSITGLYETRIDLSQLGGDGGGGSGGSGGTLNIEDEYRLHETSKEPDVPLGSTWLSDFPQAWAETGGMGLAVRQAPLIIPLKATSTPVSIKQYPMSQEARLGIKPHIQRLLDQGILVPCQSPWNTPLLPVKKPGTNDYRPVQDLREVNKRVEDIHPTVPNPYNLLSGLPPSHQWYTVLDLKDAFFCLRLHPTSQPLFAFEWRDPEMGISGQLTWTRLPQGFKNSPTLFNEALHRDLADFRIQHPDLILLQYVDDLLLAATSEQDCQRGTRALLQTLGNLGYRASAKKAQICQKQVKYLGYLLKEGQRWLTEARKETVMGQPTPKTPRQLREFLGKAGFCRLFIPGFAEMAAPLYPLTKPGTLFNWGPDQQKAYQEIKQALLTAPALGLPDLTKPFELFVDEKQGYAKGVLTQKLGPWRRPVAYLSKKLDPVAAGWPPCLRMVAAIAVLTKDAGKLTMGQPLVILAPHAVEALVKQPPDRWLSNARMTHYQAMLLDTDRVQFGPVVALNPATLLPLPEKEAPHDCLEILAETHGTRPDLTDQPIPDADYTWYTDGSSFLQEGQRRAGAAVTTETEVIWARALPAGTSAQRAELIALTQALKMAEGKKLNVYTDSRYAFATAHVHGEIYRRRGWLTSEGREIKNKNEILALLKALFLPKRLSIIHCPGHQKGNSAEARGNRMADQAAREAAMKAVLETSTLLAGKRTADGSEFEKRTADGSEFESPKKKAKVE

SEQ ID NO: 1041 - protein, 2096 aa, synthetic construct
MPAAKRVKLDGGDKKYSIGLDIGTNSVGWAVITDEYKVPSKKFKVLGNTDRHSIKKNLIGALLFDSGETAEATRLKRTARRRYTRRKNRICYLQEIFSNEMAKVDDSFFHRLEESFLVEEDKKHERHPIFGNIVDEVAYHEKYPTIYHLRKKLVDSTDKADLRLIYLALAHMIKFRGHFLIEGDLNPDNSDVDKLFIQLVQTYNQLFEENPINASGVDAKAILSARLSKSRRLENLIAQLPGEKKNGLFGNLIALSLGLTPNFKSNFDLAEDAKLQLSKDTYDDDLDNLLAQIGDQYADLFLAAKNLSDAILLSDILRVNTEITKAPLSASMIKRYDEHHQDLTLLKALVRQQLPEKYKEIFFDQSKNGYAGYIDGGASQEEFYKFIKPILEKMDGTEELLVKLNREDLLRKQRTFDNGSIPHQIHLGELHAILRRQEDFYPFLKDNREKIEKILTFRIPYYVGPLARGNSRFAWMTRKSEETITPWNFEEVVDKGASAQSFIERMTNFDKNLPNEKVLPKHSLLYEYFTVYNELTKVKYVTEGMRKPAFLSGEQKKAIVDLLFKTNRKVTVKQLKEDYFKKIECFDSVEISGVEDRFNASLGTYHDLLKIIKDKDFLDNEENEDILEDIVLTLTLFEDREMIEERLKTYAHLFDDKVMKQLKRRRYTGWGRLSRKLINGIRDKQSGKTILDFLKSDGFANRNFMQLIHDDSLTFKEDIQKAQVSGQGDSLHEHIANLAGSPAIKKGILQTVKVVDELVKVMGRHKPENIVIEMARENQTTQKGQKNSRERMKRIEEGIKELGSQILKEHPVENTQLQNEKLYLYYLQNGRDMYVDQELDINRLSDYDVDHIVPQSFLKDDSIDNKVLTRSDKARGKSDNVPSEEVVKKMKNYWRQLLNAKLITQRKFDNLTKAERGGLSELDKAGFIKRQLVETRQITKHVAQILDSRMNTKYDENDKLIREVKVITLKSKLVSDFRKDFQFYKVREINNYHHAHDAYLNAVVGTALIKKYPKLESEFVYGDYKVYDVRKMIAKSEQEIGKATAKYFFYSNIMNFFKTEITLANGEIRKRPLIETNGETGEIVWDKGRDFATVRKVLSMPQVNIVKKTEVQTGGFSKESILPKRNSDKLIARKKDWDPKKYGGFDSPTVAYSVLVVAKVEKGKSKKLKSVKELLGITIMERSSFEKNPIDFLEAKGYKEVKKDLIIKLPKYSLFELENGRKRMLASAGELQKGNELALPSKYVNFLYLASHYEKLKGSPEDNEQKQLFVEQHKHYLDEIIEQISEFSKRVILADANLDKVLSAYNKHRDKPIREQAENIIHLFTLTNLGAPAAFKYFDTTIDRKRYTSTKEVLDATLIHQSITGLYETRIDLSQLGGDGGEAAAKGGSPAPGGTLNIEDEYRLHETSKEPDVPLGSTWLSDFPQAWAETGGMGLAVRQAPLIIPLKATSTPVSIKQYPMSQEARLGIKPHIQRLLDQGILVPCQSPWNTPLLPVKKPGTNDYRPVQDLREVNKRVEDIHPTVPNPYNLLSGLPPSHQWYTVLDLKDAFFCLRLHPTSQPLFAFEWRDPEMGISGQLTWTRLPQGFKNSPTLFNEALHRDLADFRIQHPDLILLQYVDDLLLAATSEQDCQRGTRALLQTLGNLGYRASAKKAQICQKQVKYLGYLLKEGQRWLTEARKETVMGQPTPKTPRQLREFLGKAGFCRLFIPGFAEMAAPLYPLTKPGTLFNWGPDQQKAYQEIKQALLTAPALGLPDLTKPFELFVDEKQGYAKGVLTQKLGPWRRPVAYLSKKLDPVAAGWPPCLRMVAAIAVLTKDAGKLTMGQPLVILAPHAVEALVKQPPDRWLSNARMTHYQAMLLDTDRVQFGPVVALNPATLLPLPEKEAPHDCLEILAETHGTRPDLTDQPIPDADYTWYTDGSSFLQEGQRRAGAAVTTETEVIWARALPAGTSAQRAELIALTQALKMAEGKKLNVYTDSRYAFATAHVHGEIYRRRGWLTSEGREIKNKNEILALLKALFLPKRLSIIHCPGHQKGNSAEARGNRMADQAAREAAMKAVLETSTLLAGKRTADGSEFEKRTADGSEFESPKKKAKVE

SEQ ID NO: 1042 - protein, 2100 aa, synthetic construct
MPAAKRVKLDGGDKKYSIGLDIGTNSVGWAVITDEYKVPSKKFKVLGNTDRHSIKKNLIGALLFDSGETAEATRLKRTARRRYTRRKNRICYLQEIFSNEMAKVDDSFFHRLEESFLVEEDKKHERHPIFGNIVDEVAYHEKYPTIYHLRKKLVDSTDKADLRLIYLALAHMIKFRGHFLIEGDLNPDNSDVDKLFIQLVQTYNQLFEENPINASGVDAKAILSARLSKSRRLENLIAQLPGEKKNGLFGNLIALSLGLTPNFKSNFDLAEDAKLQLSKDTYDDDLDNLLAQIGDQYADLFLAAKNLSDAILLSDILRVNTEITKAPLSASMIKRYDEHHQDLTLLKALVRQQLPEKYKEIFFDQSKNGYAGYIDGGASQEEFYKFIKPILEKMDGTEELLVKLNREDLLRKQRTFDNGSIPHQIHLGELHAILRRQEDFYPFLKDNREKIEKILTFRIPYYVGPLARGNSRFAWMTRKSEETITPWNFEEVVDKGASAQSFIERMTNFDKNLPNEKVLPKHSLLYEYFTVYNELTKVKYVTEGMRKPAFLSGEQKKAIVDLLFKTNRKVTVKQLKEDYFKKIECFDSVEISGVEDRFNASLGTYHDLLKIIKDKDFLDNEENEDILEDIVLTLTLFEDREMIEERLKTYAHLFDDKVMKQLKRRRYTGWGRLSRKLINGIRDKQSGKTILDFLKSDGFANRNFMQLIHDDSLTFKEDIQKAQVSGQGDSLHEHIANLAGSPAIKKGILQTVKVVDELVKVMGRHKPENIVIEMARENQTTQKGQKNSRERMKRIEEGIKELGSQILKEHPVENTQLQNEKLYLYYLQNGRDMYVDQELDINRLSDYDVDHIVPQSFLKDDSIDNKVLTRSDKARGKSDNVPSEEVVKKMKNYWRQLLNAKLITQRKFDNLTKAERGGLSELDKAGFIKRQLVETRQITKHVAQILDSRMNTKYDENDKLIREVKVITLKSKLVSDFRKDFQFYKVREINNYHHAHDAYLNAVVGTALIKKYPKLESEFVYGDYKVYDVRKMIAKSEQEIGKATAKYFFYSNIMNFFKTEITLANGEIRKRPLIETNGETGEIVWDKGRDFATVRKVLSMPQVNIVKKTEVQTGGFSKESILPKRNSDKLIARKKDWDPKKYGGFDSPTVAYSVLVVAKVEKGKSKKLKSVKELLGITIMERSSFEKNPIDFLEAKGYKEVKKDLIIKLPKYSLFELENGRKRMLASAGELQKGNELALPSKYVNFLYLASHYEKLKGSPEDNEQKQLFVEQHKHYLDEIIEQISEFSKRVILADANLDKVLSAYNKHRDKPIREQAENIIHLFTLTNLGAPAAFKYFDTTIDRKRYTSTKEVLDATLIHQSITGLYETRIDLSQLGGDGGGGGGSGGGGSGGGGSGGTLNIEDEYRLHETSKEPDVPLGSTWLSDFPQAWAETGGMGLAVRQAPLIIPLKATSTPVSIKQYPMSQEARLGIKPHIQRLLDQGILVPCQSPWNTPLLPVKKPGTNDYRPVQDLREVNKRVEDIHPTVPNPYNLLSGLPPSHQWYTVLDLKDAFFCLRLHPTSQPLFAFEWRDPEMGISGQLTWTRLPQGFKNSPTLFNEALHRDLADFRIQHPDLILLQYVDDLLLAATSEQDCQRGTRALLQTLGNLGYRASAKKAQICQKQVKYLGYLLKEGQRWLTEARKETVMGQPTPKTPRQLREFLGKAGFCRLFIPGFAEMAAPLYPLTKPGTLFNWGPDQQKAYQEIKQALLTAPALGLPDLTKPFELFVDEKQGYAKGVLTQKLGPWRRPVAYLSKKLDPVAAGWPPCLRMVAAIAVLTKDAGKLTMGQPLVILAPHAVEALVKQPPDRWLSNARMTHYQAMLLDTDRVQFGPVVALNPATLLPLPEKEAPHDCLEILAETHGTRPDLTDQPIPDADYTWYTDGSSFLQEGQRRAGAAVTTETEVIWARALPAGTSAQRAELIALTQALKMAEGKKLNVYTDSRYAFATAHVHGEIYRRRGWLTSEGREIKNKNEILALLKALFLPKRLSIIHCPGHQKGNSAEARGNRMADQAAREAAMKAVLETSTLLAGKRTADGSEFEKRTADGSEFESPKKKAKVE

SEQ ID NO: 1043 - protein, 2094 aa, synthetic construct
MPAAKRVKLDGGDKKYSIGLDIGTNSVGWAVITDEYKVPSKKFKVLGNTDRHSIKKNLIGALLFDSGETAEATRLKRTARRRYTRRKNRICYLQEIFSNEMAKVDDSFFHRLEESFLVEEDKKHERHPIFGNIVDEVAYHEKYPTIYHLRKKLVDSTDKADLRLIYLALAHMIKFRGHFLIEGDLNPDNSDVDKLFIQLVQTYNQLFEENPINASGVDAKAILSARLSKSRRLENLIAQLPGEKKNGLFGNLIALSLGLTPNFKSNFDLAEDAKLQLSKDTYDDDLDNLLAQIGDQYADLFLAAKNLSDAILLSDILRVNTEITKAPLSASMIKRYDEHHQDLTLLKALVRQQLPEKYKEIFFDQSKNGYAGYIDGGASQEEFYKFIKPILEKMDGTEELLVKLNREDLLRKQRTFDNGSIPHQIHLGELHAILRRQEDFYPFLKDNREKIEKILTFRIPYYVGPLARGNSRFAWMTRKSEETITPWNFEEVVDKGASAQSFIERMTNFDKNLPNEKVLPKHSLLYEYFTVYNELTKVKYVTEGMRKPAFLSGEQKKAIVDLLFKTNRKVTVKQLKEDYFKKIECFDSVEISGVEDRFNASLGTYHDLLKIIKDKDFLDNEENEDILEDIVLTLTLFEDREMIEERLKTYAHLFDDKVMKQLKRRRYTGWGRLSRKLINGIRDKQSGKTILDFLKSDGFANRNFMQLIHDDSLTFKEDIQKAQVSGQGDSLHEHIANLAGSPAIKKGILQTVKVVDELVKVMGRHKPENIVIEMARENQTTQKGQKNSRERMKRIEEGIKELGSQILKEHPVENTQLQNEKLYLYYLQNGRDMYVDQELDINRLSDYDVDHIVPQSFLKDDSIDNKVLTRSDKARGKSDNVPSEEVVKKMKNYWRQLLNAKLITQRKFDNLTKAERGGLSELDKAGFIKRQLVETRQITKHVAQILDSRMNTKYDENDKLIREVKVITLKSKLVSDFRKDFQFYKVREINNYHHAHDAYLNAVVGTALIKKYPKLESEFVYGDYKVYDVRKMIAKSEQEIGKATAKYFFYSNIMNFFKTEITLANGEIRKRPLIETNGETGEIVWDKGRDFATVRKVLSMPQVNIVKKTEVQTGGFSKESILPKRNSDKLIARKKDWDPKKYGGFDSPTVAYSVLVVAKVEKGKSKKLKSVKELLGITIMERSSFEKNPIDFLEAKGYKEVKKDLIIKLPKYSLFELENGRKRMLASAGELQKGNELALPSKYVNFLYLASHYEKLKGSPEDNEQKQLFVEQHKHYLDEIIEQISEFSKRVILADANLDKVLSAYNKHRDKPIREQAENIIHLFTLTNLGAPAAFKYFDTTIDRKRYTSTKEVLDATLIHQSITGLYETRIDLSQLGGDGGPAPGSSGGSGGTLNIEDEYRLHETSKEPDVPLGSTWLSDFPQAWAETGGMGLAVRQAPLIIPLKATSTPVSIKQYPMSQEARLGIKPHIQRLLDQGILVPCQSPWNTPLLPVKKPGTNDYRPVQDLREVNKRVEDIHPTVPNPYNLLSGLPPSHQWYTVLDLKDAFFCLRLHPTSQPLFAFEWRDPEMGISGQLTWTRLPQGFKNSPTLFNEALHRDLADFRIQHPDLILLQYVDDLLLAATSEQDCQRGTRALLQTLGNLGYRASAKKAQICQKQVKYLGYLLKEGQRWLTEARKETVMGQPTPKTPRQLREFLGKAGFCRLFIPGFAEMAAPLYPLTKPGTLFNWGPDQQKAYQEIKQALLTAPALGLPDLTKPFELFVDEKQGYAKGVLTQKLGPWRRPVAYLSKKLDPVAAGWPPCLRMVAAIAVLTKDAGKLTMGQPLVILAPHAVEALVKQPPDRWLSNARMTHYQAMLLDTDRVQFGPVVALNPATLLPLPEKEAPHDCLEILAETHGTRPDLTDQPIPDADYTWYTDGSSFLQEGQRRAGAAVTTETEVIWARALPAGTSAQRAELIALTQALKMAEGKKLNVYTDSRYAFATAHVHGEIYRRRGWLTSEGREIKNKNEILALLKALFLPKRLSIIHCPGHQKGNSAEARGNRMADQAAREAAMKAVLETSTLLAGKRTADGSEFEKRTADGSEFESPKKKAKVE

SEQ ID NO: 1044 - protein, 2093 aa, synthetic construct
MPAAKRVKLDGGDKKYSIGLDIGTNSVGWAVITDEYKVPSKKFKVLGNTDRHSIKKNLIGALLFDSGETAEATRLKRTARRRYTRRKNRICYLQEIFSNEMAKVDDSFFHRLEESFLVEEDKKHERHPIFGNIVDEVAYHEKYPTIYHLRKKLVDSTDKADLRLIYLALAHMIKFRGHFLIEGDLNPDNSDVDKLFIQLVQTYNQLFEENPINASGVDAKAILSARLSKSRRLENLIAQLPGEKKNGLFGNLIALSLGLTPNFKSNFDLAEDAKLQLSKDTYDDDLDNLLAQIGDQYADLFLAAKNLSDAILLSDILRVNTEITKAPLSASMIKRYDEHHQDLTLLKALVRQQLPEKYKEIFFDQSKNGYAGYIDGGASQEEFYKFIKPILEKMDGTEELLVKLNREDLLRKQRTFDNGSIPHQIHLGELHAILRRQEDFYPFLKDNREKIEKILTFRIPYYVGPLARGNSRFAWMTRKSEETITPWNFEEVVDKGASAQSFIERMTNFDKNLPNEKVLPKHSLLYEYFTVYNELTKVKYVTEGMRKPAFLSGEQKKAIVDLLFKTNRKVTVKQLKEDYFKKIECFDSVEISGVEDRFNASLGTYHDLLKIIKDKDFLDNEENEDILEDIVLTLTLFEDREMIEERLKTYAHLFDDKVMKQLKRRRYTGWGRLSRKLINGIRDKQSGKTILDFLKSDGFANRNFMQLIHDDSLTFKEDIQKAQVSGQGDSLHEHIANLAGSPAIKKGILQTVKVVDELVKVMGRHKPENIVIEMARENQTTQKGQKNSRERMKRIEEGIKELGSQILKEHPVENTQLQNEKLYLYYLQNGRDMYVDQELDINRLSDYDVDHIVPQSFLKDDSIDNKVLTRSDKARGKSDNVPSEEVVKKMKNYWRQLLNAKLITQRKFDNLTKAERGGLSELDKAGFIKRQLVETRQITKHVAQILDSRMNTKYDENDKLIREVKVITLKSKLVSDFRKDFQFYKVREINNYHHAHDAYLNAVVGTALIKKYPKLESEFVYGDYKVYDVRKMIAKSEQEIGKATAKYFFYSNIMNFFKTEITLANGEIRKRPLIETNGETGEIVWDKGRDFATVRKVLSMPQVNIVKKTEVQTGGFSKESILPKRNSDKLIARKKDWDPKKYGGFDSPTVAYSVLVVAKVEKGKSKKLKSVKELLGITIMERSSFEKNPIDFLEAKGYKEVKKDLIIKLPKYSLFELENGRKRMLASAGELQKGNELALPSKYVNFLYLASHYEKLKGSPEDNEQKQLFVEQHKHYLDEIIEQISEFSKRVILADANLDKVLSAYNKHRDKPIREQAENIIHLFTLTNLGAPAAFKYFDTTIDRKRYTSTKEVLDATLIHQSITGLYETRIDLSQLGGDGGGGGEAAAKGGTLNIEDEYRLHETSKEPDVPLGSTWLSDFPQAWAETGGMGLAVRQAPLIIPLKATSTPVSIKQYPMSQEARLGIKPHIQRLLDQGILVPCQSPWNTPLLPVKKPGTNDYRPVQDLREVNKRVEDIHPTVPNPYNLLSGLPPSHQWYTVLDLKDAFFCLRLHPTSQPLFAFEWRDPEMGISGQLTWTRLPQGFKNSPTLFNEALHRDLADFRIQHPDLILLQYVDDLLLAATSEQDCQRGTRALLQTLGNLGYRASAKKAQICQKQVKYLGYLLKEGQRWLTEARKETVMGQPTPKTPRQLREFLGKAGFCRLFIPGFAEMAAPLYPLTKPGTLFNWGPDQQKAYQEIKQALLTAPALGLPDLTKPFELFVDEKQGYAKGVLTQKLGPWRRPVAYLSKKLDPVAAGWPPCLRMVAAIAVLTKDAGKLTMGQPLVILAPHAVEALVKQPPDRWLSNARMTHYQAMLLDTDRVQFGPVVALNPATLLPLPEKEAPHDCLEILAETHGTRPDLTDQPIPDADYTWYTDGSSFLQEGQRRAGAAVTTETEVIWARALPAGTSAQRAELIALTQALKMAEGKKLNVYTDSRYAFATAHVHGEIYRRRGWLTSEGREIKNKNEILALLKALFLPKRLSIIHCPGHQKGNSAEARGNRMADQAAREAAMKAVLETSTLLAGKRTADGSEFEKRTADGSEFESPKKKAKVE

SEQ ID NO: 1045 - protein, 2100 aa, synthetic construct
MPAAKRVKLDGGDKKYSIGLDIGTNSVGWAVITDEYKVPSKKFKVLGNTDRHSIKKNLIGALLFDSGETAEATRLKRTARRRYTRRKNRICYLQEIFSNEMAKVDDSFFHRLEESFLVEEDKKHERHPIFGNIVDEVAYHEKYPTIYHLRKKLVDSTDKADLRLIYLALAHMIKFRGHFLIEGDLNPDNSDVDKLFIQLVQTYNQLFEENPINASGVDAKAILSARLSKSRRLENLIAQLPGEKKNGLFGNLIALSLGLTPNFKSNFDLAEDAKLQLSKDTYDDDLDNLLAQIGDQYADLFLAAKNLSDAILLSDILRVNTEITKAPLSASMIKRYDEHHQDLTLLKALVRQQLPEKYKEIFFDQSKNGYAGYIDGGASQEEFYKFIKPILEKMDGTEELLVKLNREDLLRKQRTFDNGSIPHQIHLGELHAILRRQEDFYPFLKDNREKIEKILTFRIPYYVGPLARGNSRFAWMTRKSEETITPWNFEEVVDKGASAQSFIERMTNFDKNLPNEKVLPKHSLLYEYFTVYNELTKVKYVTEGMRKPAFLSGEQKKAIVDLLFKTNRKVTVKQLKEDYFKKIECFDSVEISGVEDRFNASLGTYHDLLKIIKDKDFLDNEENEDILEDIVLTLTLFEDREMIEERLKTYAHLFDDKVMKQLKRRRYTGWGRLSRKLINGIRDKQSGKTILDFLKSDGFANRNFMQLIHDDSLTFKEDIQKAQVSGQGDSLHEHIANLAGSPAIKKGILQTVKVVDELVKVMGRHKPENIVIEMARENQTTQKGQKNSRERMKRIEEGIKELGSQILKEHPVENTQLQNEKLYLYYLQNGRDMYVDQELDINRLSDYDVDHIVPQSFLKDDSIDNKVLTRSDKARGKSDNVPSEEVVKKMKNYWRQLLNAKLITQRKFDNLTKAERGGLSELDKAGFIKRQLVETRQITKHVAQILDSRMNTKYDENDKLIREVKVITLKSKLVSDFRKDFQFYKVREINNYHHAHDAYLNAVVGTALIKKYPKLESEFVYGDYKVYDVRKMIAKSEQEIGKATAKYFFYSNIMNFFKTEITLANGEIRKRPLIETNGETGEIVWDKGRDFATVRKVLSMPQVNIVKKTEVQTGGFSKESILPKRNSDKLIARKKDWDPKKYGGFDSPTVAYSVLVVAKVEKGKSKKLKSVKELLGITIMERSSFEKNPIDFLEAKGYKEVKKDLIIKLPKYSLFELENGRKRMLASAGELQKGNELALPSKYVNFLYLASHYEKLKGSPEDNEQKQLFVEQHKHYLDEIIEQISEFSKRVILADANLDKVLSAYNKHRDKPIREQAENIIHLFTLTNLGAPAAFKYFDTTIDRKRYTSTKEVLDATLIHQSITGLYETRIDLSQLGGDGGGSSGSSGSSGSSGSSGGTLNIEDEYRLHETSKEPDVPLGSTWLSDFPQAWAETGGMGLAVRQAPLIIPLKATSTPVSIKQYPMSQEARLGIKPHIQRLLDQGILVPCQSPWNTPLLPVKKPGTNDYRPVQDLREVNKRVEDIHPTVPNPYNLLSGLPPSHQWYTVLDLKDAFFCLRLHPTSQPLFAFEWRDPEMGISGQLTWTRLPQGFKNSPTLFNEALHRDLADFRIQHPDLILLQYVDDLLLAATSEQDCQRGTRALLQTLGNLGYRASAKKAQICQKQVKYLGYLLKEGQRWLTEARKETVMGQPTPKTPRQLREFLGKAGFCRLFIPGFAEMAAPLYPLTKPGTLFNWGPDQQKAYQEIKQALLTAPALGLPDLTKPFELFVDEKQGYAKGVLTQKLGPWRRPVAYLSKKLDPVAAGWPPCLRMVAAIAVLTKDAGKLTMGQPLVILAPHAVEALVKQPPDRWLSNARMTHYQAMLLDTDRVQFGPVVALNPATLLPLPEKEAPHDCLEILAETHGTRPDLTDQPIPDADYTWYTDGSSFLQEGQRRAGAAVTTETEVIWARALPAGTSAQRAELIALTQALKMAEGKKLNVYTDSRYAFATAHVHGEIYRRRGWLTSEGREIKNKNEILALLKALFLPKRLSIIHCPGHQKGNSAEARGNRMADQAAREAAMKAVLETSTLLAGKRTADGSEFEKRTADGSEFESPKKKAKVE

SEQ ID NO: 1046 - protein, 2096 aa, synthetic construct
MPAAKRVKLDGGDKKYSIGLDIGTNSVGWAVITDEYKVPSKKFKVLGNTDRHSIKKNLIGALLFDSGETAEATRLKRTARRRYTRRKNRICYLQEIFSNEMAKVDDSFFHRLEESFLVEEDKKHERHPIFGNIVDEVAYHEKYPTIYHLRKKLVDSTDKADLRLIYLALAHMIKFRGHFLIEGDLNPDNSDVDKLFIQLVQTYNQLFEENPINASGVDAKAILSARLSKSRRLENLIAQLPGEKKNGLFGNLIALSLGLTPNFKSNFDLAEDAKLQLSKDTYDDDLDNLLAQIGDQYADLFLAAKNLSDAILLSDILRVNTEITKAPLSASMIKRYDEHHQDLTLLKALVRQQLPEKYKEIFFDQSKNGYAGYIDGGASQEEFYKFIKPILEKMDGTEELLVKLNREDLLRKQRTFDNGSIPHQIHLGELHAILRRQEDFYPFLKDNREKIEKILTFRIPYYVGPLARGNSRFAWMTRKSEETITPWNFEEVVDKGASAQSFIERMTNFDKNLPNEKVLPKHSLLYEYFTVYNELTKVKYVTEGMRKPAFLSGEQKKAIVDLLFKTNRKVTVKQLKEDYFKKIECFDSVEISGVEDRFNASLGTYHDLLKIIKDKDFLDNEENEDILEDIVLTLTLFEDREMIEERLKTYAHLFDDKVMKQLKRRRYTGWGRLSRKLINGIRDKQSGKTILDFLKSDGFANRNFMQLIHDDSLTFKEDIQKAQVSGQGDSLHEHIANLAGSPAIKKGILQTVKVVDELVKVMGRHKPENIVIEMARENQTTQKGQKNSRERMKRIEEGIKELGSQILKEHPVENTQLQNEKLYLYYLQNGRDMYVDQELDINRLSDYDVDHIVPQSFLKDDSIDNKVLTRSDKARGKSDNVPSEEVVKKMKNYWRQLLNAKLITQRKFDNLTKAERGGLSELDKAGFIKRQLVETRQITKHVAQILDSRMNTKYDENDKLIREVKVITLKSKLVSDFRKDFQFYKVREINNYHHAHDAYLNAVVGTALIKKYPKLESEFVYGDYKVYDVRKMIAKSEQEIGKATAKYFFYSNIMNFFKTEITLANGEIRKRPLIETNGETGEIVWDKGRDFATVRKVLSMPQVNIVKKTEVQTGGFSKESILPKRNSDKLIARKKDWDPKKYGGFDSPTVAYSVLVVAKVEKGKSKKLKSVKELLGITIMERSSFEKNPIDFLEAKGYKEVKKDLIIKLPKYSLFELENGRKRMLASAGELQKGNELALPSKYVNFLYLASHYEKLKGSPEDNEQKQLFVEQHKHYLDEIIEQISEFSKRVILADANLDKVLSAYNKHRDKPIREQAENIIHLFTLTNLGAPAAFKYFDTTIDRKRYTSTKEVLDATLIHQSITGLYETRIDLSQLGGDGGGGSGGGEAAAKGGTLNIEDEYRLHETSKEPDVPLGSTWLSDFPQAWAETGGMGLAVRQAPLIIPLKATSTPVSIKQYPMSQEARLGIKPHIQRLLDQGILVPCQSPWNTPLLPVKKPGTNDYRPVQDLREVNKRVEDIHPTVPNPYNLLSGLPPSHQWYTVLDLKDAFFCLRLHPTSQPLFAFEWRDPEMGISGQLTWTRLPQGFKNSPTLFNEALHRDLADFRIQHPDLILLQYVDDLLLAATSEQDCQRGTRALLQTLGNLGYRASAKKAQICQKQVKYLGYLLKEGQRWLTEARKETVMGQPTPKTPRQLREFLGKAGFCRLFIPGFAEMAAPLYPLTKPGTLFNWGPDQQKAYQEIKQALLTAPALGLPDLTKPFELFVDEKQGYAKGVLTQKLGPWRRPVAYLSKKLDPVAAGWPPCLRMVAAIAVLTKDAGKLTMGQPLVILAPHAVEALVKQPPDRWLSNARMTHYQAMLLDTDRVQFGPVVALNPATLLPLPEKEAPHDCLEILAETHGTRPDLTDQPIPDADYTWYTDGSSFLQEGQRRAGAAVTTETEVIWARALPAGTSAQRAELIALTQALKMAEGKKLNVYTDSRYAFATAHVHGEIYRRRGWLTSEGREIKNKNEILALLKALFLPKRLSIIHCPGHQKGNSAEARGNRMADQAAREAAMKAVLETSTLLAGKRTADGSEFEKRTADGSEFESPKKKAKVE

SEQ ID NO: 1047 - protein, 2091 aa, synthetic construct
MPAAKRVKLDGGDKKYSIGLDIGTNSVGWAVITDEYKVPSKKFKVLGNTDRHSIKKNLIGALLFDSGETAEATRLKRTARRRYTRRKNRICYLQEIFSNEMAKVDDSFFHRLEESFLVEEDKKHERHPIFGNIVDEVAYHEKYPTIYHLRKKLVDSTDKADLRLIYLALAHMIKFRGHFLIEGDLNPDNSDVDKLFIQLVQTYNQLFEENPINASGVDAKAILSARLSKSRRLENLIAQLPGEKKNGLFGNLIALSLGLTPNFKSNFDLAEDAKLQLSKDTYDDDLDNLLAQIGDQYADLFLAAKNLSDAILLSDILRVNTEITKAPLSASMIKRYDEHHQDLTLLKALVRQQLPEKYKEIFFDQSKNGYAGYIDGGASQEEFYKFIKPILEKMDGTEELLVKLNREDLLRKQRTFDNGSIPHQIHLGELHAILRRQEDFYPFLKDNREKIEKILTFRIPYYVGPLARGNSRFAWMTRKSEETITPWNFEEVVDKGASAQSFIERMTNFDKNLPNEKVLPKHSLLYEYFTVYNELTKVKYVTEGMRKPAFLSGEQKKAIVDLLFKTNRKVTVKQLKEDYFKKIECFDSVEISGVEDRFNASLGTYHDLLKIIKDKDFLDNEENEDILEDIVLTLTLFEDREMIEERLKTYAHLFDDKVMKQLKRRRYTGWGRLSRKLINGIRDKQSGKTILDFLKSDGFANRNFMQLIHDDSLTFKEDIQKAQVSGQGDSLHEHIANLAGSPAIKKGILQTVKVVDELVKVMGRHKPENIVIEMARENQTTQKGQKNSRERMKRIEEGIKELGSQILKEHPVENTQLQNEKLYLYYLQNGRDMYVDQELDINRLSDYDVDHIVPQSFLKDDSIDNKVLTRSDKARGKSDNVPSEEVVKKMKNYWRQLLNAKLITQRKFDNLTKAERGGLSELDKAGFIKRQLVETRQITKHVAQILDSRMNTKYDENDKLIREVKVITLKSKLVSDFRKDFQFYKVREINNYHHAHDAYLNAVVGTALIKKYPKLESEFVYGDYKVYDVRKMIAKSEQEIGKATAKYFFYSNIMNFFKTEITLANGEIRKRPLIETNGETGEIVWDKGRDFATVRKVLSMPQVNIVKKTEVQTGGFSKESILPKRNSDKLIARKKDWDPKKYGGFDSPTVAYSVLVVAKVEKGKSKKLKSVKELLGITIMERSSFEKNPIDFLEAKGYKEVKKDLIIKLPKYSLFELENGRKRMLASAGELQKGNELALPSKYVNFLYLASHYEKLKGSPEDNEQKQLFVEQHKHYLDEIIEQISEFSKRVILADANLDKVLSAYNKHRDKPIREQAENIIHLFTLTNLGAPAAFKYFDTTIDRKRYTSTKEVLDATLIHQSITGLYETRIDLSQLGGDGGGSSGSSGGTLNIEDEYRLHETSKEPDVPLGSTWLSDFPQAWAETGGMGLAVRQAPLIIPLKATSTPVSIKQYPMSQEARLGIKPHIQRLLDQGILVPCQSPWNTPLLPVKKPGTNDYRPVQDLREVNKRVEDIHPTVPNPYNLLSGLPPSHQWYTVLDLKDAFFCLRLHPTSQPLFAFEWRDPEMGISGQLTWTRLPQGFKNSPTLFNEALHRDLADFRIQHPDLILLQYVDDLLLAATSEQDCQRGTRALLQTLGNLGYRASAKKAQICQKQVKYLGYLLKEGQRWLTEARKETVMGQPTPKTPRQLREFLGKAGFCRLFIPGFAEMAAPLYPLTKPGTLFNWGPDQQKAYQEIKQALLTAPALGLPDLTKPFELFVDEKQGYAKGVLTQKLGPWRRPVAYLSKKLDPVAAGWPPCLRMVAAIAVLTKDAGKLTMGQPLVILAPHAVEALVKQPPDRWLSNARMTHYQAMLLDTDRVQFGPVVALNPATLLPLPEKEAPHDCLEILAETHGTRPDLTDQPIPDADYTWYTDGSSFLQEGQRRAGAAVTTETEVIWARALPAGTSAQRAELIALTQALKMAEGKKLNVYTDSRYAFATAHVHGEIYRRRGWLTSEGREIKNKNEILALLKALFLPKRLSIIHCPGHQKGNSAEARGNRMADQAAREAAMKAVLETSTLLAGKRTADGSEFEKRTADGSEFESPKKKAKVE

SEQ ID NO: 1048 - protein, 2093 aa, synthetic construct
MPAAKRVKLDGGDKKYSIGLDIGTNSVGWAVITDEYKVPSKKFKVLGNTDRHSIKKNLIGALLFDSGETAEATRLKRTARRRYTRRKNRICYLQEIFSNEMAKVDDSFFHRLEESFLVEEDKKHERHPIFGNIVDEVAYHEKYPTIYHLRKKLVDSTDKADLRLIYLALAHMIKFRGHFLIEGDLNPDNSDVDKLFIQLVQTYNQLFEENPINASGVDAKAILSARLSKSRRLENLIAQLPGEKKNGLFGNLIALSLGLTPNFKSNFDLAEDAKLQLSKDTYDDDLDNLLAQIGDQYADLFLAAKNLSDAILLSDILRVNTEITKAPLSASMIKRYDEHHQDLTLLKALVRQQLPEKYKEIFFDQSKNGYAGYIDGGASQEEFYKFIKPILEKMDGTEELLVKLNREDLLRKQRTFDNGSIPHQIHLGELHAILRRQEDFYPFLKDNREKIEKILTFRIPYYVGPLARGNSRFAWMTRKSEETITPWNFEEVVDKGASAQSFIERMTNFDKNLPNEKVLPKHSLLYEYFTVYNELTKVKYVTEGMRKPAFLSGEQKKAIVDLLFKTNRKVTVKQLKEDYFKKIECFDSVEISGVEDRFNASLGTYHDLLKIIKDKDFLDNEENEDILEDIVLTLTLFEDREMIEERLKTYAHLFDDKVMKQLKRRRYTGWGRLSRKLINGIRDKQSGKTILDFLKSDGFANRNFMQLIHDDSLTFKEDIQKAQVSGQGDSLHEHIANLAGSPAIKKGILQTVKVVDELVKVMGRHKPENIVIEMARENQTTQKGQKNSRERMKRIEEGIKELGSQILKEHPVENTQLQNEKLYLYYLQNGRDMYVDQELDINRLSDYDVDHIVPQSFLKDDSIDNKVLTRSDKARGKSDNVPSEEVVKKMKNYWRQLLNAKLITQRKFDNLTKAERGGLSELDKAGFIKRQLVETRQITKHVAQILDSRMNTKYDENDKLIREVKVITLKSKLVSDFRKDFQFYKVREINNYHHAHDAYLNAVVGTALIKKYPKLESEFVYGDYKVYDVRKMIAKSEQEIGKATAKYFFYSNIMNFFKTEITLANGEIRKRPLIETNGETGEIVWDKGRDFATVRKVLSMPQVNIVKKTEVQTGGFSKESILPKRNSDKLIARKKDWDPKKYGGFDSPTVAYSVLVVAKVEKGKSKKLKSVKELLGITIMERSSFEKNPIDFLEAKGYKEVKKDLIIKLPKYSLFELENGRKRMLASAGELQKGNELALPSKYVNFLYLASHYEKLKGSPEDNEQKQLFVEQHKHYLDEIIEQISEFSKRVILADANLDKVLSAYNKHRDKPIREQAENIIHLFTLTNLGAPAAFKYFDTTIDRKRYTSTKEVLDATLIHQSITGLYETRIDLSQLGGDGGEAAAKPAPGGTLNIEDEYRLHETSKEPDVPLGSTWLSDFPQAWAETGGMGLAVRQAPLIIPLKATSTPVSIKQYPMSQEARLGIKPHIQRLLDQGILVPCQSPWNTPLLPVKKPGTNDYRPVQDLREVNKRVEDIHPTVPNPYNLLSGLPPSHQWYTVLDLKDAFFCLRLHPTSQPLFAFEWRDPEMGISGQLTWTRLPQGFKNSPTLFNEALHRDLADFRIQHPDLILLQYVDDLLLAATSEQDCQRGTRALLQTLGNLGYRASAKKAQICQKQVKYLGYLLKEGQRWLTEARKETVMGQPTPKTPRQLREFLGKAGFCRLFIPGFAEMAAPLYPLTKPGTLFNWGPDQQKAYQEIKQALLTAPALGLPDLTKPFELFVDEKQGYAKGVLTQKLGPWRRPVAYLSKKLDPVAAGWPPCLRMVAAIAVLTKDAGKLTMGQPLVILAPHAVEALVKQPPDRWLSNARMTHYQAMLLDTDRVQFGPVVALNPATLLPLPEKEAPHDCLEILAETHGTRPDLTDQPIPDADYTWYTDGSSFLQEGQRRAGAAVTTETEVIWARALPAGTSAQRAELIALTQALKMAEGKKLNVYTDSRYAFATAHVHGEIYRRRGWLTSEGREIKNKNEILALLKALFLPKRLSIIHCPGHQKGNSAEARGNRMADQAAREAAMKAVLETSTLLAGKRTADGSEFEKRTADGSEFESPKKKAKVE

SEQ ID NO: 1049 - protein, 2105 aa, synthetic construct
MPAAKRVKLDGGDKKYSIGLDIGTNSVGWAVITDEYKVPSKKFKVLGNTDRHSIKKNLIGALLFDSGETAEATRLKRTARRRYTRRKNRICYLQEIFSNEMAKVDDSFFHRLEESFLVEEDKKHERHPIFGNIVDEVAYHEKYPTIYHLRKKLVDSTDKADLRLIYLALAHMIKFRGHFLIEGDLNPDNSDVDKLFIQLVQTYNQLFEENPINASGVDAKAILSARLSKSRRLENLIAQLPGEKKNGLFGNLIALSLGLTPNFKSNFDLAEDAKLQLSKDTYDDDLDNLLAQIGDQYADLFLAAKNLSDAILLSDILRVNTEITKAPLSASMIKRYDEHHQDLTLLKALVRQQLPEKYKEIFFDQSKNGYAGYIDGGASQEEFYKFIKPILEKMDGTEELLVKLNREDLLRKQRTFDNGSIPHQIHLGELHAILRRQEDFYPFLKDNREKIEKILTFRIPYYVGPLARGNSRFAWMTRKSEETITPWNFEEVVDKGASAQSFIERMTNFDKNLPNEKVLPKHSLLYEYFTVYNELTKVKYVTEGMRKPAFLSGEQKKAIVDLLFKTNRKVTVKQLKEDYFKKIECFDSVEISGVEDRFNASLGTYHDLLKIIKDKDFLDNEENEDILEDIVLTLTLFEDREMIEERLKTYAHLFDDKVMKQLKRRRYTGWGRLSRKLINGIRDKQSGKTILDFLKSDGFANRNFMQLIHDDSLTFKEDIQKAQVSGQGDSLHEHIANLAGSPAIKKGILQTVKVVDELVKVMGRHKPENIVIEMARENQTTQKGQKNSRERMKRIEEGIKELGSQILKEHPVENTQLQNEKLYLYYLQNGRDMYVDQELDINRLSDYDVDHIVPQSFLKDDSIDNKVLTRSDKARGKSDNVPSEEVVKKMKNYWRQLLNAKLITQRKFDNLTKAERGGLSELDKAGFIKRQLVETRQITKHVAQILDSRMNTKYDENDKLIREVKVITLKSKLVSDFRKDFQFYKVREINNYHHAHDAYLNAVVGTALIKKYPKLESEFVYGDYKVYDVRKMIAKSEQEIGKATAKYFFYSNIMNFFKTEITLANGEIRKRPLIETNGETGEIVWDKGRDFATVRKVLSMPQVNIVKKTEVQTGGFSKESILPKRNSDKLIARKKDWDPKKYGGFDSPTVAYSVLVVAKVEKGKSKKLKSVKELLGITIMERSSFEKNPIDFLEAKGYKEVKKDLIIKLPKYSLFELENGRKRMLASAGELQKGNELALPSKYVNFLYLASHYEKLKGSPEDNEQKQLFVEQHKHYLDEIIEQISEFSKRVILADANLDKVLSAYNKHRDKPIREQAENIIHLFTLTNLGAPAAFKYFDTTIDRKRYTSTKEVLDATLIHQSITGLYETRIDLSQLGGDGGGGGGSGGGGSGGGGSGGGGSGGTLNIEDEYRLHETSKEPDVPLGSTWLSDFPQAWAETGGMGLAVRQAPLIIPLKATSTPVSIKQYPMSQEARLGIKPHIQRLLDQGILVPCQSPWNTPLLPVKKPGTNDYRPVQDLREVNKRVEDIHPTVPNPYNLLSGLPPSHQWYTVLDLKDAFFCLRLHPTSQPLFAFEWRDPEMGISGQLTWTRLPQGFKNSPTLFNEALHRDLADFRIQHPDLILLQYVDDLLLAATSEQDCQRGTRALLQTLGNLGYRASAKKAQICQKQVKYLGYLLKEGQRWLTEARKETVMGQPTPKTPRQLREFLGKAGFCRLFIPGFAEMAAPLYPLTKPGTLFNWGPDQQKAYQEIKQALLTAPALGLPDLTKPFELFVDEKQGYAKGVLTQKLGPWRRPVAYLSKKLDPVAAGWPPCLRMVAAIAVLTKDAGKLTMGQPLVILAPHAVEALVKQPPDRWLSNARMTHYQAMLLDTDRVQFGPVVALNPATLLPLPEKEAPHDCLEILAETHGTRPDLTDQPIPDADYTWYTDGSSFLQEGQRRAGAAVTTETEVIWARALPAGTSAQRAELIALTQALKMAEGKKLNVYTDSRYAFATAHVHGEIYRRRGWLTSEGREIKNKNEILALLKALFLPKRLSIIHCPGHQKGNSAEARGNRMADQAAREAAMKAVLETSTLLAGKRTADGSEFEKRTADGSEFESPKKKAKVE

SEQ ID NO: 1050 - protein, 2093 aa, synthetic construct
MPAAKRVKLDGGDKKYSIGLDIGTNSVGWAVITDEYKVPSKKFKVLGNTDRHSIKKNLIGALLFDSGETAEATRLKRTARRRYTRRKNRICYLQEIFSNEMAKVDDSFFHRLEESFLVEEDKKHERHPIFGNIVDEVAYHEKYPTIYHLRKKLVDSTDKADLRLIYLALAHMIKFRGHFLIEGDLNPDNSDVDKLFIQLVQTYNQLFEENPINASGVDAKAILSARLSKSRRLENLIAQLPGEKKNGLFGNLIALSLGLTPNFKSNFDLAEDAKLQLSKDTYDDDLDNLLAQIGDQYADLFLAAKNLSDAILLSDILRVNTEITKAPLSASMIKRYDEHHQDLTLLKALVRQQLPEKYKEIFFDQSKNGYAGYIDGGASQEEFYKFIKPILEKMDGTEELLVKLNREDLLRKQRTFDNGSIPHQIHLGELHAILRRQEDFYPFLKDNREKIEKILTFRIPYYVGPLARGNSRFAWMTRKSEETITPWNFEEVVDKGASAQSFIERMTNFDKNLPNEKVLPKHSLLYEYFTVYNELTKVKYVTEGMRKPAFLSGEQKKAIVDLLFKTNRKVTVKQLKEDYFKKIECFDSVEISGVEDRFNASLGTYHDLLKIIKDKDFLDNEENEDILEDIVLTLTLFEDREMIEERLKTYAHLFDDKVMKQLKRRRYTGWGRLSRKLINGIRDKQSGKTILDFLKSDGFANRNFMQLIHDDSLTFKEDIQKAQVSGQGDSLHEHIANLAGSPAIKKGILQTVKVVDELVKVMGRHKPENIVIEMARENQTTQKGQKNSRERMKRIEEGIKELGSQILKEHPVENTQLQNEKLYLYYLQNGRDMYVDQELDINRLSDYDVDHIVPQSFLKDDSIDNKVLTRSDKARGKSDNVPSEEVVKKMKNYWRQLLNAKLITQRKFDNLTKAERGGLSELDKAGFIKRQLVETRQITKHVAQILDSRMNTKYDENDKLIREVKVITLKSKLVSDFRKDFQFYKVREINNYHHAHDAYLNAVVGTALIKKYPKLESEFVYGDYKVYDVRKMIAKSEQEIGKATAKYFFYSNIMNFFKTEITLANGEIRKRPLIETNGETGEIVWDKGRDFATVRKVLSMPQVNIVKKTEVQTGGFSKESILPKRNSDKLIARKKDWDPKKYGGFDSPTVAYSVLVVAKVEKGKSKKLKSVKELLGITIMERSSFEKNPIDFLEAKGYKEVKKDLIIKLPKYSLFELENGRKRMLASAGELQKGNELALPSKYVNFLYLASHYEKLKGSPEDNEQKQLFVEQHKHYLDEIIEQISEFSKRVILADANLDKVLSAYNKHRDKPIREQAENIIHLFTLTNLGAPAAFKYFDTTIDRKRYTSTKEVLDATLIHQSITGLYETRIDLSQLGGDGGEAAAKGGGGGTLNIEDEYRLHETSKEPDVPLGSTWLSDFPQAWAETGGMGLAVRQAPLIIPLKATSTPVSIKQYPMSQEARLGIKPHIQRLLDQGILVPCQSPWNTPLLPVKKPGTNDYRPVQDLREVNKRVEDIHPTVPNPYNLLSGLPPSHQWYTVLDLKDAFFCLRLHPTSQPLFAFEWRDPEMGISGQLTWTRLPQGFKNSPTLFNEALHRDLADFRIQHPDLILLQYVDDLLLAATSEQDCQRGTRALLQTLGNLGYRASAKKAQICQKQVKYLGYLLKEGQRWLTEARKETVMGQPTPKTPRQLREFLGKAGFCRLFIPGFAEMAAPLYPLTKPGTLFNWGPDQQKAYQEIKQALLTAPALGLPDLTKPFELFVDEKQGYAKGVLTQKLGPWRRPVAYLSKKLDPVAAGWPPCLRMVAAIAVLTKDAGKLTMGQPLVILAPHAVEALVKQPPDRWLSNARMTHYQAMLLDTDRVQFGPVVALNPATLLPLPEKEAPHDCLEILAETHGTRPDLTDQPIPDADYTWYTDGSSFLQEGQRRAGAAVTTETEVIWARALPAGTSAQRAELIALTQALKMAEGKKLNVYTDSRYAFATAHVHGEIYRRRGWLTSEGREIKNKNEILALLKALFLPKRLSIIHCPGHQKGNSAEARGNRMADQAAREAAMKAVLETSTLLAGKRTADGSEFEKRTADGSEFESPKKKAKVE

SEQ ID NO: 1051 - protein, 2096 aa, synthetic construct
MPAAKRVKLDGGDKKYSIGLDIGTNSVGWAVITDEYKVPSKKFKVLGNTDRHSIKKNLIGALLFDSGETAEATRLKRTARRRYTRRKNRICYLQEIFSNEMAKVDDSFFHRLEESFLVEEDKKHERHPIFGNIVDEVAYHEKYPTIYHLRKKLVDSTDKADLRLIYLALAHMIKFRGHFLIEGDLNPDNSDVDKLFIQLVQTYNQLFEENPINASGVDAKAILSARLSKSRRLENLIAQLPGEKKNGLFGNLIALSLGLTPNFKSNFDLAEDAKLQLSKDTYDDDLDNLLAQIGDQYADLFLAAKNLSDAILLSDILRVNTEITKAPLSASMIKRYDEHHQDLTLLKALVRQQLPEKYKEIFFDQSKNGYAGYIDGGASQEEFYKFIKPILEKMDGTEELLVKLNREDLLRKQRTFDNGSIPHQIHLGELHAILRRQEDFYPFLKDNREKIEKILTFRIPYYVGPLARGNSRFAWMTRKSEETITPWNFEEVVDKGASAQSFIERMTNFDKNLPNEKVLPKHSLLYEYFTVYNELTKVKYVTEGMRKPAFLSGEQKKAIVDLLFKTNRKVTVKQLKEDYFKKIECFDSVEISGVEDRFNASLGTYHDLLKIIKDKDFLDNEENEDILEDIVLTLTLFEDREMIEERLKTYAHLFDDKVMKQLKRRRYTGWGRLSRKLINGIRDKQSGKTILDFLKSDGFANRNFMQLIHDDSLTFKEDIQKAQVSGQGDSLHEHIANLAGSPAIKKGILQTVKVVDELVKVMGRHKPENIVIEMARENQTTQKGQKNSRERMKRIEEGIKELGSQILKEHPVENTQLQNEKLYLYYLQNGRDMYVDQELDINRLSDYDVDHIVPQSFLKDDSIDNKVLTRSDKARGKSDNVPSEEVVKKMKNYWRQLLNAKLITQRKFDNLTKAERGGLSELDKAGFIKRQLVETRQITKHVAQILDSRMNTKYDENDKLIREVKVITLKSKLVSDFRKDFQFYKVREINNYHHAHDAYLNAVVGTALIKKYPKLESEFVYGDYKVYDVRKMIAKSEQEIGKATAKYFFYSNIMNFFKTEITLANGEIRKRPLIETNGETGEIVWDKGRDFATVRKVLSMPQVNIVKKTEVQTGGFSKESILPKRNSDKLIARKKDWDPKKYGGFDSPTVAYSVLVVAKVEKGKSKKLKSVKELLGITIMERSSFEKNPIDFLEAKGYKEVKKDLIIKLPKYSLFELENGRKRMLASAGELQKGNELALPSKYVNFLYLASHYEKLKGSPEDNEQKQLFVEQHKHYLDEIIEQISEFSKRVILADANLDKVLSAYNKHRDKPIREQAENIIHLFTLTNLGAPAAFKYFDTTIDRKRYTSTKEVLDATLIHQSITGLYETRIDLSQLGGDGGEAAAKGGSGGGGGTLNIEDEYRLHETSKEPDVPLGSTWLSDFPQAWAETGGMGLAVRQAPLIIPLKATSTPVSIKQYPMSQEARLGIKPHIQRLLDQGILVPCQSPWNTPLLPVKKPGTNDYRPVQDLREVNKRVEDIHPTVPNPYNLLSGLPPSHQWYTVLDLKDAFFCLRLHPTSQPLFAFEWRDPEMGISGQLTWTRLPQGFKNSPTLFNEALHRDLADFRIQHPDLILLQYVDDLLLAATSEQDCQRGTRALLQTLGNLGYRASAKKAQICQKQVKYLGYLLKEGQRWLTEARKETVMGQPTPKTPRQLREFLGKAGFCRLFIPGFAEMAAPLYPLTKPGTLFNWGPDQQKAYQEIKQALLTAPALGLPDLTKPFELFVDEKQGYAKGVLTQKLGPWRRPVAYLSKKLDPVAAGWPPCLRMVAAIAVLTKDAGKLTMGQPLVILAPHAVEALVKQPPDRWLSNARMTHYQAMLLDTDRVQFGPVVALNPATLLPLPEKEAPHDCLEILAETHGTRPDLTDQPIPDADYTWYTDGSSFLQEGQRRAGAAVTTETEVIWARALPAGTSAQRAELIALTQALKMAEGKKLNVYTDSRYAFATAHVHGEIYRRRGWLTSEGREIKNKNEILALLKALFLPKRLSIIHCPGHQKGNSAEARGNRMADQAAREAAMKAVLETSTLLAGKRTADGSEFEKRTADGSEFESPKKKAKVE

SEQ ID NO: 1052 - protein, 2115 aa, synthetic construct
MPAAKRVKLDGGDKKYSIGLDIGTNSVGWAVITDEYKVPSKKFKVLGNTDRHSIKKNLIGALLFDSGETAEATRLKRTARRRYTRRKNRICYLQEIFSNEMAKVDDSFFHRLEESFLVEEDKKHERHPIFGNIVDEVAYHEKYPTIYHLRKKLVDSTDKADLRLIYLALAHMIKFRGHFLIEGDLNPDNSDVDKLFIQLVQTYNQLFEENPINASGVDAKAILSARLSKSRRLENLIAQLPGEKKNGLFGNLIALSLGLTPNFKSNFDLAEDAKLQLSKDTYDDDLDNLLAQIGDQYADLFLAAKNLSDAILLSDILRVNTEITKAPLSASMIKRYDEHHQDLTLLKALVRQQLPEKYKEIFFDQSKNGYAGYIDGGASQEEFYKFIKPILEKMDGTEELLVKLNREDLLRKQRTFDNGSIPHQIHLGELHAILRRQEDFYPFLKDNREKIEKILTFRIPYYVGPLARGNSRFAWMTRKSEETITPWNFEEVVDKGASAQSFIERMTNFDKNLPNEKVLPKHSLLYEYFTVYNELTKVKYVTEGMRKPAFLSGEQKKAIVDLLFKTNRKVTVKQLKEDYFKKIECFDSVEISGVEDRFNASLGTYHDLLKIIKDKDFLDNEENEDILEDIVLTLTLFEDREMIEERLKTYAHLFDDKVMKQLKRRRYTGWGRLSRKLINGIRDKQSGKTILDFLKSDGFANRNFMQLIHDDSLTFKEDIQKAQVSGQGDSLHEHIANLAGSPAIKKGILQTVKVVDELVKVMGRHKPENIVIEMARENQTTQKGQKNSRERMKRIEEGIKELGSQILKEHPVENTQLQNEKLYLYYLQNGRDMYVDQELDINRLSDYDVDHIVPQSFLKDDSIDNKVLTRSDKARGKSDNVPSEEVVKKMKNYWRQLLNAKLITQRKFDNLTKAERGGLSELDKAGFIKRQLVETRQITKHVAQILDSRMNTKYDENDKLIREVKVITLKSKLVSDFRKDFQFYKVREINNYHHAHDAYLNAVVGTALIKKYPKLESEFVYGDYKVYDVRKMIAKSEQEIGKATAKYFFYSNIMNFFKTEITLANGEIRKRPLIETNGETGEIVWDKGRDFATVRKVLSMPQVNIVKKTEVQTGGFSKESILPKRNSDKLIARKKDWDPKKYGGFDSPTVAYSVLVVAKVEKGKSKKLKSVKELLGITIMERSSFEKNPIDFLEAKGYKEVKKDLIIKLPKYSLFELENGRKRMLASAGELQKGNELALPSKYVNFLYLASHYEKLKGSPEDNEQKQLFVEQHKHYLDEIIEQISEFSKRVILADANLDKVLSAYNKHRDKPIREQAENIIHLFTLTNLGAPAAFKYFDTTIDRKRYTSTKEVLDATLIHQSITGLYETRIDLSQLGGDGGEAAAKEAAAKEAAAKEAAAKEAAAKEAAAKGGTLNIEDEYRLHETSKEPDVPLGSTWLSDFPQAWAETGGMGLAVRQAPLIIPLKATSTPVSIKQYPMSQEARLGIKPHIQRLLDQGILVPCQSPWNTPLLPVKKPGTNDYRPVQDLREVNKRVEDIHPTVPNPYNLLSGLPPSHQWYTVLDLKDAFFCLRLHPTSQPLFAFEWRDPEMGISGQLTWTRLPQGFKNSPTLFNEALHRDLADFRIQHPDLILLQYVDDLLLAATSEQDCQRGTRALLQTLGNLGYRASAKKAQICQKQVKYLGYLLKEGQRWLTEARKETVMGQPTPKTPRQLREFLGKAGFCRLFIPGFAEMAAPLYPLTKPGTLFNWGPDQQKAYQEIKQALLTAPALGLPDLTKPFELFVDEKQGYAKGVLTQKLGPWRRPVAYLSKKLDPVAAGWPPCLRMVAAIAVLTKDAGKLTMGQPLVILAPHAVEALVKQPPDRWLSNARMTHYQAMLLDTDRVQFGPVVALNPATLLPLPEKEAPHDCLEILAETHGTRPDLTDQPIPDADYTWYTDGSSFLQEGQRRAGAAVTTETEVIWARALPAGTSAQRAELIALTQALKMAEGKKLNVYTDSRYAFATAHVHGEIYRRRGWLTSEGREIKNKNEILALLKALFLPKRLSIIHCPGHQKGNSAEARGNRMADQAAREAAMKAVLETSTLLAGKRTADGSEFEKRTADGSEFESPKKKAKVE

SEQ ID NO: 1053 - protein, 2096 aa, synthetic construct
MPAAKRVKLDGGDKKYSIGLDIGTNSVGWAVITDEYKVPSKKFKVLGNTDRHSIKKNLIGALLFDSGETAEATRLKRTARRRYTRRKNRICYLQEIFSNEMAKVDDSFFHRLEESFLVEEDKKHERHPIFGNIVDEVAYHEKYPTIYHLRKKLVDSTDKADLRLIYLALAHMIKFRGHFLIEGDLNPDNSDVDKLFIQLVQTYNQLFEENPINASGVDAKAILSARLSKSRRLENLIAQLPGEKKNGLFGNLIALSLGLTPNFKSNFDLAEDAKLQLSKDTYDDDLDNLLAQIGDQYADLFLAAKNLSDAILLSDILRVNTEITKAPLSASMIKRYDEHHQDLTLLKALVRQQLPEKYKEIFFDQSKNGYAGYIDGGASQEEFYKFIKPILEKMDGTEELLVKLNREDLLRKQRTFDNGSIPHQIHLGELHAILRRQEDFYPFLKDNREKIEKILTFRIPYYVGPLARGNSRFAWMTRKSEETITPWNFEEVVDKGASAQSFIERMTNFDKNLPNEKVLPKHSLLYEYFTVYNELTKVKYVTEGMRKPAFLSGEQKKAIVDLLFKTNRKVTVKQLKEDYFKKIECFDSVEISGVEDRFNASLGTYHDLLKIIKDKDFLDNEENEDILEDIVLTLTLFEDREMIEERLKTYAHLFDDKVMKQLKRRRYTGWGRLSRKLINGIRDKQSGKTILDFLKSDGFANRNFMQLIHDDSLTFKEDIQKAQVSGQGDSLHEHIANLAGSPAIKKGILQTVKVVDELVKVMGRHKPENIVIEMARENQTTQKGQKNSRERMKRIEEGIKELGSQILKEHPVENTQLQNEKLYLYYLQNGRDMYVDQELDINRLSDYDVDHIVPQSFLKDDSIDNKVLTRSDKARGKSDNVPSEEVVKKMKNYWRQLLNAKLITQRKFDNLTKAERGGLSELDKAGFIKRQLVETRQITKHVAQILDSRMNTKYDENDKLIREVKVITLKSKLVSDFRKDFQFYKVREINNYHHAHDAYLNAVVGTALIKKYPKLESEFVYGDYKVYDVRKMIAKSEQEIGKATAKYFFYSNIMNFFKTEITLANGEIRKRPLIETNGETGEIVWDKGRDFATVRKVLSMPQVNIVKKTEVQTGGFSKESILPKRNSDKLIARKKDWDPKKYGGFDSPTVAYSVLVVAKVEKGKSKKLKSVKELLGITIMERSSFEKNPIDFLEAKGYKEVKKDLIIKLPKYSLFELENGRKRMLASAGELQKGNELALPSKYVNFLYLASHYEKLKGSPEDNEQKQLFVEQHKHYLDEIIEQISEFSKRVILADANLDKVLSAYNKHRDKPIREQAENIIHLFTLTNLGAPAAFKYFDTTIDRKRYTSTKEVLDATLIHQSITGLYETRIDLSQLGGDGGGGGGSSEAAAKGGTLNIEDEYRLHETSKEPDVPLGSTWLSDFPQAWAETGGMGLAVRQAPLIIPLKATSTPVSIKQYPMSQEARLGIKPHIQRLLDQGILVPCQSPWNTPLLPVKKPGTNDYRPVQDLREVNKRVEDIHPTVPNPYNLLSGLPPSHQWYTVLDLKDAFFCLRLHPTSQPLFAFEWRDPEMGISGQLTWTRLPQGFKNSPTLFNEALHRDLADFRIQHPDLILLQYVDDLLLAATSEQDCQRGTRALLQTLGNLGYRASAKKAQICQKQVKYLGYLLKEGQRWLTEARKETVMGQPTPKTPRQLREFLGKAGFCRLFIPGFAEMAAPLYPLTKPGTLFNWGPDQQKAYQEIKQALLTAPALGLPDLTKPFELFVDEKQGYAKGVLTQKLGPWRRPVAYLSKKLDPVAAGWPPCLRMVAAIAVLTKDAGKLTMGQPLVILAPHAVEALVKQPPDRWLSNARMTHYQAMLLDTDRVQFGPVVALNPATLLPLPEKEAPHDCLEILAETHGTRPDLTDQPIPDADYTWYTDGSSFLQEGQRRAGAAVTTETEVIWARALPAGTSAQRAELIALTQALKMAEGKKLNVYTDSRYAFATAHVHGEIYRRRGWLTSEGREIKNKNEILALLKALFLPKRLSIIHCPGHQKGNSAEARGNRMADQAAREAAMKAVLETSTLLAGKRTADGSEFEKRTADGSEFESPKKKAKVE

SEQ ID NO: 1054 - protein, 2096 aa, synthetic construct
MPAAKRVKLDGGDKKYSIGLDIGTNSVGWAVITDEYKVPSKKFKVLGNTDRHSIKKNLIGALLFDSGETAEATRLKRTARRRYTRRKNRICYLQEIFSNEMAKVDDSFFHRLEESFLVEEDKKHERHPIFGNIVDEVAYHEKYPTIYHLRKKLVDSTDKADLRLIYLALAHMIKFRGHFLIEGDLNPDNSDVDKLFIQLVQTYNQLFEENPINASGVDAKAILSARLSKSRRLENLIAQLPGEKKNGLFGNLIALSLGLTPNFKSNFDLAEDAKLQLSKDTYDDDLDNLLAQIGDQYADLFLAAKNLSDAILLSDILRVNTEITKAPLSASMIKRYDEHHQDLTLLKALVRQQLPEKYKEIFFDQSKNGYAGYIDGGASQEEFYKFIKPILEKMDGTEELLVKLNREDLLRKQRTFDNGSIPHQIHLGELHAILRRQEDFYPFLKDNREKIEKILTFRIPYYVGPLARGNSRFAWMTRKSEETITPWNFEEVVDKGASAQSFIERMTNFDKNLPNEKVLPKHSLLYEYFTVYNELTKVKYVTEGMRKPAFLSGEQKKAIVDLLFKTNRKVTVKQLKEDYFKKIECFDSVEISGVEDRFNASLGTYHDLLKIIKDKDFLDNEENEDILEDIVLTLTLFEDREMIEERLKTYAHLFDDKVMKQLKRRRYTGWGRLSRKLINGIRDKQSGKTILDFLKSDGFANRNFMQLIHDDSLTFKEDIQKAQVSGQGDSLHEHIANLAGSPAIKKGILQTVKVVDELVKVMGRHKPENIVIEMARENQTTQKGQKNSRERMKRIEEGIKELGSQILKEHPVENTQLQNEKLYLYYLQNGRDMYVDQELDINRLSDYDVDHIVPQSFLKDDSIDNKVLTRSDKARGKSDNVPSEEVVKKMKNYWRQLLNAKLITQRKFDNLTKAERGGLSELDKAGFIKRQLVETRQITKHVAQILDSRMNTKYDENDKLIREVKVITLKSKLVSDFRKDFQFYKVREINNYHHAHDAYLNAVVGTALIKKYPKLESEFVYGDYKVYDVRKMIAKSEQEIGKATAKYFFYSNIMNFFKTEITLANGEIRKRPLIETNGETGEIVWDKGRDFATVRKVLSMPQVNIVKKTEVQTGGFSKESILPKRNSDKLIARKKDWDPKKYGGFDSPTVAYSVLVVAKVEKGKSKKLKSVKELLGITIMERSSFEKNPIDFLEAKGYKEVKKDLIIKLPKYSLFELENGRKRMLASAGELQKGNELALPSKYVNFLYLASHYEKLKGSPEDNEQKQLFVEQHKHYLDEIIEQISEFSKRVILADANLDKVLSAYNKHRDKPIREQAENIIHLFTLTNLGAPAAFKYFDTTIDRKRYTSTKEVLDATLIHQSITGLYETRIDLSQLGGDGGGSSGGGEAAAKGGTLNIEDEYRLHETSKEPDVPLGSTWLSDFPQAWAETGGMGLAVRQAPLIIPLKATSTPVSIKQYPMSQEARLGIKPHIQRLLDQGILVPCQSPWNTPLLPVKKPGTNDYRPVQDLREVNKRVEDIHPTVPNPYNLLSGLPPSHQWYTVLDLKDAFFCLRLHPTSQPLFAFEWRDPEMGISGQLTWTRLPQGFKNSPTLFNEALHRDLADFRIQHPDLILLQYVDDLLLAATSEQDCQRGTRALLQTLGNLGYRASAKKAQICQKQVKYLGYLLKEGQRWLTEARKETVMGQPTPKTPRQLREFLGKAGFCRLFIPGFAEMAAPLYPLTKPGTLFNWGPDQQKAYQEIKQALLTAPALGLPDLTKPFELFVDEKQGYAKGVLTQKLGPWRRPVAYLSKKLDPVAAGWPPCLRMVAAIAVLTKDAGKLTMGQPLVILAPHAVEALVKQPPDRWLSNARMTHYQAMLLDTDRVQFGPVVALNPATLLPLPEKEAPHDCLEILAETHGTRPDLTDQPIPDADYTWYTDGSSFLQEGQRRAGAAVTTETEVIWARALPAGTSAQRAELIALTQALKMAEGKKLNVYTDSRYAFATAHVHGEIYRRRGWLTSEGREIKNKNEILALLKALFLPKRLSIIHCPGHQKGNSAEARGNRMADQAAREAAMKAVLETSTLLAGKRTADGSEFEKRTADGSEFESPKKKAKVE

SEQ ID NO: 1055 - protein, 2094 aa, synthetic construct
MPAAKRVKLDGGDKKYSIGLDIGTNSVGWAVITDEYKVPSKKFKVLGNTDRHSIKKNLIGALLFDSGETAEATRLKRTARRRYTRRKNRICYLQEIFSNEMAKVDDSFFHRLEESFLVEEDKKHERHPIFGNIVDEVAYHEKYPTIYHLRKKLVDSTDKADLRLIYLALAHMIKFRGHFLIEGDLNPDNSDVDKLFIQLVQTYNQLFEENPINASGVDAKAILSARLSKSRRLENLIAQLPGEKKNGLFGNLIALSLGLTPNFKSNFDLAEDAKLQLSKDTYDDDLDNLLAQIGDQYADLFLAAKNLSDAILLSDILRVNTEITKAPLSASMIKRYDEHHQDLTLLKALVRQQLPEKYKEIFFDQSKNGYAGYIDGGASQEEFYKFIKPILEKMDGTEELLVKLNREDLLRKQRTFDNGSIPHQIHLGELHAILRRQEDFYPFLKDNREKIEKILTFRIPYYVGPLARGNSRFAWMTRKSEETITPWNFEEVVDKGASAQSFIERMTNFDKNLPNEKVLPKHSLLYEYFTVYNELTKVKYVTEGMRKPAFLSGEQKKAIVDLLFKTNRKVTVKQLKEDYFKKIECFDSVEISGVEDRFNASLGTYHDLLKIIKDKDFLDNEENEDILEDIVLTLTLFEDREMIEERLKTYAHLFDDKVMKQLKRRRYTGWGRLSRKLINGIRDKQSGKTILDFLKSDGFANRNFMQLIHDDSLTFKEDIQKAQVSGQGDSLHEHIANLAGSPAIKKGILQTVKVVDELVKVMGRHKPENIVIEMARENQTTQKGQKNSRERMKRIEEGIKELGSQILKEHPVENTQLQNEKLYLYYLQNGRDMYVDQELDINRLSDYDVDHIVPQSFLKDDSIDNKVLTRSDKARGKSDNVPSEEVVKKMKNYWRQLLNAKLITQRKFDNLTKAERGGLSELDKAGFIKRQLVETRQITKHVAQILDSRMNTKYDENDKLIREVKVITLKSKLVSDFRKDFQFYKVREINNYHHAHDAYLNAVVGTALIKKYPKLESEFVYGDYKVYDVRKMIAKSEQEIGKATAKYFFYSNIMNFFKTEITLANGEIRKRPLIETNGETGEIVWDKGRDFATVRKVLSMPQVNIVKKTEVQTGGFSKESILPKRNSDKLIARKKDWDPKKYGGFDSPTVAYSVLVVAKVEKGKSKKLKSVKELLGITIMERSSFEKNPIDFLEAKGYKEVKKDLIIKLPKYSLFELENGRKRMLASAGELQKGNELALPSKYVNFLYLASHYEKLKGSPEDNEQKQLFVEQHKHYLDEIIEQISEFSKRVILADANLDKVLSAYNKHRDKPIREQAENIIHLFTLTNLGAPAAFKYFDTTIDRKRYTSTKEVLDATLIHQSITGLYETRIDLSQLGGDGGGGSPAPGGGGGTLNIEDEYRLHETSKEPDVPLGSTWLSDFPQAWAETGGMGLAVRQAPLIIPLKATSTPVSIKQYPMSQEARLGIKPHIQRLLDQGILVPCQSPWNTPLLPVKKPGTNDYRPVQDLREVNKRVEDIHPTVPNPYNLLSGLPPSHQWYTVLDLKDAFFCLRLHPTSQPLFAFEWRDPEMGISGQLTWTRLPQGFKNSPTLFNEALHRDLADFRIQHPDLILLQYVDDLLLAATSEQDCQRGTRALLQTLGNLGYRASAKKAQICQKQVKYLGYLLKEGQRWLTEARKETVMGQPTPKTPRQLREFLGKAGFCRLFIPGFAEMAAPLYPLTKPGTLFNWGPDQQKAYQEIKQALLTAPALGLPDLTKPFELFVDEKQGYAKGVLTQKLGPWRRPVAYLSKKLDPVAAGWPPCLRMVAAIAVLTKDAGKLTMGQPLVILAPHAVEALVKQPPDRWLSNARMTHYQAMLLDTDRVQFGPVVALNPATLLPLPEKEAPHDCLEILAETHGTRPDLTDQPIPDADYTWYTDGSSFLQEGQRRAGAAVTTETEVIWARALPAGTSAQRAELIALTQALKMAEGKKLNVYTDSRYAFATAHVHGEIYRRRGWLTSEGREIKNKNEILALLKALFLPKRLSIIHCPGHQKGNSAEARGNRMADQAAREAAMKAVLETSTLLAGKRTADGSEFEKRTADGSEFESPKKKAKVE

SEQ ID NO: 1056 - protein, 2096 aa, synthetic construct
MPAAKRVKLDGGDKKYSIGLDIGTNSVGWAVITDEYKVPSKKFKVLGNTDRHSIKKNLIGALLFDSGETAEATRLKRTARRRYTRRKNRICYLQEIFSNEMAKVDDSFFHRLEESFLVEEDKKHERHPIFGNIVDEVAYHEKYPTIYHLRKKLVDSTDKADLRLIYLALAHMIKFRGHFLIEGDLNPDNSDVDKLFIQLVQTYNQLFEENPINASGVDAKAILSARLSKSRRLENLIAQLPGEKKNGLFGNLIALSLGLTPNFKSNFDLAEDAKLQLSKDTYDDDLDNLLAQIGDQYADLFLAAKNLSDAILLSDILRVNTEITKAPLSASMIKRYDEHHQDLTLLKALVRQQLPEKYKEIFFDQSKNGYAGYIDGGASQEEFYKFIKPILEKMDGTEELLVKLNREDLLRKQRTFDNGSIPHQIHLGELHAILRRQEDFYPFLKDNREKIEKILTFRIPYYVGPLARGNSRFAWMTRKSEETITPWNFEEVVDKGASAQSFIERMTNFDKNLPNEKVLPKHSLLYEYFTVYNELTKVKYVTEGMRKPAFLSGEQKKAIVDLLFKTNRKVTVKQLKEDYFKKIECFDSVEISGVEDRFNASLGTYHDLLKIIKDKDFLDNEENEDILEDIVLTLTLFEDREMIEERLKTYAHLFDDKVMKQLKRRRYTGWGRLSRKLINGIRDKQSGKTILDFLKSDGFANRNFMQLIHDDSLTFKEDIQKAQVSGQGDSLHEHIANLAGSPAIKKGILQTVKVVDELVKVMGRHKPENIVIEMARENQTTQKGQKNSRERMKRIEEGIKELGSQILKEHPVENTQLQNEKLYLYYLQNGRDMYVDQELDINRLSDYDVDHIVPQSFLKDDSIDNKVLTRSDKARGKSDNVPSEEVVKKMKNYWRQLLNAKLITQRKFDNLTKAERGGLSELDKAGFIKRQLVETRQITKHVAQILDSRMNTKYDENDKLIREVKVITLKSKLVSDFRKDFQFYKVREINNYHHAHDAYLNAVVGTALIKKYPKLESEFVYGDYKVYDVRKMIAKSEQEIGKATAKYFFYSNIMNFFKTEITLANGEIRKRPLIETNGETGEIVWDKGRDFATVRKVLSMPQVNIVKKTEVQTGGFSKESILPKRNSDKLIARKKDWDPKKYGGFDSPTVAYSVLVVAKVEKGKSKKLKSVKELLGITIMERSSFEKNPIDFLEAKGYKEVKKDLIIKLPKYSLFELENGRKRMLASAGELQKGNELALPSKYVNFLYLASHYEKLKGSPEDNEQKQLFVEQHKHYLDEIIEQISEFSKRVILADANLDKVLSAYNKHRDKPIREQAENIIHLFTLTNLGAPAAFKYFDTTIDRKRYTSTKEVLDATLIHQSITGLYETRIDLSQLGGDGGEAAAKGGGGSSGGTLNIEDEYRLHETSKEPDVPLGSTWLSDFPQAWAETGGMGLAVRQAPLIIPLKATSTPVSIKQYPMSQEARLGIKPHIQRLLDQGILVPCQSPWNTPLLPVKKPGTNDYRPVQDLREVNKRVEDIHPTVPNPYNLLSGLPPSHQWYTVLDLKDAFFCLRLHPTSQPLFAFEWRDPEMGISGQLTWTRLPQGFKNSPTLFNEALHRDLADFRIQHPDLILLQYVDDLLLAATSEQDCQRGTRALLQTLGNLGYRASAKKAQICQKQVKYLGYLLKEGQRWLTEARKETVMGQPTPKTPRQLREFLGKAGFCRLFIPGFAEMAAPLYPLTKPGTLFNWGPDQQKAYQEIKQALLTAPALGLPDLTKPFELFVDEKQGYAKGVLTQKLGPWRRPVAYLSKKLDPVAAGWPPCLRMVAAIAVLTKDAGKLTMGQPLVILAPHAVEALVKQPPDRWLSNARMTHYQAMLLDTDRVQFGPVVALNPATLLPLPEKEAPHDCLEILAETHGTRPDLTDQPIPDADYTWYTDGSSFLQEGQRRAGAAVTTETEVIWARALPAGTSAQRAELIALTQALKMAEGKKLNVYTDSRYAFATAHVHGEIYRRRGWLTSEGREIKNKNEILALLKALFLPKRLSIIHCPGHQKGNSAEARGNRMADQAAREAAMKAVLETSTLLAGKRTADGSEFEKRTADGSEFESPKKKAKVE

SEQ ID NO: 1057 - protein, 2089 aa, synthetic construct
MPAAKRVKLDGGDKKYSIGLDIGTNSVGWAVITDEYKVPSKKFKVLGNTDRHSIKKNLIGALLFDSGETAEATRLKRTARRRYTRRKNRICYLQEIFSNEMAKVDDSFFHRLEESFLVEEDKKHERHPIFGNIVDEVAYHEKYPTIYHLRKKLVDSTDKADLRLIYLALAHMIKFRGHFLIEGDLNPDNSDVDKLFIQLVQTYNQLFEENPINASGVDAKAILSARLSKSRRLENLIAQLPGEKKNGLFGNLIALSLGLTPNFKSNFDLAEDAKLQLSKDTYDDDLDNLLAQIGDQYADLFLAAKNLSDAILLSDILRVNTEITKAPLSASMIKRYDEHHQDLTLLKALVRQQLPEKYKEIFFDQSKNGYAGYIDGGASQEEFYKFIKPILEKMDGTEELLVKLNREDLLRKQRTFDNGSIPHQIHLGELHAILRRQEDFYPFLKDNREKIEKILTFRIPYYVGPLARGNSRFAWMTRKSEETITPWNFEEVVDKGASAQSFIERMTNFDKNLPNEKVLPKHSLLYEYFTVYNELTKVKYVTEGMRKPAFLSGEQKKAIVDLLFKTNRKVTVKQLKEDYFKKIECFDSVEISGVEDRFNASLGTYHDLLKIIKDKDFLDNEENEDILEDIVLTLTLFEDREMIEERLKTYAHLFDDKVMKQLKRRRYTGWGRLSRKLINGIRDKQSGKTILDFLKSDGFANRNFMQLIHDDSLTFKEDIQKAQVSGQGDSLHEHIANLAGSPAIKKGILQTVKVVDELVKVMGRHKPENIVIEMARENQTTQKGQKNSRERMKRIEEGIKELGSQILKEHPVENTQLQNEKLYLYYLQNGRDMYVDQELDINRLSDYDVDHIVPQSFLKDDSIDNKVLTRSDKARGKSDNVPSEEVVKKMKNYWRQLLNAKLITQRKFDNLTKAERGGLSELDKAGFIKRQLVETRQITKHVAQILDSRMNTKYDENDKLIREVKVITLKSKLVSDFRKDFQFYKVREINNYHHAHDAYLNAVVGTALIKKYPKLESEFVYGDYKVYDVRKMIAKSEQEIGKATAKYFFYSNIMNFFKTEITLANGEIRKRPLIETNGETGEIVWDKGRDFATVRKVLSMPQVNIVKKTEVQTGGFSKESILPKRNSDKLIARKKDWDPKKYGGFDSPTVAYSVLVVAKVEKGKSKKLKSVKELLGITIMERSSFEKNPIDFLEAKGYKEVKKDLIIKLPKYSLFELENGRKRMLASAGELQKGNELALPSKYVNFLYLASHYEKLKGSPEDNEQKQLFVEQHKHYLDEIIEQISEFSKRVILADANLDKVLSAYNKHRDKPIREQAENIIHLFTLTNLGAPAAFKYFDTTIDRKRYTSTKEVLDATLIHQSITGLYETRIDLSQLGGDGGGGGGGGTLNIEDEYRLHETSKEPDVPLGSTWLSDFPQAWAETGGMGLAVRQAPLIIPLKATSTPVSIKQYPMSQEARLGIKPHIQRLLDQGILVPCQSPWNTPLLPVKKPGTNDYRPVQDLREVNKRVEDIHPTVPNPYNLLSGLPPSHQWYTVLDLKDAFFCLRLHPTSQPLFAFEWRDPEMGISGQLTWTRLPQGFKNSPTLFNEALHRDLADFRIQHPDLILLQYVDDLLLAATSEQDCQRGTRALLQTLGNLGYRASAKKAQICQKQVKYLGYLLKEGQRWLTEARKETVMGQPTPKTPRQLREFLGKAGFCRLFIPGFAEMAAPLYPLTKPGTLFNWGPDQQKAYQEIKQALLTAPALGLPDLTKPFELFVDEKQGYAKGVLTQKLGPWRRPVAYLSKKLDPVAAGWPPCLRMVAAIAVLTKDAGKLTMGQPLVILAPHAVEALVKQPPDRWLSNARMTHYQAMLLDTDRVQFGPVVALNPATLLPLPEKEAPHDCLEILAETHGTRPDLTDQPIPDADYTWYTDGSSFLQEGQRRAGAAVTTETEVIWARALPAGTSAQRAELIALTQALKMAEGKKLNVYTDSRYAFATAHVHGEIYRRRGWLTSEGREIKNKNEILALLKALFLPKRLSIIHCPGHQKGNSAEARGNRMADQAAREAAMKAVLETSTLLAGKRTADGSEFEKRTADGSEFESPKKKAKVE

SEQ ID NO: 1058 - protein, 2096 aa, synthetic construct
MPAAKRVKLDGGDKKYSIGLDIGTNSVGWAVITDEYKVPSKKFKVLGNTDRHSIKKNLIGALLFDSGETAEATRLKRTARRRYTRRKNRICYLQEIFSNEMAKVDDSFFHRLEESFLVEEDKKHERHPIFGNIVDEVAYHEKYPTIYHLRKKLVDSTDKADLRLIYLALAHMIKFRGHFLIEGDLNPDNSDVDKLFIQLVQTYNQLFEENPINASGVDAKAILSARLSKSRRLENLIAQLPGEKKNGLFGNLIALSLGLTPNFKSNFDLAEDAKLQLSKDTYDDDLDNLLAQIGDQYADLFLAAKNLSDAILLSDILRVNTEITKAPLSASMIKRYDEHHQDLTLLKALVRQQLPEKYKEIFFDQSKNGYAGYIDGGASQEEFYKFIKPILEKMDGTEELLVKLNREDLLRKQRTFDNGSIPHQIHLGELHAILRRQEDFYPFLKDNREKIEKILTFRIPYYVGPLARGNSRFAWMTRKSEETITPWNFEEVVDKGASAQSFIERMTNFDKNLPNEKVLPKHSLLYEYFTVYNELTKVKYVTEGMRKPAFLSGEQKKAIVDLLFKTNRKVTVKQLKEDYFKKIECFDSVEISGVEDRFNASLGTYHDLLKIIKDKDFLDNEENEDILEDIVLTLTLFEDREMIEERLKTYAHLFDDKVMKQLKRRRYTGWGRLSRKLINGIRDKQSGKTILDFLKSDGFANRNFMQLIHDDSLTFKEDIQKAQVSGQGDSLHEHIANLAGSPAIKKGILQTVKVVDELVKVMGRHKPENIVIEMARENQTTQKGQKNSRERMKRIEEGIKELGSQILKEHPVENTQLQNEKLYLYYLQNGRDMYVDQELDINRLSDYDVDHIVPQSFLKDDSIDNKVLTRSDKARGKSDNVPSEEVVKKMKNYWRQLLNAKLITQRKFDNLTKAERGGLSELDKAGFIKRQLVETRQITKHVAQILDSRMNTKYDENDKLIREVKVITLKSKLVSDFRKDFQFYKVREINNYHHAHDAYLNAVVGTALIKKYPKLESEFVYGDYKVYDVRKMIAKSEQEIGKATAKYFFYSNIMNFFKTEITLANGEIRKRPLIETNGETGEIVWDKGRDFATVRKVLSMPQVNIVKKTEVQTGGFSKESILPKRNSDKLIARKKDWDPKKYGGFDSPTVAYSVLVVAKVEKGKSKKLKSVKELLGITIMERSSFEKNPIDFLEAKGYKEVKKDLIIKLPKYSLFELENGRKRMLASAGELQKGNELALPSKYVNFLYLASHYEKLKGSPEDNEQKQLFVEQHKHYLDEIIEQISEFSKRVILADANLDKVLSAYNKHRDKPIREQAENIIHLFTLTNLGAPAAFKYFDTTIDRKRYTSTKEVLDATLIHQSITGLYETRIDLSQLGGDGGEAAAKGGGPAPGGTLNIEDEYRLHETSKEPDVPLGSTWLSDFPQAWAETGGMGLAVRQAPLIIPLKATSTPVSIKQYPMSQEARLGIKPHIQRLLDQGILVPCQSPWNTPLLPVKKPGTNDYRPVQDLREVNKRVEDIHPTVPNPYNLLSGLPPSHQWYTVLDLKDAFFCLRLHPTSQPLFAFEWRDPEMGISGQLTWTRLPQGFKNSPTLFNEALHRDLADFRIQHPDLILLQYVDDLLLAATSEQDCQRGTRALLQTLGNLGYRASAKKAQICQKQVKYLGYLLKEGQRWLTEARKETVMGQPTPKTPRQLREFLGKAGFCRLFIPGFAEMAAPLYPLTKPGTLFNWGPDQQKAYQEIKQALLTAPALGLPDLTKPFELFVDEKQGYAKGVLTQKLGPWRRPVAYLSKKLDPVAAGWPPCLRMVAAIAVLTKDAGKLTMGQPLVILAPHAVEALVKQPPDRWLSNARMTHYQAMLLDTDRVQFGPVVALNPATLLPLPEKEAPHDCLEILAETHGTRPDLTDQPIPDADYTWYTDGSSFLQEGQRRAGAAVTTETEVIWARALPAGTSAQRAELIALTQALKMAEGKKLNVYTDSRYAFATAHVHGEIYRRRGWLTSEGREIKNKNEILALLKALFLPKRLSIIHCPGHQKGNSAEARGNRMADQAAREAAMKAVLETSTLLAGKRTADGSEFEKRTADGSEFESPKKKAKVE

SEQ ID NO: 1059 - protein, 2096 aa, synthetic construct
MPAAKRVKLDGGDKKYSIGLDIGTNSVGWAVITDEYKVPSKKFKVLGNTDRHSIKKNLIGALLFDSGETAEATRLKRTARRRYTRRKNRICYLQEIFSNEMAKVDDSFFHRLEESFLVEEDKKHERHPIFGNIVDEVAYHEKYPTIYHLRKKLVDSTDKADLRLIYLALAHMIKFRGHFLIEGDLNPDNSDVDKLFIQLVQTYNQLFEENPINASGVDAKAILSARLSKSRRLENLIAQLPGEKKNGLFGNLIALSLGLTPNFKSNFDLAEDAKLQLSKDTYDDDLDNLLAQIGDQYADLFLAAKNLSDAILLSDILRVNTEITKAPLSASMIKRYDEHHQDLTLLKALVRQQLPEKYKEIFFDQSKNGYAGYIDGGASQEEFYKFIKPILEKMDGTEELLVKLNREDLLRKQRTFDNGSIPHQIHLGELHAILRRQEDFYPFLKDNREKIEKILTFRIPYYVGPLARGNSRFAWMTRKSEETITPWNFEEVVDKGASAQSFIERMTNFDKNLPNEKVLPKHSLLYEYFTVYNELTKVKYVTEGMRKPAFLSGEQKKAIVDLLFKTNRKVTVKQLKEDYFKKIECFDSVEISGVEDRFNASLGTYHDLLKIIKDKDFLDNEENEDILEDIVLTLTLFEDREMIEERLKTYAHLFDDKVMKQLKRRRYTGWGRLSRKLINGIRDKQSGKTILDFLKSDGFANRNFMQLIHDDSLTFKEDIQKAQVSGQGDSLHEHIANLAGSPAIKKGILQTVKVVDELVKVMGRHKPENIVIEMARENQTTQKGQKNSRERMKRIEEGIKELGSQILKEHPVENTQLQNEKLYLYYLQNGRDMYVDQELDINRLSDYDVDHIVPQSFLKDDSIDNKVLTRSDKARGKSDNVPSEEVVKKMKNYWRQLLNAKLITQRKFDNLTKAERGGLSELDKAGFIKRQLVETRQITKHVAQILDSRMNTKYDENDKLIREVKVITLKSKLVSDFRKDFQFYKVREINNYHHAHDAYLNAVVGTALIKKYPKLESEFVYGDYKVYDVRKMIAKSEQEIGKATAKYFFYSNIMNFFKTEITLANGEIRKRPLIETNGETGEIVWDKGRDFATVRKVLSMPQVNIVKKTEVQTGGFSKESILPKRNSDKLIARKKDWDPKKYGGFDSPTVAYSVLVVAKVEKGKSKKLKSVKELLGITIMERSSFEKNPIDFLEAKGYKEVKKDLIIKLPKYSLFELENGRKRMLASAGELQKGNELALPSKYVNFLYLASHYEKLKGSPEDNEQKQLFVEQHKHYLDEIIEQISEFSKRVILADANLDKVLSAYNKHRDKPIREQAENIIHLFTLTNLGAPAAFKYFDTTIDRKRYTSTKEVLDATLIHQSITGLYETRIDLSQLGGDGGGGSGSSEAAAKGGTLNIEDEYRLHETSKEPDVPLGSTWLSDFPQAWAETGGMGLAVRQAPLIIPLKATSTPVSIKQYPMSQEARLGIKPHIQRLLDQGILVPCQSPWNTPLLPVKKPGTNDYRPVQDLREVNKRVEDIHPTVPNPYNLLSGLPPSHQWYTVLDLKDAFFCLRLHPTSQPLFAFEWRDPEMGISGQLTWTRLPQGFKNSPTLFNEALHRDLADFRIQHPDLILLQYVDDLLLAATSEQDCQRGTRALLQTLGNLGYRASAKKAQICQKQVKYLGYLLKEGQRWLTEARKETVMGQPTPKTPRQLREFLGKAGFCRLFIPGFAEMAAPLYPLTKPGTLFNWGPDQQKAYQEIKQALLTAPALGLPDLTKPFELFVDEKQGYAKGVLTQKLGPWRRPVAYLSKKLDPVAAGWPPCLRMVAAIAVLTKDAGKLTMGQPLVILAPHAVEALVKQPPDRWLSNARMTHYQAMLLDTDRVQFGPVVALNPATLLPLPEKEAPHDCLEILAETHGTRPDLTDQPIPDADYTWYTDGSSFLQEGQRRAGAAVTTETEVIWARALPAGTSAQRAELIALTQALKMAEGKKLNVYTDSRYAFATAHVHGEIYRRRGWLTSEGREIKNKNEILALLKALFLPKRLSIIHCPGHQKGNSAEARGNRMADQAAREAAMKAVLETSTLLAGKRTADGSEFEKRTADGSEFESPKKKAKVE

SEQ ID NO: 1060 - protein, 2096 aa, synthetic construct
MPAAKRVKLDGGDKKYSIGLDIGTNSVGWAVITDEYKVPSKKFKVLGNTDRHSIKKNLIGALLFDSGETAEATRLKRTARRRYTRRKNRICYLQEIFSNEMAKVDDSFFHRLEESFLVEEDKKHERHPIFGNIVDEVAYHEKYPTIYHLRKKLVDSTDKADLRLIYLALAHMIKFRGHFLIEGDLNPDNSDVDKLFIQLVQTYNQLFEENPINASGVDAKAILSARLSKSRRLENLIAQLPGEKKNGLFGNLIALSLGLTPNFKSNFDLAEDAKLQLSKDTYDDDLDNLLAQIGDQYADLFLAAKNLSDAILLSDILRVNTEITKAPLSASMIKRYDEHHQDLTLLKALVRQQLPEKYKEIFFDQSKNGYAGYIDGGASQEEFYKFIKPILEKMDGTEELLVKLNREDLLRKQRTFDNGSIPHQIHLGELHAILRRQEDFYPFLKDNREKIEKILTFRIPYYVGPLARGNSRFAWMTRKSEETITPWNFEEVVDKGASAQSFIERMTNFDKNLPNEKVLPKHSLLYEYFTVYNELTKVKYVTEGMRKPAFLSGEQKKAIVDLLFKTNRKVTVKQLKEDYFKKIECFDSVEISGVEDRFNASLGTYHDLLKIIKDKDFLDNEENEDILEDIVLTLTLFEDREMIEERLKTYAHLFDDKVMKQLKRRRYTGWGRLSRKLINGIRDKQSGKTILDFLKSDGFANRNFMQLIHDDSLTFKEDIQKAQVSGQGDSLHEHIANLAGSPAIKKGILQTVKVVDELVKVMGRHKPENIVIEMARENQTTQKGQKNSRERMKRIEEGIKELGSQILKEHPVENTQLQNEKLYLYYLQNGRDMYVDQELDINRLSDYDVDHIVPQSFLKDDSIDNKVLTRSDKARGKSDNVPSEEVVKKMKNYWRQLLNAKLITQRKFDNLTKAERGGLSELDKAGFIKRQLVETRQITKHVAQILDSRMNTKYDENDKLIREVKVITLKSKLVSDFRKDFQFYKVREINNYHHAHDAYLNAVVGTALIKKYPKLESEFVYGDYKVYDVRKMIAKSEQEIGKATAKYFFYSNIMNFFKTEITLANGEIRKRPLIETNGETGEIVWDKGRDFATVRKVLSMPQVNIVKKTEVQTGGFSKESILPKRNSDKLIARKKDWDPKKYGGFDSPTVAYSVLVVAKVEKGKSKKLKSVKELLGITIMERSSFEKNPIDFLEAKGYKEVKKDLIIKLPKYSLFELENGRKRMLASAGELQKGNELALPSKYVNFLYLASHYEKLKGSPEDNEQKQLFVEQHKHYLDEIIEQISEFSKRVILADANLDKVLSAYNKHRDKPIREQAENIIHLFTLTNLGAPAAFKYFDTTIDRKRYTSTKEVLDATLIHQSITGLYETRIDLSQLGGDGGGSSGGSEAAAKGGTLNIEDEYRLHETSKEPDVPLGSTWLSDFPQAWAETGGMGLAVRQAPLIIPLKATSTPVSIKQYPMSQEARLGIKPHIQRLLDQGILVPCQSPWNTPLLPVKKPGTNDYRPVQDLREVNKRVEDIHPTVPNPYNLLSGLPPSHQWYTVLDLKDAFFCLRLHPTSQPLFAFEWRDPEMGISGQLTWTRLPQGFKNSPTLFNEALHRDLADFRIQHPDLILLQYVDDLLLAATSEQDCQRGTRALLQTLGNLGYRASAKKAQICQKQVKYLGYLLKEGQRWLTEARKETVMGQPTPKTPRQLREFLGKAGFCRLFIPGFAEMAAPLYPLTKPGTLFNWGPDQQKAYQEIKQALLTAPALGLPDLTKPFELFVDEKQGYAKGVLTQKLGPWRRPVAYLSKKLDPVAAGWPPCLRMVAAIAVLTKDAGKLTMGQPLVILAPHAVEALVKQPPDRWLSNARMTHYQAMLLDTDRVQFGPVVALNPATLLPLPEKEAPHDCLEILAETHGTRPDLTDQPIPDADYTWYTDGSSFLQEGQRRAGAAVTTETEVIWARALPAGTSAQRAELIALTQALKMAEGKKLNVYTDSRYAFATAHVHGEIYRRRGWLTSEGREIKNKNEILALLKALFLPKRLSIIHCPGHQKGNSAEARGNRMADQAAREAAMKAVLETSTLLAGKRTADGSEFEKRTADGSEFESPKKKAKVE

SEQ ID NO: 1061 - protein, 2094 aa, synthetic construct
MPAAKRVKLDGGDKKYSIGLDIGTNSVGWAVITDEYKVPSKKFKVLGNTDRHSIKKNLIGALLFDSGETAEATRLKRTARRRYTRRKNRICYLQEIFSNEMAKVDDSFFHRLEESFLVEEDKKHERHPIFGNIVDEVAYHEKYPTIYHLRKKLVDSTDKADLRLIYLALAHMIKFRGHFLIEGDLNPDNSDVDKLFIQLVQTYNQLFEENPINASGVDAKAILSARLSKSRRLENLIAQLPGEKKNGLFGNLIALSLGLTPNFKSNFDLAEDAKLQLSKDTYDDDLDNLLAQIGDQYADLFLAAKNLSDAILLSDILRVNTEITKAPLSASMIKRYDEHHQDLTLLKALVRQQLPEKYKEIFFDQSKNGYAGYIDGGASQEEFYKFIKPILEKMDGTEELLVKLNREDLLRKQRTFDNGSIPHQIHLGELHAILRRQEDFYPFLKDNREKIEKILTFRIPYYVGPLARGNSRFAWMTRKSEETITPWNFEEVVDKGASAQSFIERMTNFDKNLPNEKVLPKHSLLYEYFTVYNELTKVKYVTEGMRKPAFLSGEQKKAIVDLLFKTNRKVTVKQLKEDYFKKIECFDSVEISGVEDRFNASLGTYHDLLKIIKDKDFLDNEENEDILEDIVLTLTLFEDREMIEERLKTYAHLFDDKVMKQLKRRRYTGWGRLSRKLINGIRDKQSGKTILDFLKSDGFANRNFMQLIHDDSLTFKEDIQKAQVSGQGDSLHEHIANLAGSPAIKKGILQTVKVVDELVKVMGRHKPENIVIEMARENQTTQKGQKNSRERMKRIEEGIKELGSQILKEHPVENTQLQNEKLYLYYLQNGRDMYVDQELDINRLSDYDVDHIVPQSFLKDDSIDNKVLTRSDKARGKSDNVPSEEVVKKMKNYWRQLLNAKLITQRKFDNLTKAERGGLSELDKAGFIKRQLVETRQITKHVAQILDSRMNTKYDENDKLIREVKVITLKSKLVSDFRKDFQFYKVREINNYHHAHDAYLNAVVGTALIKKYPKLESEFVYGDYKVYDVRKMIAKSEQEIGKATAKYFFYSNIMNFFKTEITLANGEIRKRPLIETNGETGEIVWDKGRDFATVRKVLSMPQVNIVKKTEVQTGGFSKESILPKRNSDKLIARKKDWDPKKYGGFDSPTVAYSVLVVAKVEKGKSKKLKSVKELLGITIMERSSFEKNPIDFLEAKGYKEVKKDLIIKLPKYSLFELENGRKRMLASAGELQKGNELALPSKYVNFLYLASHYEKLKGSPEDNEQKQLFVEQHKHYLDEIIEQISEFSKRVILADANLDKVLSAYNKHRDKPIREQAENIIHLFTLTNLGAPAAFKYFDTTIDRKRYTSTKEVLDATLIHQSITGLYETRIDLSQLGGDGGGSSGGSPAPGGTLNIEDEYRLHETSKEPDVPLGSTWLSDFPQAWAETGGMGLAVRQAPLIIPLKATSTPVSIKQYPMSQEARLGIKPHIQRLLDQGILVPCQSPWNTPLLPVKKPGTNDYRPVQDLREVNKRVEDIHPTVPNPYNLLSGLPPSHQWYTVLDLKDAFFCLRLHPTSQPLFAFEWRDPEMGISGQLTWTRLPQGFKNSPTLFNEALHRDLADFRIQHPDLILLQYVDDLLLAATSEQDCQRGTRALLQTLGNLGYRASAKKAQICQKQVKYLGYLLKEGQRWLTEARKETVMGQPTPKTPRQLREFLGKAGFCRLFIPGFAEMAAPLYPLTKPGTLFNWGPDQQKAYQEIKQALLTAPALGLPDLTKPFELFVDEKQGYAKGVLTQKLGPWRRPVAYLSKKLDPVAAGWPPCLRMVAAIAVLTKDAGKLTMGQPLVILAPHAVEALVKQPPDRWLSNARMTHYQAMLLDTDRVQFGPVVALNPATLLPLPEKEAPHDCLEILAETHGTRPDLTDQPIPDADYTWYTDGSSFLQEGQRRAGAAVTTETEVIWARALPAGTSAQRAELIALTQALKMAEGKKLNVYTDSRYAFATAHVHGEIYRRRGWLTSEGREIKNKNEILALLKALFLPKRLSIIHCPGHQKGNSAEARGNRMADQAAREAAMKAVLETSTLLAGKRTADGSEFEKRTADGSEFESPKKKAKVE

SEQ ID NO: 1062 - protein, 2091 aa, synthetic construct
MPAAKRVKLDGGDKKYSIGLDIGTNSVGWAVITDEYKVPSKKFKVLGNTDRHSIKKNLIGALLFDSGETAEATRLKRTARRRYTRRKNRICYLQEIFSNEMAKVDDSFFHRLEESFLVEEDKKHERHPIFGNIVDEVAYHEKYPTIYHLRKKLVDSTDKADLRLIYLALAHMIKFRGHFLIEGDLNPDNSDVDKLFIQLVQTYNQLFEENPINASGVDAKAILSARLSKSRRLENLIAQLPGEKKNGLFGNLIALSLGLTPNFKSNFDLAEDAKLQLSKDTYDDDLDNLLAQIGDQYADLFLAAKNLSDAILLSDILRVNTEITKAPLSASMIKRYDEHHQDLTLLKALVRQQLPEKYKEIFFDQSKNGYAGYIDGGASQEEFYKFIKPILEKMDGTEELLVKLNREDLLRKQRTFDNGSIPHQIHLGELHAILRRQEDFYPFLKDNREKIEKILTFRIPYYVGPLARGNSRFAWMTRKSEETITPWNFEEVVDKGASAQSFIERMTNFDKNLPNEKVLPKHSLLYEYFTVYNELTKVKYVTEGMRKPAFLSGEQKKAIVDLLFKTNRKVTVKQLKEDYFKKIECFDSVEISGVEDRFNASLGTYHDLLKIIKDKDFLDNEENEDILEDIVLTLTLFEDREMIEERLKTYAHLFDDKVMKQLKRRRYTGWGRLSRKLINGIRDKQSGKTILDFLKSDGFANRNFMQLIHDDSLTFKEDIQKAQVSGQGDSLHEHIANLAGSPAIKKGILQTVKVVDELVKVMGRHKPENIVIEMARENQTTQKGQKNSRERMKRIEEGIKELGSQILKEHPVENTQLQNEKLYLYYLQNGRDMYVDQELDINRLSDYDVDHIVPQSFLKDDSIDNKVLTRSDKARGKSDNVPSEEVVKKMKNYWRQLLNAKLITQRKFDNLTKAERGGLSELDKAGFIKRQLVETRQITKHVAQILDSRMNTKYDENDKLIREVKVITLKSKLVSDFRKDFQFYKVREINNYHHAHDAYLNAVVGTALIKKYPKLESEFVYGDYKVYDVRKMIAKSEQEIGKATAKYFFYSNIMNFFKTEITLANGEIRKRPLIETNGETGEIVWDKGRDFATVRKVLSMPQVNIVKKTEVQTGGFSKESILPKRNSDKLIARKKDWDPKKYGGFDSPTVAYSVLVVAKVEKGKSKKLKSVKELLGITIMERSSFEKNPIDFLEAKGYKEVKKDLIIKLPKYSLFELENGRKRMLASAGELQKGNELALPSKYVNFLYLASHYEKLKGSPEDNEQKQLFVEQHKHYLDEIIEQISEFSKRVILADANLDKVLSAYNKHRDKPIREQAENIIHLFTLTNLGAPAAFKYFDTTIDRKRYTSTKEVLDATLIHQSITGLYETRIDLSQLGGDGGGSSGGSGGTLNIEDEYRLHETSKEPDVPLGSTWLSDFPQAWAETGGMGLAVRQAPLIIPLKATSTPVSIKQYPMSQEARLGIKPHIQRLLDQGILVPCQSPWNTPLLPVKKPGTNDYRPVQDLREVNKRVEDIHPTVPNPYNLLSGLPPSHQWYTVLDLKDAFFCLRLHPTSQPLFAFEWRDPEMGISGQLTWTRLPQGFKNSPTLFNEALHRDLADFRIQHPDLILLQYVDDLLLAATSEQDCQRGTRALLQTLGNLGYRASAKKAQICQKQVKYLGYLLKEGQRWLTEARKETVMGQPTPKTPRQLREFLGKAGFCRLFIPGFAEMAAPLYPLTKPGTLFNWGPDQQKAYQEIKQALLTAPALGLPDLTKPFELFVDEKQGYAKGVLTQKLGPWRRPVAYLSKKLDPVAAGWPPCLRMVAAIAVLTKDAGKLTMGQPLVILAPHAVEALVKQPPDRWLSNARMTHYQAMLLDTDRVQFGPVVALNPATLLPLPEKEAPHDCLEILAETHGTRPDLTDQPIPDADYTWYTDGSSFLQEGQRRAGAAVTTETEVIWARALPAGTSAQRAELIALTQALKMAEGKKLNVYTDSRYAFATAHVHGEIYRRRGWLTSEGREIKNKNEILALLKALFLPKRLSIIHCPGHQKGNSAEARGNRMADQAAREAAMKAVLETSTLLAGKRTADGSEFEKRTADGSEFESPKKKAKVE

SEQ ID NO: 1063 - protein, 2094 aa, synthetic construct
MPAAKRVKLDGGDKKYSIGLDIGTNSVGWAVITDEYKVPSKKFKVLGNTDRHSIKKNLIGALLFDSGETAEATRLKRTARRRYTRRKNRICYLQEIFSNEMAKVDDSFFHRLEESFLVEEDKKHERHPIFGNIVDEVAYHEKYPTIYHLRKKLVDSTDKADLRLIYLALAHMIKFRGHFLIEGDLNPDNSDVDKLFIQLVQTYNQLFEENPINASGVDAKAILSARLSKSRRLENLIAQLPGEKKNGLFGNLIALSLGLTPNFKSNFDLAEDAKLQLSKDTYDDDLDNLLAQIGDQYADLFLAAKNLSDAILLSDILRVNTEITKAPLSASMIKRYDEHHQDLTLLKALVRQQLPEKYKEIFFDQSKNGYAGYIDGGASQEEFYKFIKPILEKMDGTEELLVKLNREDLLRKQRTFDNGSIPHQIHLGELHAILRRQEDFYPFLKDNREKIEKILTFRIPYYVGPLARGNSRFAWMTRKSEETITPWNFEEVVDKGASAQSFIERMTNFDKNLPNEKVLPKHSLLYEYFTVYNELTKVKYVTEGMRKPAFLSGEQKKAIVDLLFKTNRKVTVKQLKEDYFKKIECFDSVEISGVEDRFNASLGTYHDLLKIIKDKDFLDNEENEDILEDIVLTLTLFEDREMIEERLKTYAHLFDDKVMKQLKRRRYTGWGRLSRKLINGIRDKQSGKTILDFLKSDGFANRNFMQLIHDDSLTFKEDIQKAQVSGQGDSLHEHIANLAGSPAIKKGILQTVKVVDELVKVMGRHKPENIVIEMARENQTTQKGQKNSRERMKRIEEGIKELGSQILKEHPVENTQLQNEKLYLYYLQNGRDMYVDQELDINRLSDYDVDHIVPQSFLKDDSIDNKVLTRSDKARGKSDNVPSEEVVKKMKNYWRQLLNAKLITQRKFDNLTKAERGGLSELDKAGFIKRQLVETRQITKHVAQILDSRMNTKYDENDKLIREVKVITLKSKLVSDFRKDFQFYKVREINNYHHAHDAYLNAVVGTALIKKYPKLESEFVYGDYKVYDVRKMIAKSEQEIGKATAKYFFYSNIMNFFKTEITLANGEIRKRPLIETNGETGEIVWDKGRDFATVRKVLSMPQVNIVKKTEVQTGGFSKESILPKRNSDKLIARKKDWDPKKYGGFDSPTVAYSVLVVAKVEKGKSKKLKSVKELLGITIMERSSFEKNPIDFLEAKGYKEVKKDLIIKLPKYSLFELENGRKRMLASAGELQKGNELALPSKYVNFLYLASHYEKLKGSPEDNEQKQLFVEQHKHYLDEIIEQISEFSKRVILADANLDKVLSAYNKHRDKPIREQAENIIHLFTLTNLGAPAAFKYFDTTIDRKRYTSTKEVLDATLIHQSITGLYETRIDLSQLGGDGGGGSGSSPAPGGTLNIEDEYRLHETSKEPDVPLGSTWLSDFPQAWAETGGMGLAVRQAPLIIPLKATSTPVSIKQYPMSQEARLGIKPHIQRLLDQGILVPCQSPWNTPLLPVKKPGTNDYRPVQDLREVNKRVEDIHPTVPNPYNLLSGLPPSHQWYTVLDLKDAFFCLRLHPTSQPLFAFEWRDPEMGISGQLTWTRLPQGFKNSPTLFNEALHRDLADFRIQHPDLILLQYVDDLLLAATSEQDCQRGTRALLQTLGNLGYRASAKKAQICQKQVKYLGYLLKEGQRWLTEARKETVMGQPTPKTPRQLREFLGKAGFCRLFIPGFAEMAAPLYPLTKPGTLFNWGPDQQKAYQEIKQALLTAPALGLPDLTKPFELFVDEKQGYAKGVLTQKLGPWRRPVAYLSKKLDPVAAGWPPCLRMVAAIAVLTKDAGKLTMGQPLVILAPHAVEALVKQPPDRWLSNARMTHYQAMLLDTDRVQFGPVVALNPATLLPLPEKEAPHDCLEILAETHGTRPDLTDQPIPDADYTWYTDGSSFLQEGQRRAGAAVTTETEVIWARALPAGTSAQRAELIALTQALKMAEGKKLNVYTDSRYAFATAHVHGEIYRRRGWLTSEGREIKNKNEILALLKALFLPKRLSIIHCPGHQKGNSAEARGNRMADQAAREAAMKAVLETSTLLAGKRTADGSEFEKRTADGSEFESPKKKAKVE

SEQ ID NO: 1064 - protein, 2096 aa, synthetic construct
MPAAKRVKLDGGDKKYSIGLDIGTNSVGWAVITDEYKVPSKKFKVLGNTDRHSIKKNLIGALLFDSGETAEATRLKRTARRRYTRRKNRICYLQEIFSNEMAKVDDSFFHRLEESFLVEEDKKHERHPIFGNIVDEVAYHEKYPTIYHLRKKLVDSTDKADLRLIYLALAHMIKFRGHFLIEGDLNPDNSDVDKLFIQLVQTYNQLFEENPINASGVDAKAILSARLSKSRRLENLIAQLPGEKKNGLFGNLIALSLGLTPNFKSNFDLAEDAKLQLSKDTYDDDLDNLLAQIGDQYADLFLAAKNLSDAILLSDILRVNTEITKAPLSASMIKRYDEHHQDLTLLKALVRQQLPEKYKEIFFDQSKNGYAGYIDGGASQEEFYKFIKPILEKMDGTEELLVKLNREDLLRKQRTFDNGSIPHQIHLGELHAILRRQEDFYPFLKDNREKIEKILTFRIPYYVGPLARGNSRFAWMTRKSEETITPWNFEEVVDKGASAQSFIERMTNFDKNLPNEKVLPKHSLLYEYFTVYNELTKVKYVTEGMRKPAFLSGEQKKAIVDLLFKTNRKVTVKQLKEDYFKKIECFDSVEISGVEDRFNASLGTYHDLLKIIKDKDFLDNEENEDILEDIVLTLTLFEDREMIEERLKTYAHLFDDKVMKQLKRRRYTGWGRLSRKLINGIRDKQSGKTILDFLKSDGFANRNFMQLIHDDSLTFKEDIQKAQVSGQGDSLHEHIANLAGSPAIKKGILQTVKVVDELVKVMGRHKPENIVIEMARENQTTQKGQKNSRERMKRIEEGIKELGSQILKEHPVENTQLQNEKLYLYYLQNGRDMYVDQELDINRLSDYDVDHIVPQSFLKDDSIDNKVLTRSDKARGKSDNVPSEEVVKKMKNYWRQLLNAKLITQRKFDNLTKAERGGLSELDKAGFIKRQLVETRQITKHVAQILDSRMNTKYDENDKLIREVKVITLKSKLVSDFRKDFQFYKVREINNYHHAHDAYLNAVVGTALIKKYPKLESEFVYGDYKVYDVRKMIAKSEQEIGKATAKYFFYSNIMNFFKTEITLANGEIRKRPLIETNGETGEIVWDKGRDFATVRKVLSMPQVNIVKKTEVQTGGFSKESILPKRNSDKLIARKKDWDPKKYGGFDSPTVAYSVLVVAKVEKGKSKKLKSVKELLGITIMERSSFEKNPIDFLEAKGYKEVKKDLIIKLPKYSLFELENGRKRMLASAGELQKGNELALPSKYVNFLYLASHYEKLKGSPEDNEQKQLFVEQHKHYLDEIIEQISEFSKRVILADANLDKVLSAYNKHRDKPIREQAENIIHLFTLTNLGAPAAFKYFDTTIDRKRYTSTKEVLDATLIHQSITGLYETRIDLSQLGGDGGEAAAKPAPGSSGGTLNIEDEYRLHETSKEPDVPLGSTWLSDFPQAWAETGGMGLAVRQAPLIIPLKATSTPVSIKQYPMSQEARLGIKPHIQRLLDQGILVPCQSPWNTPLLPVKKPGTNDYRPVQDLREVNKRVEDIHPTVPNPYNLLSGLPPSHQWYTVLDLKDAFFCLRLHPTSQPLFAFEWRDPEMGISGQLTWTRLPQGFKNSPTLFNEALHRDLADFRIQHPDLILLQYVDDLLLAATSEQDCQRGTRALLQTLGNLGYRASAKKAQICQKQVKYLGYLLKEGQRWLTEARKETVMGQPTPKTPRQLREFLGKAGFCRLFIPGFAEMAAPLYPLTKPGTLFNWGPDQQKAYQEIKQALLTAPALGLPDLTKPFELFVDEKQGYAKGVLTQKLGPWRRPVAYLSKKLDPVAAGWPPCLRMVAAIAVLTKDAGKLTMGQPLVILAPHAVEALVKQPPDRWLSNARMTHYQAMLLDTDRVQFGPVVALNPATLLPLPEKEAPHDCLEILAETHGTRPDLTDQPIPDADYTWYTDGSSFLQEGQRRAGAAVTTETEVIWARALPAGTSAQRAELIALTQALKMAEGKKLNVYTDSRYAFATAHVHGEIYRRRGWLTSEGREIKNKNEILALLKALFLPKRLSIIHCPGHQKGNSAEARGNRMADQAAREAAMKAVLETSTLLAGKRTADGSEFEKRTADGSEFESPKKKAKVE

SEQ ID NO: 1065 - protein, 2094 aa, synthetic construct
MPAAKRVKLDGGDKKYSIGLDIGTNSVGWAVITDEYKVPSKKFKVLGNTDRHSIKKNLIGALLFDSGETAEATRLKRTARRRYTRRKNRICYLQEIFSNEMAKVDDSFFHRLEESFLVEEDKKHERHPIFGNIVDEVAYHEKYPTIYHLRKKLVDSTDKADLRLIYLALAHMIKFRGHFLIEGDLNPDNSDVDKLFIQLVQTYNQLFEENPINASGVDAKAILSARLSKSRRLENLIAQLPGEKKNGLFGNLIALSLGLTPNFKSNFDLAEDAKLQLSKDTYDDDLDNLLAQIGDQYADLFLAAKNLSDAILLSDILRVNTEITKAPLSASMIKRYDEHHQDLTLLKALVRQQLPEKYKEIFFDQSKNGYAGYIDGGASQEEFYKFIKPILEKMDGTEELLVKLNREDLLRKQRTFDNGSIPHQIHLGELHAILRRQEDFYPFLKDNREKIEKILTFRIPYYVGPLARGNSRFAWMTRKSEETITPWNFEEVVDKGASAQSFIERMTNFDKNLPNEKVLPKHSLLYEYFTVYNELTKVKYVTEGMRKPAFLSGEQKKAIVDLLFKTNRKVTVKQLKEDYFKKIECFDSVEISGVEDRFNASLGTYHDLLKIIKDKDFLDNEENEDILEDIVLTLTLFEDREMIEERLKTYAHLFDDKVMKQLKRRRYTGWGRLSRKLINGIRDKQSGKTILDFLKSDGFANRNFMQLIHDDSLTFKEDIQKAQVSGQGDSLHEHIANLAGSPAIKKGILQTVKVVDELVKVMGRHKPENIVIEMARENQTTQKGQKNSRERMKRIEEGIKELGSQILKEHPVENTQLQNEKLYLYYLQNGRDMYVDQELDINRLSDYDVDHIVPQSFLKDDSIDNKVLTRSDKARGKSDNVPSEEVVKKMKNYWRQLLNAKLITQRKFDNLTKAERGGLSELDKAGFIKRQLVETRQITKHVAQILDSRMNTKYDENDKLIREVKVITLKSKLVSDFRKDFQFYKVREINNYHHAHDAYLNAVVGTALIKKYPKLESEFVYGDYKVYDVRKMIAKSEQEIGKATAKYFFYSNIMNFFKTEITLANGEIRKRPLIETNGETGEIVWDKGRDFATVRKVLSMPQVNIVKKTEVQTGGFSKESILPKRNSDKLIARKKDWDPKKYGGFDSPTVAYSVLVVAKVEKGKSKKLKSVKELLGITIMERSSFEKNPIDFLEAKGYKEVKKDLIIKLPKYSLFELENGRKRMLASAGELQKGNELALPSKYVNFLYLASHYEKLKGSPEDNEQKQLFVEQHKHYLDEIIEQISEFSKRVILADANLDKVLSAYNKHRDKPIREQAENIIHLFTLTNLGAPAAFKYFDTTIDRKRYTSTKEVLDATLIHQSITGLYETRIDLSQLGGDGGGGSGGSGGSGGTLNIEDEYRLHETSKEPDVPLGSTWLSDFPQAWAETGGMGLAVRQAPLIIPLKATSTPVSIKQYPMSQEARLGIKPHIQRLLDQGILVPCQSPWNTPLLPVKKPGTNDYRPVQDLREVNKRVEDIHPTVPNPYNLLSGLPPSHQWYTVLDLKDAFFCLRLHPTSQPLFAFEWRDPEMGISGQLTWTRLPQGFKNSPTLFNEALHRDLADFRIQHPDLILLQYVDDLLLAATSEQDCQRGTRALLQTLGNLGYRASAKKAQICQKQVKYLGYLLKEGQRWLTEARKETVMGQPTPKTPRQLREFLGKAGFCRLFIPGFAEMAAPLYPLTKPGTLFNWGPDQQKAYQEIKQALLTAPALGLPDLTKPFELFVDEKQGYAKGVLTQKLGPWRRPVAYLSKKLDPVAAGWPPCLRMVAAIAVLTKDAGKLTMGQPLVILAPHAVEALVKQPPDRWLSNARMTHYQAMLLDTDRVQFGPVVALNPATLLPLPEKEAPHDCLEILAETHGTRPDLTDQPIPDADYTWYTDGSSFLQEGQRRAGAAVTTETEVIWARALPAGTSAQRAELIALTQALKMAEGKKLNVYTDSRYAFATAHVHGEIYRRRGWLTSEGREIKNKNEILALLKALFLPKRLSIIHCPGHQKGNSAEARGNRMADQAAREAAMKAVLETSTLLAGKRTADGSEFEKRTADGSEFESPKKKAKVE

SEQ ID NO: 1066 - protein, 2096 aa, synthetic construct
MPAAKRVKLDGGDKKYSIGLDIGTNSVGWAVITDEYKVPSKKFKVLGNTDRHSIKKNLIGALLFDSGETAEATRLKRTARRRYTRRKNRICYLQEIFSNEMAKVDDSFFHRLEESFLVEEDKKHERHPIFGNIVDEVAYHEKYPTIYHLRKKLVDSTDKADLRLIYLALAHMIKFRGHFLIEGDLNPDNSDVDKLFIQLVQTYNQLFEENPINASGVDAKAILSARLSKSRRLENLIAQLPGEKKNGLFGNLIALSLGLTPNFKSNFDLAEDAKLQLSKDTYDDDLDNLLAQIGDQYADLFLAAKNLSDAILLSDILRVNTEITKAPLSASMIKRYDEHHQDLTLLKALVRQQLPEKYKEIFFDQSKNGYAGYIDGGASQEEFYKFIKPILEKMDGTEELLVKLNREDLLRKQRTFDNGSIPHQIHLGELHAILRRQEDFYPFLKDNREKIEKILTFRIPYYVGPLARGNSRFAWMTRKSEETITPWNFEEVVDKGASAQSFIERMTNFDKNLPNEKVLPKHSLLYEYFTVYNELTKVKYVTEGMRKPAFLSGEQKKAIVDLLFKTNRKVTVKQLKEDYFKKIECFDSVEISGVEDRFNASLGTYHDLLKIIKDKDFLDNEENEDILEDIVLTLTLFEDREMIEERLKTYAHLFDDKVMKQLKRRRYTGWGRLSRKLINGIRDKQSGKTILDFLKSDGFANRNFMQLIHDDSLTFKEDIQKAQVSGQGDSLHEHIANLAGSPAIKKGILQTVKVVDELVKVMGRHKPENIVIEMARENQTTQKGQKNSRERMKRIEEGIKELGSQILKEHPVENTQLQNEKLYLYYLQNGRDMYVDQELDINRLSDYDVDHIVPQSFLKDDSIDNKVLTRSDKARGKSDNVPSEEVVKKMKNYWRQLLNAKLITQRKFDNLTKAERGGLSELDKAGFIKRQLVETRQITKHVAQILDSRMNTKYDENDKLIREVKVITLKSKLVSDFRKDFQFYKVREINNYHHAHDAYLNAVVGTALIKKYPKLESEFVYGDYKVYDVRKMIAKSEQEIGKATAKYFFYSNIMNFFKTEITLANGEIRKRPLIETNGETGEIVWDKGRDFATVRKVLSMPQVNIVKKTEVQTGGFSKESILPKRNSDKLIARKKDWDPKKYGGFDSPTVAYSVLVVAKVEKGKSKKLKSVKELLGITIMERSSFEKNPIDFLEAKGYKEVKKDLIIKLPKYSLFELENGRKRMLASAGELQKGNELALPSKYVNFLYLASHYEKLKGSPEDNEQKQLFVEQHKHYLDEIIEQISEFSKRVILADANLDKVLSAYNKHRDKPIREQAENIIHLFTLTNLGAPAAFKYFDTTIDRKRYTSTKEVLDATLIHQSITGLYETRIDLSQLGGDGGPAPEAAAKGGSGGTLNIEDEYRLHETSKEPDVPLGSTWLSDFPQAWAETGGMGLAVRQAPLIIPLKATSTPVSIKQYPMSQEARLGIKPHIQRLLDQGILVPCQSPWNTPLLPVKKPGTNDYRPVQDLREVNKRVEDIHPTVPNPYNLLSGLPPSHQWYTVLDLKDAFFCLRLHPTSQPLFAFEWRDPEMGISGQLTWTRLPQGFKNSPTLFNEALHRDLADFRIQHPDLILLQYVDDLLLAATSEQDCQRGTRALLQTLGNLGYRASAKKAQICQKQVKYLGYLLKEGQRWLTEARKETVMGQPTPKTPRQLREFLGKAGFCRLFIPGFAEMAAPLYPLTKPGTLFNWGPDQQKAYQEIKQALLTAPALGLPDLTKPFELFVDEKQGYAKGVLTQKLGPWRRPVAYLSKKLDPVAAGWPPCLRMVAAIAVLTKDAGKLTMGQPLVILAPHAVEALVKQPPDRWLSNARMTHYQAMLLDTDRVQFGPVVALNPATLLPLPEKEAPHDCLEILAETHGTRPDLTDQPIPDADYTWYTDGSSFLQEGQRRAGAAVTTETEVIWARALPAGTSAQRAELIALTQALKMAEGKKLNVYTDSRYAFATAHVHGEIYRRRGWLTSEGREIKNKNEILALLKALFLPKRLSIIHCPGHQKGNSAEARGNRMADQAAREAAMKAVLETSTLLAGKRTADGSEFEKRTADGSEFESPKKKAKVE

SEQ ID NO: 1067 - protein, 2103 aa, synthetic construct
MPAAKRVKLDGGDKKYSIGLDIGTNSVGWAVITDEYKVPSKKFKVLGNTDRHSIKKNLIGALLFDSGETAEATRLKRTARRRYTRRKNRICYLQEIFSNEMAKVDDSFFHRLEESFLVEEDKKHERHPIFGNIVDEVAYHEKYPTIYHLRKKLVDSTDKADLRLIYLALAHMIKFRGHFLIEGDLNPDNSDVDKLFIQLVQTYNQLFEENPINASGVDAKAILSARLSKSRRLENLIAQLPGEKKNGLFGNLIALSLGLTPNFKSNFDLAEDAKLQLSKDTYDDDLDNLLAQIGDQYADLFLAAKNLSDAILLSDILRVNTEITKAPLSASMIKRYDEHHQDLTLLKALVRQQLPEKYKEIFFDQSKNGYAGYIDGGASQEEFYKFIKPILEKMDGTEELLVKLNREDLLRKQRTFDNGSIPHQIHLGELHAILRRQEDFYPFLKDNREKIEKILTFRIPYYVGPLARGNSRFAWMTRKSEETITPWNFEEVVDKGASAQSFIERMTNFDKNLPNEKVLPKHSLLYEYFTVYNELTKVKYVTEGMRKPAFLSGEQKKAIVDLLFKTNRKVTVKQLKEDYFKKIECFDSVEISGVEDRFNASLGTYHDLLKIIKDKDFLDNEENEDILEDIVLTLTLFEDREMIEERLKTYAHLFDDKVMKQLKRRRYTGWGRLSRKLINGIRDKQSGKTILDFLKSDGFANRNFMQLIHDDSLTFKEDIQKAQVSGQGDSLHEHIANLAGSPAIKKGILQTVKVVDELVKVMGRHKPENIVIEMARENQTTQKGQKNSRERMKRIEEGIKELGSQILKEHPVENTQLQNEKLYLYYLQNGRDMYVDQELDINRLSDYDVDHIVPQSFLKDDSIDNKVLTRSDKARGKSDNVPSEEVVKKMKNYWRQLLNAKLITQRKFDNLTKAERGGLSELDKAGFIKRQLVETRQITKHVAQILDSRMNTKYDENDKLIREVKVITLKSKLVSDFRKDFQFYKVREINNYHHAHDAYLNAVVGTALIKKYPKLESEFVYGDYKVYDVRKMIAKSEQEIGKATAKYFFYSNIMNFFKTEITLANGEIRKRPLIETNGETGEIVWDKGRDFATVRKVLSMPQVNIVKKTEVQTGGFSKESILPKRNSDKLIARKKDWDPKKYGGFDSPTVAYSVLVVAKVEKGKSKKLKSVKELLGITIMERSSFEKNPIDFLEAKGYKEVKKDLIIKLPKYSLFELENGRKRMLASAGELQKGNELALPSKYVNFLYLASHYEKLKGSPEDNEQKQLFVEQHKHYLDEIIEQISEFSKRVILADANLDKVLSAYNKHRDKPIREQAENIIHLFTLTNLGAPAAFKYFDTTIDRKRYTSTKEVLDATLIHQSITGLYETRIDLSQLGGDGGGSSGSSGSSGSSGSSGSSGGTLNIEDEYRLHETSKEPDVPLGSTWLSDFPQAWAETGGMGLAVRQAPLIIPLKATSTPVSIKQYPMSQEARLGIKPHIQRLLDQGILVPCQSPWNTPLLPVKKPGTNDYRPVQDLREVNKRVEDIHPTVPNPYNLLSGLPPSHQWYTVLDLKDAFFCLRLHPTSQPLFAFEWRDPEMGISGQLTWTRLPQGFKNSPTLFNEALHRDLADFRIQHPDLILLQYVDDLLLAATSEQDCQRGTRALLQTLGNLGYRASAKKAQICQKQVKYLGYLLKEGQRWLTEARKETVMGQPTPKTPRQLREFLGKAGFCRLFIPGFAEMAAPLYPLTKPGTLFNWGPDQQKAYQEIKQALLTAPALGLPDLTKPFELFVDEKQGYAKGVLTQKLGPWRRPVAYLSKKLDPVAAGWPPCLRMVAAIAVLTKDAGKLTMGQPLVILAPHAVEALVKQPPDRWLSNARMTHYQAMLLDTDRVQFGPVVALNPATLLPLPEKEAPHDCLEILAETHGTRPDLTDQPIPDADYTWYTDGSSFLQEGQRRAGAAVTTETEVIWARALPAGTSAQRAELIALTQALKMAEGKKLNVYTDSRYAFATAHVHGEIYRRRGWLTSEGREIKNKNEILALLKALFLPKRLSIIHCPGHQKGNSAEARGNRMADQAAREAAMKAVLETSTLLAGKRTADGSEFEKRTADGSEFESPKKKAKVE

SEQ ID NO: 1068 - protein, 2096 aa, synthetic construct
MPAAKRVKLDGGDKKYSIGLDIGTNSVGWAVITDEYKVPSKKFKVLGNTDRHSIKKNLIGALLFDSGETAEATRLKRTARRRYTRRKNRICYLQEIFSNEMAKVDDSFFHRLEESFLVEEDKKHERHPIFGNIVDEVAYHEKYPTIYHLRKKLVDSTDKADLRLIYLALAHMIKFRGHFLIEGDLNPDNSDVDKLFIQLVQTYNQLFEENPINASGVDAKAILSARLSKSRRLENLIAQLPGEKKNGLFGNLIALSLGLTPNFKSNFDLAEDAKLQLSKDTYDDDLDNLLAQIGDQYADLFLAAKNLSDAILLSDILRVNTEITKAPLSASMIKRYDEHHQDLTLLKALVRQQLPEKYKEIFFDQSKNGYAGYIDGGASQEEFYKFIKPILEKMDGTEELLVKLNREDLLRKQRTFDNGSIPHQIHLGELHAILRRQEDFYPFLKDNREKIEKILTFRIPYYVGPLARGNSRFAWMTRKSEETITPWNFEEVVDKGASAQSFIERMTNFDKNLPNEKVLPKHSLLYEYFTVYNELTKVKYVTEGMRKPAFLSGEQKKAIVDLLFKTNRKVTVKQLKEDYFKKIECFDSVEISGVEDRFNASLGTYHDLLKIIKDKDFLDNEENEDILEDIVLTLTLFEDREMIEERLKTYAHLFDDKVMKQLKRRRYTGWGRLSRKLINGIRDKQSGKTILDFLKSDGFANRNFMQLIHDDSLTFKEDIQKAQVSGQGDSLHEHIANLAGSPAIKKGILQTVKVVDELVKVMGRHKPENIVIEMARENQTTQKGQKNSRERMKRIEEGIKELGSQILKEHPVENTQLQNEKLYLYYLQNGRDMYVDQELDINRLSDYDVDHIVPQSFLKDDSIDNKVLTRSDKARGKSDNVPSEEVVKKMKNYWRQLLNAKLITQRKFDNLTKAERGGLSELDKAGFIKRQLVETRQITKHVAQILDSRMNTKYDENDKLIREVKVITLKSKLVSDFRKDFQFYKVREINNYHHAHDAYLNAVVGTALIKKYPKLESEFVYGDYKVYDVRKMIAKSEQEIGKATAKYFFYSNIMNFFKTEITLANGEIRKRPLIETNGETGEIVWDKGRDFATVRKVLSMPQVNIVKKTEVQTGGFSKESILPKRNSDKLIARKKDWDPKKYGGFDSPTVAYSVLVVAKVEKGKSKKLKSVKELLGITIMERSSFEKNPIDFLEAKGYKEVKKDLIIKLPKYSLFELENGRKRMLASAGELQKGNELALPSKYVNFLYLASHYEKLKGSPEDNEQKQLFVEQHKHYLDEIIEQISEFSKRVILADANLDKVLSAYNKHRDKPIREQAENIIHLFTLTNLGAPAAFKYFDTTIDRKRYTSTKEVLDATLIHQSITGLYETRIDLSQLGGDGGEAAAKGSSGGSGGTLNIEDEYRLHETSKEPDVPLGSTWLSDFPQAWAETGGMGLAVRQAPLIIPLKATSTPVSIKQYPMSQEARLGIKPHIQRLLDQGILVPCQSPWNTPLLPVKKPGTNDYRPVQDLREVNKRVEDIHPTVPNPYNLLSGLPPSHQWYTVLDLKDAFFCLRLHPTSQPLFAFEWRDPEMGISGQLTWTRLPQGFKNSPTLFNEALHRDLADFRIQHPDLILLQYVDDLLLAATSEQDCQRGTRALLQTLGNLGYRASAKKAQICQKQVKYLGYLLKEGQRWLTEARKETVMGQPTPKTPRQLREFLGKAGFCRLFIPGFAEMAAPLYPLTKPGTLFNWGPDQQKAYQEIKQALLTAPALGLPDLTKPFELFVDEKQGYAKGVLTQKLGPWRRPVAYLSKKLDPVAAGWPPCLRMVAAIAVLTKDAGKLTMGQPLVILAPHAVEALVKQPPDRWLSNARMTHYQAMLLDTDRVQFGPVVALNPATLLPLPEKEAPHDCLEILAETHGTRPDLTDQPIPDADYTWYTDGSSFLQEGQRRAGAAVTTETEVIWARALPAGTSAQRAELIALTQALKMAEGKKLNVYTDSRYAFATAHVHGEIYRRRGWLTSEGREIKNKNEILALLKALFLPKRLSIIHCPGHQKGNSAEARGNRMADQAAREAAMKAVLETSTLLAGKRTADGSEFEKRTADGSEFESPKKKAKVE

SEQ ID NO: 1069 - protein, 2096 aa, synthetic construct
MPAAKRVKLDGGDKKYSIGLDIGTNSVGWAVITDEYKVPSKKFKVLGNTDRHSIKKNLIGALLFDSGETAEATRLKRTARRRYTRRKNRICYLQEIFSNEMAKVDDSFFHRLEESFLVEEDKKHERHPIFGNIVDEVAYHEKYPTIYHLRKKLVDSTDKADLRLIYLALAHMIKFRGHFLIEGDLNPDNSDVDKLFIQLVQTYNQLFEENPINASGVDAKAILSARLSKSRRLENLIAQLPGEKKNGLFGNLIALSLGLTPNFKSNFDLAEDAKLQLSKDTYDDDLDNLLAQIGDQYADLFLAAKNLSDAILLSDILRVNTEITKAPLSASMIKRYDEHHQDLTLLKALVRQQLPEKYKEIFFDQSKNGYAGYIDGGASQEEFYKFIKPILEKMDGTEELLVKLNREDLLRKQRTFDNGSIPHQIHLGELHAILRRQEDFYPFLKDNREKIEKILTFRIPYYVGPLARGNSRFAWMTRKSEETITPWNFEEVVDKGASAQSFIERMTNFDKNLPNEKVLPKHSLLYEYFTVYNELTKVKYVTEGMRKPAFLSGEQKKAIVDLLFKTNRKVTVKQLKEDYFKKIECFDSVEISGVEDRFNASLGTYHDLLKIIKDKDFLDNEENEDILEDIVLTLTLFEDREMIEERLKTYAHLFDDKVMKQLKRRRYTGWGRLSRKLINGIRDKQSGKTILDFLKSDGFANRNFMQLIHDDSLTFKEDIQKAQVSGQGDSLHEHIANLAGSPAIKKGILQTVKVVDELVKVMGRHKPENIVIEMARENQTTQKGQKNSRERMKRIEEGIKELGSQILKEHPVENTQLQNEKLYLYYLQNGRDMYVDQELDINRLSDYDVDHIVPQSFLKDDSIDNKVLTRSDKARGKSDNVPSEEVVKKMKNYWRQLLNAKLITQRKFDNLTKAERGGLSELDKAGFIKRQLVETRQITKHVAQILDSRMNTKYDENDKLIREVKVITLKSKLVSDFRKDFQFYKVREINNYHHAHDAYLNAVVGTALIKKYPKLESEFVYGDYKVYDVRKMIAKSEQEIGKATAKYFFYSNIMNFFKTEITLANGEIRKRPLIETNGETGEIVWDKGRDFATVRKVLSMPQVNIVKKTEVQTGGFSKESILPKRNSDKLIARKKDWDPKKYGGFDSPTVAYSVLVVAKVEKGKSKKLKSVKELLGITIMERSSFEKNPIDFLEAKGYKEVKKDLIIKLPKYSLFELENGRKRMLASAGELQKGNELALPSKYVNFLYLASHYEKLKGSPEDNEQKQLFVEQHKHYLDEIIEQISEFSKRVILADANLDKVLSAYNKHRDKPIREQAENIIHLFTLTNLGAPAAFKYFDTTIDRKRYTSTKEVLDATLIHQSITGLYETRIDLSQLGGDGGPAPAPAPAPAPGGTLNIEDEYRLHETSKEPDVPLGSTWLSDFPQAWAETGGMGLAVRQAPLIIPLKATSTPVSIKQYPMSQEARLGIKPHIQRLLDQGILVPCQSPWNTPLLPVKKPGTNDYRPVQDLREVNKRVEDIHPTVPNPYNLLSGLPPSHQWYTVLDLKDAFFCLRLHPTSQPLFAFEWRDPEMGISGQLTWTRLPQGFKNSPTLFNEALHRDLADFRIQHPDLILLQYVDDLLLAATSEQDCQRGTRALLQTLGNLGYRASAKKAQICQKQVKYLGYLLKEGQRWLTEARKETVMGQPTPKTPRQLREFLGKAGFCRLFIPGFAEMAAPLYPLTKPGTLFNWGPDQQKAYQEIKQALLTAPALGLPDLTKPFELFVDEKQGYAKGVLTQKLGPWRRPVAYLSKKLDPVAAGWPPCLRMVAAIAVLTKDAGKLTMGQPLVILAPHAVEALVKQPPDRWLSNARMTHYQAMLLDTDRVQFGPVVALNPATLLPLPEKEAPHDCLEILAETHGTRPDLTDQPIPDADYTWYTDGSSFLQEGQRRAGAAVTTETEVIWARALPAGTSAQRAELIALTQALKMAEGKKLNVYTDSRYAFATAHVHGEIYRRRGWLTSEGREIKNKNEILALLKALFLPKRLSIIHCPGHQKGNSAEARGNRMADQAAREAAMKAVLETSTLLAGKRTADGSEFEKRTADGSEFESPKKKAKVE

SEQ ID NO: 1070 - protein, 2091 aa, synthetic construct
MPAAKRVKLDGGDKKYSIGLDIGTNSVGWAVITDEYKVPSKKFKVLGNTDRHSIKKNLIGALLFDSGETAEATRLKRTARRRYTRRKNRICYLQEIFSNEMAKVDDSFFHRLEESFLVEEDKKHERHPIFGNIVDEVAYHEKYPTIYHLRKKLVDSTDKADLRLIYLALAHMIKFRGHFLIEGDLNPDNSDVDKLFIQLVQTYNQLFEENPINASGVDAKAILSARLSKSRRLENLIAQLPGEKKNGLFGNLIALSLGLTPNFKSNFDLAEDAKLQLSKDTYDDDLDNLLAQIGDQYADLFLAAKNLSDAILLSDILRVNTEITKAPLSASMIKRYDEHHQDLTLLKALVRQQLPEKYKEIFFDQSKNGYAGYIDGGASQEEFYKFIKPILEKMDGTEELLVKLNREDLLRKQRTFDNGSIPHQIHLGELHAILRRQEDFYPFLKDNREKIEKILTFRIPYYVGPLARGNSRFAWMTRKSEETITPWNFEEVVDKGASAQSFIERMTNFDKNLPNEKVLPKHSLLYEYFTVYNELTKVKYVTEGMRKPAFLSGEQKKAIVDLLFKTNRKVTVKQLKEDYFKKIECFDSVEISGVEDRFNASLGTYHDLLKIIKDKDFLDNEENEDILEDIVLTLTLFEDREMIEERLKTYAHLFDDKVMKQLKRRRYTGWGRLSRKLINGIRDKQSGKTILDFLKSDGFANRNFMQLIHDDSLTFKEDIQKAQVSGQGDSLHEHIANLAGSPAIKKGILQTVKVVDELVKVMGRHKPENIVIEMARENQTTQKGQKNSRERMKRIEEGIKELGSQILKEHPVENTQLQNEKLYLYYLQNGRDMYVDQELDINRLSDYDVDHIVPQSFLKDDSIDNKVLTRSDKARGKSDNVPSEEVVKKMKNYWRQLLNAKLITQRKFDNLTKAERGGLSELDKAGFIKRQLVETRQITKHVAQILDSRMNTKYDENDKLIREVKVITLKSKLVSDFRKDFQFYKVREINNYHHAHDAYLNAVVGTALIKKYPKLESEFVYGDYKVYDVRKMIAKSEQEIGKATAKYFFYSNIMNFFKTEITLANGEIRKRPLIETNGETGEIVWDKGRDFATVRKVLSMPQVNIVKKTEVQTGGFSKESILPKRNSDKLIARKKDWDPKKYGGFDSPTVAYSVLVVAKVEKGKSKKLKSVKELLGITIMERSSFEKNPIDFLEAKGYKEVKKDLIIKLPKYSLFELENGRKRMLASAGELQKGNELALPSKYVNFLYLASHYEKLKGSPEDNEQKQLFVEQHKHYLDEIIEQISEFSKRVILADANLDKVLSAYNKHRDKPIREQAENIIHLFTLTNLGAPAAFKYFDTTIDRKRYTSTKEVLDATLIHQSITGLYETRIDLSQLGGDGGGSSGGGGGTLNIEDEYRLHETSKEPDVPLGSTWLSDFPQAWAETGGMGLAVRQAPLIIPLKATSTPVSIKQYPMSQEARLGIKPHIQRLLDQGILVPCQSPWNTPLLPVKKPGTNDYRPVQDLREVNKRVEDIHPTVPNPYNLLSGLPPSHQWYTVLDLKDAFFCLRLHPTSQPLFAFEWRDPEMGISGQLTWTRLPQGFKNSPTLFNEALHRDLADFRIQHPDLILLQYVDDLLLAATSEQDCQRGTRALLQTLGNLGYRASAKKAQICQKQVKYLGYLLKEGQRWLTEARKETVMGQPTPKTPRQLREFLGKAGFCRLFIPGFAEMAAPLYPLTKPGTLFNWGPDQQKAYQEIKQALLTAPALGLPDLTKPFELFVDEKQGYAKGVLTQKLGPWRRPVAYLSKKLDPVAAGWPPCLRMVAAIAVLTKDAGKLTMGQPLVILAPHAVEALVKQPPDRWLSNARMTHYQAMLLDTDRVQFGPVVALNPATLLPLPEKEAPHDCLEILAETHGTRPDLTDQPIPDADYTWYTDGSSFLQEGQRRAGAAVTTETEVIWARALPAGTSAQRAELIALTQALKMAEGKKLNVYTDSRYAFATAHVHGEIYRRRGWLTSEGREIKNKNEILALLKALFLPKRLSIIHCPGHQKGNSAEARGNRMADQAAREAAMKAVLETSTLLAGKRTADGSEFEKRTADGSEFESPKKKAKVE

SEQ ID NO: 1071 - protein, 2094 aa, synthetic construct
MPAAKRVKLDGGDKKYSIGLDIGTNSVGWAVITDEYKVPSKKFKVLGNTDRHSIKKNLIGALLFDSGETAEATRLKRTARRRYTRRKNRICYLQEIFSNEMAKVDDSFFHRLEESFLVEEDKKHERHPIFGNIVDEVAYHEKYPTIYHLRKKLVDSTDKADLRLIYLALAHMIKFRGHFLIEGDLNPDNSDVDKLFIQLVQTYNQLFEENPINASGVDAKAILSARLSKSRRLENLIAQLPGEKKNGLFGNLIALSLGLTPNFKSNFDLAEDAKLQLSKDTYDDDLDNLLAQIGDQYADLFLAAKNLSDAILLSDILRVNTEITKAPLSASMIKRYDEHHQDLTLLKALVRQQLPEKYKEIFFDQSKNGYAGYIDGGASQEEFYKFIKPILEKMDGTEELLVKLNREDLLRKQRTFDNGSIPHQIHLGELHAILRRQEDFYPFLKDNREKIEKILTFRIPYYVGPLARGNSRFAWMTRKSEETITPWNFEEVVDKGASAQSFIERMTNFDKNLPNEKVLPKHSLLYEYFTVYNELTKVKYVTEGMRKPAFLSGEQKKAIVDLLFKTNRKVTVKQLKEDYFKKIECFDSVEISGVEDRFNASLGTYHDLLKIIKDKDFLDNEENEDILEDIVLTLTLFEDREMIEERLKTYAHLFDDKVMKQLKRRRYTGWGRLSRKLINGIRDKQSGKTILDFLKSDGFANRNFMQLIHDDSLTFKEDIQKAQVSGQGDSLHEHIANLAGSPAIKKGILQTVKVVDELVKVMGRHKPENIVIEMARENQTTQKGQKNSRERMKRIEEGIKELGSQILKEHPVENTQLQNEKLYLYYLQNGRDMYVDQELDINRLSDYDVDHIVPQSFLKDDSIDNKVLTRSDKARGKSDNVPSEEVVKKMKNYWRQLLNAKLITQRKFDNLTKAERGGLSELDKAGFIKRQLVETRQITKHVAQILDSRMNTKYDENDKLIREVKVITLKSKLVSDFRKDFQFYKVREINNYHHAHDAYLNAVVGTALIKKYPKLESEFVYGDYKVYDVRKMIAKSEQEIGKATAKYFFYSNIMNFFKTEITLANGEIRKRPLIETNGETGEIVWDKGRDFATVRKVLSMPQVNIVKKTEVQTGGFSKESILPKRNSDKLIARKKDWDPKKYGGFDSPTVAYSVLVVAKVEKGKSKKLKSVKELLGITIMERSSFEKNPIDFLEAKGYKEVKKDLIIKLPKYSLFELENGRKRMLASAGELQKGNELALPSKYVNFLYLASHYEKLKGSPEDNEQKQLFVEQHKHYLDEIIEQISEFSKRVILADANLDKVLSAYNKHRDKPIREQAENIIHLFTLTNLGAPAAFKYFDTTIDRKRYTSTKEVLDATLIHQSITGLYETRIDLSQLGGDGGPAPGGSGGGGGTLNIEDEYRLHETSKEPDVPLGSTWLSDFPQAWAETGGMGLAVRQAPLIIPLKATSTPVSIKQYPMSQEARLGIKPHIQRLLDQGILVPCQSPWNTPLLPVKKPGTNDYRPVQDLREVNKRVEDIHPTVPNPYNLLSGLPPSHQWYTVLDLKDAFFCLRLHPTSQPLFAFEWRDPEMGISGQLTWTRLPQGFKNSPTLFNEALHRDLADFRIQHPDLILLQYVDDLLLAATSEQDCQRGTRALLQTLGNLGYRASAKKAQICQKQVKYLGYLLKEGQRWLTEARKETVMGQPTPKTPRQLREFLGKAGFCRLFIPGFAEMAAPLYPLTKPGTLFNWGPDQQKAYQEIKQALLTAPALGLPDLTKPFELFVDEKQGYAKGVLTQKLGPWRRPVAYLSKKLDPVAAGWPPCLRMVAAIAVLTKDAGKLTMGQPLVILAPHAVEALVKQPPDRWLSNARMTHYQAMLLDTDRVQFGPVVALNPATLLPLPEKEAPHDCLEILAETHGTRPDLTDQPIPDADYTWYTDGSSFLQEGQRRAGAAVTTETEVIWARALPAGTSAQRAELIALTQALKMAEGKKLNVYTDSRYAFATAHVHGEIYRRRGWLTSEGREIKNKNEILALLKALFLPKRLSIIHCPGHQKGNSAEARGNRMADQAAREAAMKAVLETSTLLAGKRTADGSEFEKRTADGSEFESPKKKAKVE

SEQ ID NO: 1072 - protein, 2097 aa, synthetic construct
MPAAKRVKLDGGDKKYSIGLDIGTNSVGWAVITDEYKVPSKKFKVLGNTDRHSIKKNLIGALLFDSGETAEATRLKRTARRRYTRRKNRICYLQEIFSNEMAKVDDSFFHRLEESFLVEEDKKHERHPIFGNIVDEVAYHEKYPTIYHLRKKLVDSTDKADLRLIYLALAHMIKFRGHFLIEGDLNPDNSDVDKLFIQLVQTYNQLFEENPINASGVDAKAILSARLSKSRRLENLIAQLPGEKKNGLFGNLIALSLGLTPNFKSNFDLAEDAKLQLSKDTYDDDLDNLLAQIGDQYADLFLAAKNLSDAILLSDILRVNTEITKAPLSASMIKRYDEHHQDLTLLKALVRQQLPEKYKEIFFDQSKNGYAGYIDGGASQEEFYKFIKPILEKMDGTEELLVKLNREDLLRKQRTFDNGSIPHQIHLGELHAILRRQEDFYPFLKDNREKIEKILTFRIPYYVGPLARGNSRFAWMTRKSEETITPWNFEEVVDKGASAQSFIERMTNFDKNLPNEKVLPKHSLLYEYFTVYNELTKVKYVTEGMRKPAFLSGEQKKAIVDLLFKTNRKVTVKQLKEDYFKKIECFDSVEISGVEDRFNASLGTYHDLLKIIKDKDFLDNEENEDILEDIVLTLTLFEDREMIEERLKTYAHLFDDKVMKQLKRRRYTGWGRLSRKLINGIRDKQSGKTILDFLKSDGFANRNFMQLIHDDSLTFKEDIQKAQVSGQGDSLHEHIANLAGSPAIKKGILQTVKVVDELVKVMGRHKPENIVIEMARENQTTQKGQKNSRERMKRIEEGIKELGSQILKEHPVENTQLQNEKLYLYYLQNGRDMYVDQELDINRLSDYDVDHIVPQSFLKDDSIDNKVLTRSDKARGKSDNVPSEEVVKKMKNYWRQLLNAKLITQRKFDNLTKAERGGLSELDKAGFIKRQLVETRQITKHVAQILDSRMNTKYDENDKLIREVKVITLKSKLVSDFRKDFQFYKVREINNYHHAHDAYLNAVVGTALIKKYPKLESEFVYGDYKVYDVRKMIAKSEQEIGKATAKYFFYSNIMNFFKTEITLANGEIRKRPLIETNGETGEIVWDKGRDFATVRKVLSMPQVNIVKKTEVQTGGFSKESILPKRNSDKLIARKKDWDPKKYGGFDSPTVAYSVLVVAKVEKGKSKKLKSVKELLGITIMERSSFEKNPIDFLEAKGYKEVKKDLIIKLPKYSLFELENGRKRMLASAGELQKGNELALPSKYVNFLYLASHYEKLKGSPEDNEQKQLFVEQHKHYLDEIIEQISEFSKRVILADANLDKVLSAYNKHRDKPIREQAENIIHLFTLTNLGAPAAFKYFDTTIDRKRYTSTKEVLDATLIHQSITGLYETRIDLSQLGGDGGGSAGSAAGSGEFGGTLNIEDEYRLHETSKEPDVPLGSTWLSDFPQAWAETGGMGLAVRQAPLIIPLKATSTPVSIKQYPMSQEARLGIKPHIQRLLDQGILVPCQSPWNTPLLPVKKPGTNDYRPVQDLREVNKRVEDIHPTVPNPYNLLSGLPPSHQWYTVLDLKDAFFCLRLHPTSQPLFAFEWRDPEMGISGQLTWTRLPQGFKNSPTLFNEALHRDLADFRIQHPDLILLQYVDDLLLAATSEQDCQRGTRALLQTLGNLGYRASAKKAQICQKQVKYLGYLLKEGQRWLTEARKETVMGQPTPKTPRQLREFLGKAGFCRLFIPGFAEMAAPLYPLTKPGTLFNWGPDQQKAYQEIKQALLTAPALGLPDLTKPFELFVDEKQGYAKGVLTQKLGPWRRPVAYLSKKLDPVAAGWPPCLRMVAAIAVLTKDAGKLTMGQPLVILAPHAVEALVKQPPDRWLSNARMTHYQAMLLDTDRVQFGPVVALNPATLLPLPEKEAPHDCLEILAETHGTRPDLTDQPIPDADYTWYTDGSSFLQEGQRRAGAAVTTETEVIWARALPAGTSAQRAELIALTQALKMAEGKKLNVYTDSRYAFATAHVHGEIYRRRGWLTSEGREIKNKNEILALLKALFLPKRLSIIHCPGHQKGNSAEARGNRMADQAAREAAMKAVLETSTLLAGKRTADGSEFEKRTADGSEFESPKKKAKVE

SEQ ID NO: 1073 - protein, 2094 aa, synthetic construct
MPAAKRVKLDGGDKKYSIGLDIGTNSVGWAVITDEYKVPSKKFKVLGNTDRHSIKKNLIGALLFDSGETAEATRLKRTARRRYTRRKNRICYLQEIFSNEMAKVDDSFFHRLEESFLVEEDKKHERHPIFGNIVDEVAYHEKYPTIYHLRKKLVDSTDKADLRLIYLALAHMIKFRGHFLIEGDLNPDNSDVDKLFIQLVQTYNQLFEENPINASGVDAKAILSARLSKSRRLENLIAQLPGEKKNGLFGNLIALSLGLTPNFKSNFDLAEDAKLQLSKDTYDDDLDNLLAQIGDQYADLFLAAKNLSDAILLSDILRVNTEITKAPLSASMIKRYDEHHQDLTLLKALVRQQLPEKYKEIFFDQSKNGYAGYIDGGASQEEFYKFIKPILEKMDGTEELLVKLNREDLLRKQRTFDNGSIPHQIHLGELHAILRRQEDFYPFLKDNREKIEKILTFRIPYYVGPLARGNSRFAWMTRKSEETITPWNFEEVVDKGASAQSFIERMTNFDKNLPNEKVLPKHSLLYEYFTVYNELTKVKYVTEGMRKPAFLSGEQKKAIVDLLFKTNRKVTVKQLKEDYFKKIECFDSVEISGVEDRFNASLGTYHDLLKIIKDKDFLDNEENEDILEDIVLTLTLFEDREMIEERLKTYAHLFDDKVMKQLKRRRYTGWGRLSRKLINGIRDKQSGKTILDFLKSDGFANRNFMQLIHDDSLTFKEDIQKAQVSGQGDSLHEHIANLAGSPAIKKGILQTVKVVDELVKVMGRHKPENIVIEMARENQTTQKGQKNSRERMKRIEEGIKELGSQILKEHPVENTQLQNEKLYLYYLQNGRDMYVDQELDINRLSDYDVDHIVPQSFLKDDSIDNKVLTRSDKARGKSDNVPSEEVVKKMKNYWRQLLNAKLITQRKFDNLTKAERGGLSELDKAGFIKRQLVETRQITKHVAQILDSRMNTKYDENDKLIREVKVITLKSKLVSDFRKDFQFYKVREINNYHHAHDAYLNAVVGTALIKKYPKLESEFVYGDYKVYDVRKMIAKSEQEIGKATAKYFFYSNIMNFFKTEITLANGEIRKRPLIETNGETGEIVWDKGRDFATVRKVLSMPQVNIVKKTEVQTGGFSKESILPKRNSDKLIARKKDWDPKKYGGFDSPTVAYSVLVVAKVEKGKSKKLKSVKELLGITIMERSSFEKNPIDFLEAKGYKEVKKDLIIKLPKYSLFELENGRKRMLASAGELQKGNELALPSKYVNFLYLASHYEKLKGSPEDNEQKQLFVEQHKHYLDEIIEQISEFSKRVILADANLDKVLSAYNKHRDKPIREQAENIIHLFTLTNLGAPAAFKYFDTTIDRKRYTSTKEVLDATLIHQSITGLYETRIDLSQLGGDGGGGGGSSPAPGGTLNIEDEYRLHETSKEPDVPLGSTWLSDFPQAWAETGGMGLAVRQAPLIIPLKATSTPVSIKQYPMSQEARLGIKPHIQRLLDQGILVPCQSPWNTPLLPVKKPGTNDYRPVQDLREVNKRVEDIHPTVPNPYNLLSGLPPSHQWYTVLDLKDAFFCLRLHPTSQPLFAFEWRDPEMGISGQLTWTRLPQGFKNSPTLFNEALHRDLADFRIQHPDLILLQYVDDLLLAATSEQDCQRGTRALLQTLGNLGYRASAKKAQICQKQVKYLGYLLKEGQRWLTEARKETVMGQPTPKTPRQLREFLGKAGFCRLFIPGFAEMAAPLYPLTKPGTLFNWGPDQQKAYQEIKQALLTAPALGLPDLTKPFELFVDEKQGYAKGVLTQKLGPWRRPVAYLSKKLDPVAAGWPPCLRMVAAIAVLTKDAGKLTMGQPLVILAPHAVEALVKQPPDRWLSNARMTHYQAMLLDTDRVQFGPVVALNPATLLPLPEKEAPHDCLEILAETHGTRPDLTDQPIPDADYTWYTDGSSFLQEGQRRAGAAVTTETEVIWARALPAGTSAQRAELIALTQALKMAEGKKLNVYTDSRYAFATAHVHGEIYRRRGWLTSEGREIKNKNEILALLKALFLPKRLSIIHCPGHQKGNSAEARGNRMADQAAREAAMKAVLETSTLLAGKRTADGSEFEKRTADGSEFESPKKKAKVE

SEQ ID NO: 1074 - protein, 2095 aa, synthetic construct
MPAAKRVKLDGGDKKYSIGLDIGTNSVGWAVITDEYKVPSKKFKVLGNTDRHSIKKNLIGALLFDSGETAEATRLKRTARRRYTRRKNRICYLQEIFSNEMAKVDDSFFHRLEESFLVEEDKKHERHPIFGNIVDEVAYHEKYPTIYHLRKKLVDSTDKADLRLIYLALAHMIKFRGHFLIEGDLNPDNSDVDKLFIQLVQTYNQLFEENPINASGVDAKAILSARLSKSRRLENLIAQLPGEKKNGLFGNLIALSLGLTPNFKSNFDLAEDAKLQLSKDTYDDDLDNLLAQIGDQYADLFLAAKNLSDAILLSDILRVNTEITKAPLSASMIKRYDEHHQDLTLLKALVRQQLPEKYKEIFFDQSKNGYAGYIDGGASQEEFYKFIKPILEKMDGTEELLVKLNREDLLRKQRTFDNGSIPHQIHLGELHAILRRQEDFYPFLKDNREKIEKILTFRIPYYVGPLARGNSRFAWMTRKSEETITPWNFEEVVDKGASAQSFIERMTNFDKNLPNEKVLPKHSLLYEYFTVYNELTKVKYVTEGMRKPAFLSGEQKKAIVDLLFKTNRKVTVKQLKEDYFKKIECFDSVEISGVEDRFNASLGTYHDLLKIIKDKDFLDNEENEDILEDIVLTLTLFEDREMIEERLKTYAHLFDDKVMKQLKRRRYTGWGRLSRKLINGIRDKQSGKTILDFLKSDGFANRNFMQLIHDDSLTFKEDIQKAQVSGQGDSLHEHIANLAGSPAIKKGILQTVKVVDELVKVMGRHKPENIVIEMARENQTTQKGQKNSRERMKRIEEGIKELGSQILKEHPVENTQLQNEKLYLYYLQNGRDMYVDQELDINRLSDYDVDHIVPQSFLKDDSIDNKVLTRSDKARGKSDNVPSEEVVKKMKNYWRQLLNAKLITQRKFDNLTKAERGGLSELDKAGFIKRQLVETRQITKHVAQILDSRMNTKYDENDKLIREVKVITLKSKLVSDFRKDFQFYKVREINNYHHAHDAYLNAVVGTALIKKYPKLESEFVYGDYKVYDVRKMIAKSEQEIGKATAKYFFYSNIMNFFKTEITLANGEIRKRPLIETNGETGEIVWDKGRDFATVRKVLSMPQVNIVKKTEVQTGGFSKESILPKRNSDKLIARKKDWDPKKYGGFDSPTVAYSVLVVAKVEKGKSKKLKSVKELLGITIMERSSFEKNPIDFLEAKGYKEVKKDLIIKLPKYSLFELENGRKRMLASAGELQKGNELALPSKYVNFLYLASHYEKLKGSPEDNEQKQLFVEQHKHYLDEIIEQISEFSKRVILADANLDKVLSAYNKHRDKPIREQAENIIHLFTLTNLGAPAAFKYFDTTIDRKRYTSTKEVLDATLIHQSITGLYETRIDLSQLGGDGGGGGGSGGGGSGGTLNIEDEYRLHETSKEPDVPLGSTWLSDFPQAWAETGGMGLAVRQAPLIIPLKATSTPVSIKQYPMSQEARLGIKPHIQRLLDQGILVPCQSPWNTPLLPVKKPGTNDYRPVQDLREVNKRVEDIHPTVPNPYNLLSGLPPSHQWYTVLDLKDAFFCLRLHPTSQPLFAFEWRDPEMGISGQLTWTRLPQGFKNSPTLFNEALHRDLADFRIQHPDLILLQYVDDLLLAATSEQDCQRGTRALLQTLGNLGYRASAKKAQICQKQVKYLGYLLKEGQRWLTEARKETVMGQPTPKTPRQLREFLGKAGFCRLFIPGFAEMAAPLYPLTKPGTLFNWGPDQQKAYQEIKQALLTAPALGLPDLTKPFELFVDEKQGYAKGVLTQKLGPWRRPVAYLSKKLDPVAAGWPPCLRMVAAIAVLTKDAGKLTMGQPLVILAPHAVEALVKQPPDRWLSNARMTHYQAMLLDTDRVQFGPVVALNPATLLPLPEKEAPHDCLEILAETHGTRPDLTDQPIPDADYTWYTDGSSFLQEGQRRAGAAVTTETEVIWARALPAGTSAQRAELIALTQALKMAEGKKLNVYTDSRYAFATAHVHGEIYRRRGWLTSEGREIKNKNEILALLKALFLPKRLSIIHCPGHQKGNSAEARGNRMADQAAREAAMKAVLETSTLLAGKRTADGSEFEKRTADGSEFESPKKKAKVE

SEQ ID NO: 1075 - protein, 2096 aa, synthetic construct
MPAAKRVKLDGGDKKYSIGLDIGTNSVGWAVITDEYKVPSKKFKVLGNTDRHSIKKNLIGALLFDSGETAEATRLKRTARRRYTRRKNRICYLQEIFSNEMAKVDDSFFHRLEESFLVEEDKKHERHPIFGNIVDEVAYHEKYPTIYHLRKKLVDSTDKADLRLIYLALAHMIKFRGHFLIEGDLNPDNSDVDKLFIQLVQTYNQLFEENPINASGVDAKAILSARLSKSRRLENLIAQLPGEKKNGLFGNLIALSLGLTPNFKSNFDLAEDAKLQLSKDTYDDDLDNLLAQIGDQYADLFLAAKNLSDAILLSDILRVNTEITKAPLSASMIKRYDEHHQDLTLLKALVRQQLPEKYKEIFFDQSKNGYAGYIDGGASQEEFYKFIKPILEKMDGTEELLVKLNREDLLRKQRTFDNGSIPHQIHLGELHAILRRQEDFYPFLKDNREKIEKILTFRIPYYVGPLARGNSRFAWMTRKSEETITPWNFEEVVDKGASAQSFIERMTNFDKNLPNEKVLPKHSLLYEYFTVYNELTKVKYVTEGMRKPAFLSGEQKKAIVDLLFKTNRKVTVKQLKEDYFKKIECFDSVEISGVEDRFNASLGTYHDLLKIIKDKDFLDNEENEDILEDIVLTLTLFEDREMIEERLKTYAHLFDDKVMKQLKRRRYTGWGRLSRKLINGIRDKQSGKTILDFLKSDGFANRNFMQLIHDDSLTFKEDIQKAQVSGQGDSLHEHIANLAGSPAIKKGILQTVKVVDELVKVMGRHKPENIVIEMARENQTTQKGQKNSRERMKRIEEGIKELGSQILKEHPVENTQLQNEKLYLYYLQNGRDMYVDQELDINRLSDYDVDHIVPQSFLKDDSIDNKVLTRSDKARGKSDNVPSEEVVKKMKNYWRQLLNAKLITQRKFDNLTKAERGGLSELDKAGFIKRQLVETRQITKHVAQILDSRMNTKYDENDKLIREVKVITLKSKLVSDFRKDFQFYKVREINNYHHAHDAYLNAVVGTALIKKYPKLESEFVYGDYKVYDVRKMIAKSEQEIGKATAKYFFYSNIMNFFKTEITLANGEIRKRPLIETNGETGEIVWDKGRDFATVRKVLSMPQVNIVKKTEVQTGGFSKESILPKRNSDKLIARKKDWDPKKYGGFDSPTVAYSVLVVAKVEKGKSKKLKSVKELLGITIMERSSFEKNPIDFLEAKGYKEVKKDLIIKLPKYSLFELENGRKRMLASAGELQKGNELALPSKYVNFLYLASHYEKLKGSPEDNEQKQLFVEQHKHYLDEIIEQISEFSKRVILADANLDKVLSAYNKHRDKPIREQAENIIHLFTLTNLGAPAAFKYFDTTIDRKRYTSTKEVLDATLIHQSITGLYETRIDLSQLGGDGGGSSEAAAKGGSGGTLNIEDEYRLHETSKEPDVPLGSTWLSDFPQAWAETGGMGLAVRQAPLIIPLKATSTPVSIKQYPMSQEARLGIKPHIQRLLDQGILVPCQSPWNTPLLPVKKPGTNDYRPVQDLREVNKRVEDIHPTVPNPYNLLSGLPPSHQWYTVLDLKDAFFCLRLHPTSQPLFAFEWRDPEMGISGQLTWTRLPQGFKNSPTLFNEALHRDLADFRIQHPDLILLQYVDDLLLAATSEQDCQRGTRALLQTLGNLGYRASAKKAQICQKQVKYLGYLLKEGQRWLTEARKETVMGQPTPKTPRQLREFLGKAGFCRLFIPGFAEMAAPLYPLTKPGTLFNWGPDQQKAYQEIKQALLTAPALGLPDLTKPFELFVDEKQGYAKGVLTQKLGPWRRPVAYLSKKLDPVAAGWPPCLRMVAAIAVLTKDAGKLTMGQPLVILAPHAVEALVKQPPDRWLSNARMTHYQAMLLDTDRVQFGPVVALNPATLLPLPEKEAPHDCLEILAETHGTRPDLTDQPIPDADYTWYTDGSSFLQEGQRRAGAAVTTETEVIWARALPAGTSAQRAELIALTQALKMAEGKKLNVYTDSRYAFATAHVHGEIYRRRGWLTSEGREIKNKNEILALLKALFLPKRLSIIHCPGHQKGNSAEARGNRMADQAAREAAMKAVLETSTLLAGKRTADGSEFEKRTADGSEFESPKKKAKVE

SEQ ID NO: 1076 - protein, 2096 aa, synthetic construct
MPAAKRVKLDGGDKKYSIGLDIGTNSVGWAVITDEYKVPSKKFKVLGNTDRHSIKKNLIGALLFDSGETAEATRLKRTARRRYTRRKNRICYLQEIFSNEMAKVDDSFFHRLEESFLVEEDKKHERHPIFGNIVDEVAYHEKYPTIYHLRKKLVDSTDKADLRLIYLALAHMIKFRGHFLIEGDLNPDNSDVDKLFIQLVQTYNQLFEENPINASGVDAKAILSARLSKSRRLENLIAQLPGEKKNGLFGNLIALSLGLTPNFKSNFDLAEDAKLQLSKDTYDDDLDNLLAQIGDQYADLFLAAKNLSDAILLSDILRVNTEITKAPLSASMIKRYDEHHQDLTLLKALVRQQLPEKYKEIFFDQSKNGYAGYIDGGASQEEFYKFIKPILEKMDGTEELLVKLNREDLLRKQRTFDNGSIPHQIHLGELHAILRRQEDFYPFLKDNREKIEKILTFRIPYYVGPLARGNSRFAWMTRKSEETITPWNFEEVVDKGASAQSFIERMTNFDKNLPNEKVLPKHSLLYEYFTVYNELTKVKYVTEGMRKPAFLSGEQKKAIVDLLFKTNRKVTVKQLKEDYFKKIECFDSVEISGVEDRFNASLGTYHDLLKIIKDKDFLDNEENEDILEDIVLTLTLFEDREMIEERLKTYAHLFDDKVMKQLKRRRYTGWGRLSRKLINGIRDKQSGKTILDFLKSDGFANRNFMQLIHDDSLTFKEDIQKAQVSGQGDSLHEHIANLAGSPAIKKGILQTVKVVDELVKVMGRHKPENIVIEMARENQTTQKGQKNSRERMKRIEEGIKELGSQILKEHPVENTQLQNEKLYLYYLQNGRDMYVDQELDINRLSDYDVDHIVPQSFLKDDSIDNKVLTRSDKARGKSDNVPSEEVVKKMKNYWRQLLNAKLITQRKFDNLTKAERGGLSELDKAGFIKRQLVETRQITKHVAQILDSRMNTKYDENDKLIREVKVITLKSKLVSDFRKDFQFYKVREINNYHHAHDAYLNAVVGTALIKKYPKLESEFVYGDYKVYDVRKMIAKSEQEIGKATAKYFFYSNIMNFFKTEITLANGEIRKRPLIETNGETGEIVWDKGRDFATVRKVLSMPQVNIVKKTEVQTGGFSKESILPKRNSDKLIARKKDWDPKKYGGFDSPTVAYSVLVVAKVEKGKSKKLKSVKELLGITIMERSSFEKNPIDFLEAKGYKEVKKDLIIKLPKYSLFELENGRKRMLASAGELQKGNELALPSKYVNFLYLASHYEKLKGSPEDNEQKQLFVEQHKHYLDEIIEQISEFSKRVILADANLDKVLSAYNKHRDKPIREQAENIIHLFTLTNLGAPAAFKYFDTTIDRKRYTSTKEVLDATLIHQSITGLYETRIDLSQLGGDGGGGGPAPEAAAKGGTLNIEDEYRLHETSKEPDVPLGSTWLSDFPQAWAETGGMGLAVRQAPLIIPLKATSTPVSIKQYPMSQEARLGIKPHIQRLLDQGILVPCQSPWNTPLLPVKKPGTNDYRPVQDLREVNKRVEDIHPTVPNPYNLLSGLPPSHQWYTVLDLKDAFFCLRLHPTSQPLFAFEWRDPEMGISGQLTWTRLPQGFKNSPTLFNEALHRDLADFRIQHPDLILLQYVDDLLLAATSEQDCQRGTRALLQTLGNLGYRASAKKAQICQKQVKYLGYLLKEGQRWLTEARKETVMGQPTPKTPRQLREFLGKAGFCRLFIPGFAEMAAPLYPLTKPGTLFNWGPDQQKAYQEIKQALLTAPALGLPDLTKPFELFVDEKQGYAKGVLTQKLGPWRRPVAYLSKKLDPVAAGWPPCLRMVAAIAVLTKDAGKLTMGQPLVILAPHAVEALVKQPPDRWLSNARMTHYQAMLLDTDRVQFGPVVALNPATLLPLPEKEAPHDCLEILAETHGTRPDLTDQPIPDADYTWYTDGSSFLQEGQRRAGAAVTTETEVIWARALPAGTSAQRAELIALTQALKMAEGKKLNVYTDSRYAFATAHVHGEIYRRRGWLTSEGREIKNKNEILALLKALFLPKRLSIIHCPGHQKGNSAEARGNRMADQAAREAAMKAVLETSTLLAGKRTADGSEFEKRTADGSEFESPKKKAKVE

SEQ ID NO: 1077 - protein, 2097 aa, synthetic construct
MPAAKRVKLDGGDKKYSIGLDIGTNSVGWAVITDEYKVPSKKFKVLGNTDRHSIKKNLIGALLFDSGETAEATRLKRTARRRYTRRKNRICYLQEIFSNEMAKVDDSFFHRLEESFLVEEDKKHERHPIFGNIVDEVAYHEKYPTIYHLRKKLVDSTDKADLRLIYLALAHMIKFRGHFLIEGDLNPDNSDVDKLFIQLVQTYNQLFEENPINASGVDAKAILSARLSKSRRLENLIAQLPGEKKNGLFGNLIALSLGLTPNFKSNFDLAEDAKLQLSKDTYDDDLDNLLAQIGDQYADLFLAAKNLSDAILLSDILRVNTEITKAPLSASMIKRYDEHHQDLTLLKALVRQQLPEKYKEIFFDQSKNGYAGYIDGGASQEEFYKFIKPILEKMDGTEELLVKLNREDLLRKQRTFDNGSIPHQIHLGELHAILRRQEDFYPFLKDNREKIEKILTFRIPYYVGPLARGNSRFAWMTRKSEETITPWNFEEVVDKGASAQSFIERMTNFDKNLPNEKVLPKHSLLYEYFTVYNELTKVKYVTEGMRKPAFLSGEQKKAIVDLLFKTNRKVTVKQLKEDYFKKIECFDSVEISGVEDRFNASLGTYHDLLKIIKDKDFLDNEENEDILEDIVLTLTLFEDREMIEERLKTYAHLFDDKVMKQLKRRRYTGWGRLSRKLINGIRDKQSGKTILDFLKSDGFANRNFMQLIHDDSLTFKEDIQKAQVSGQGDSLHEHIANLAGSPAIKKGILQTVKVVDELVKVMGRHKPENIVIEMARENQTTQKGQKNSRERMKRIEEGIKELGSQILKEHPVENTQLQNEKLYLYYLQNGRDMYVDQELDINRLSDYDVDHIVPQSFLKDDSIDNKVLTRSDKARGKSDNVPSEEVVKKMKNYWRQLLNAKLITQRKFDNLTKAERGGLSELDKAGFIKRQLVETRQITKHVAQILDSRMNTKYDENDKLIREVKVITLKSKLVSDFRKDFQFYKVREINNYHHAHDAYLNAVVGTALIKKYPKLESEFVYGDYKVYDVRKMIAKSEQEIGKATAKYFFYSNIMNFFKTEITLANGEIRKRPLIETNGETGEIVWDKGRDFATVRKVLSMPQVNIVKKTEVQTGGFSKESILPKRNSDKLIARKKDWDPKKYGGFDSPTVAYSVLVVAKVEKGKSKKLKSVKELLGITIMERSSFEKNPIDFLEAKGYKEVKKDLIIKLPKYSLFELENGRKRMLASAGELQKGNELALPSKYVNFLYLASHYEKLKGSPEDNEQKQLFVEQHKHYLDEIIEQISEFSKRVILADANLDKVLSAYNKHRDKPIREQAENIIHLFTLTNLGAPAAFKYFDTTIDRKRYTSTKEVLDATLIHQSITGLYETRIDLSQLGGDGGGSSGSSGSSGSSGGTLNIEDEYRLHETSKEPDVPLGSTWLSDFPQAWAETGGMGLAVRQAPLIIPLKATSTPVSIKQYPMSQEARLGIKPHIQRLLDQGILVPCQSPWNTPLLPVKKPGTNDYRPVQDLREVNKRVEDIHPTVPNPYNLLSGLPPSHQWYTVLDLKDAFFCLRLHPTSQPLFAFEWRDPEMGISGQLTWTRLPQGFKNSPTLFNEALHRDLADFRIQHPDLILLQYVDDLLLAATSEQDCQRGTRALLQTLGNLGYRASAKKAQICQKQVKYLGYLLKEGQRWLTEARKETVMGQPTPKTPRQLREFLGKAGFCRLFIPGFAEMAAPLYPLTKPGTLFNWGPDQQKAYQEIKQALLTAPALGLPDLTKPFELFVDEKQGYAKGVLTQKLGPWRRPVAYLSKKLDPVAAGWPPCLRMVAAIAVLTKDAGKLTMGQPLVILAPHAVEALVKQPPDRWLSNARMTHYQAMLLDTDRVQFGPVVALNPATLLPLPEKEAPHDCLEILAETHGTRPDLTDQPIPDADYTWYTDGSSFLQEGQRRAGAAVTTETEVIWARALPAGTSAQRAELIALTQALKMAEGKKLNVYTDSRYAFATAHVHGEIYRRRGWLTSEGREIKNKNEILALLKALFLPKRLSIIHCPGHQKGNSAEARGNRMADQAAREAAMKAVLETSTLLAGKRTADGSEFEKRTADGSEFESPKKKAKVE

SEQ ID NO: 1078 - protein, 2093 aa, synthetic construct
MPAAKRVKLDGGDKKYSIGLDIGTNSVGWAVITDEYKVPSKKFKVLGNTDRHSIKKNLIGALLFDSGETAEATRLKRTARRRYTRRKNRICYLQEIFSNEMAKVDDSFFHRLEESFLVEEDKKHERHPIFGNIVDEVAYHEKYPTIYHLRKKLVDSTDKADLRLIYLALAHMIKFRGHFLIEGDLNPDNSDVDKLFIQLVQTYNQLFEENPINASGVDAKAILSARLSKSRRLENLIAQLPGEKKNGLFGNLIALSLGLTPNFKSNFDLAEDAKLQLSKDTYDDDLDNLLAQIGDQYADLFLAAKNLSDAILLSDILRVNTEITKAPLSASMIKRYDEHHQDLTLLKALVRQQLPEKYKEIFFDQSKNGYAGYIDGGASQEEFYKFIKPILEKMDGTEELLVKLNREDLLRKQRTFDNGSIPHQIHLGELHAILRRQEDFYPFLKDNREKIEKILTFRIPYYVGPLARGNSRFAWMTRKSEETITPWNFEEVVDKGASAQSFIERMTNFDKNLPNEKVLPKHSLLYEYFTVYNELTKVKYVTEGMRKPAFLSGEQKKAIVDLLFKTNRKVTVKQLKEDYFKKIECFDSVEISGVEDRFNASLGTYHDLLKIIKDKDFLDNEENEDILEDIVLTLTLFEDREMIEERLKTYAHLFDDKVMKQLKRRRYTGWGRLSRKLINGIRDKQSGKTILDFLKSDGFANRNFMQLIHDDSLTFKEDIQKAQVSGQGDSLHEHIANLAGSPAIKKGILQTVKVVDELVKVMGRHKPENIVIEMARENQTTQKGQKNSRERMKRIEEGIKELGSQILKEHPVENTQLQNEKLYLYYLQNGRDMYVDQELDINRLSDYDVDHIVPQSFLKDDSIDNKVLTRSDKARGKSDNVPSEEVVKKMKNYWRQLLNAKLITQRKFDNLTKAERGGLSELDKAGFIKRQLVETRQITKHVAQILDSRMNTKYDENDKLIREVKVITLKSKLVSDFRKDFQFYKVREINNYHHAHDAYLNAVVGTALIKKYPKLESEFVYGDYKVYDVRKMIAKSEQEIGKATAKYFFYSNIMNFFKTEITLANGEIRKRPLIETNGETGEIVWDKGRDFATVRKVLSMPQVNIVKKTEVQTGGFSKESILPKRNSDKLIARKKDWDPKKYGGFDSPTVAYSVLVVAKVEKGKSKKLKSVKELLGITIMERSSFEKNPIDFLEAKGYKEVKKDLIIKLPKYSLFELENGRKRMLASAGELQKGNELALPSKYVNFLYLASHYEKLKGSPEDNEQKQLFVEQHKHYLDEIIEQISEFSKRVILADANLDKVLSAYNKHRDKPIREQAENIIHLFTLTNLGAPAAFKYFDTTIDRKRYTSTKEVLDATLIHQSITGLYETRIDLSQLGGDGGEAAAKGSSGGTLNIEDEYRLHETSKEPDVPLGSTWLSDFPQAWAETGGMGLAVRQAPLIIPLKATSTPVSIKQYPMSQEARLGIKPHIQRLLDQGILVPCQSPWNTPLLPVKKPGTNDYRPVQDLREVNKRVEDIHPTVPNPYNLLSGLPPSHQWYTVLDLKDAFFCLRLHPTSQPLFAFEWRDPEMGISGQLTWTRLPQGFKNSPTLFNEALHRDLADFRIQHPDLILLQYVDDLLLAATSEQDCQRGTRALLQTLGNLGYRASAKKAQICQKQVKYLGYLLKEGQRWLTEARKETVMGQPTPKTPRQLREFLGKAGFCRLFIPGFAEMAAPLYPLTKPGTLFNWGPDQQKAYQEIKQALLTAPALGLPDLTKPFELFVDEKQGYAKGVLTQKLGPWRRPVAYLSKKLDPVAAGWPPCLRMVAAIAVLTKDAGKLTMGQPLVILAPHAVEALVKQPPDRWLSNARMTHYQAMLLDTDRVQFGPVVALNPATLLPLPEKEAPHDCLEILAETHGTRPDLTDQPIPDADYTWYTDGSSFLQEGQRRAGAAVTTETEVIWARALPAGTSAQRAELIALTQALKMAEGKKLNVYTDSRYAFATAHVHGEIYRRRGWLTSEGREIKNKNEILALLKALFLPKRLSIIHCPGHQKGNSAEARGNRMADQAAREAAMKAVLETSTLLAGKRTADGSEFEKRTADGSEFESPKKKAKVE

SEQ ID NO: 1079 - protein, 2100 aa, synthetic construct
MPAAKRVKLDGGDKKYSIGLDIGTNSVGWAVITDEYKVPSKKFKVLGNTDRHSIKKNLIGALLFDSGETAEATRLKRTARRRYTRRKNRICYLQEIFSNEMAKVDDSFFHRLEESFLVEEDKKHERHPIFGNIVDEVAYHEKYPTIYHLRKKLVDSTDKADLRLIYLALAHMIKFRGHFLIEGDLNPDNSDVDKLFIQLVQTYNQLFEENPINASGVDAKAILSARLSKSRRLENLIAQLPGEKKNGLFGNLIALSLGLTPNFKSNFDLAEDAKLQLSKDTYDDDLDNLLAQIGDQYADLFLAAKNLSDAILLSDILRVNTEITKAPLSASMIKRYDEHHQDLTLLKALVRQQLPEKYKEIFFDQSKNGYAGYIDGGASQEEFYKFIKPILEKMDGTEELLVKLNREDLLRKQRTFDNGSIPHQIHLGELHAILRRQEDFYPFLKDNREKIEKILTFRIPYYVGPLARGNSRFAWMTRKSEETITPWNFEEVVDKGASAQSFIERMTNFDKNLPNEKVLPKHSLLYEYFTVYNELTKVKYVTEGMRKPAFLSGEQKKAIVDLLFKTNRKVTVKQLKEDYFKKIECFDSVEISGVEDRFNASLGTYHDLLKIIKDKDFLDNEENEDILEDIVLTLTLFEDREMIEERLKTYAHLFDDKVMKQLKRRRYTGWGRLSRKLINGIRDKQSGKTILDFLKSDGFANRNFMQLIHDDSLTFKEDIQKAQVSGQGDSLHEHIANLAGSPAIKKGILQTVKVVDELVKVMGRHKPENIVIEMARENQTTQKGQKNSRERMKRIEEGIKELGSQILKEHPVENTQLQNEKLYLYYLQNGRDMYVDQELDINRLSDYDVDHIVPQSFLKDDSIDNKVLTRSDKARGKSDNVPSEEVVKKMKNYWRQLLNAKLITQRKFDNLTKAERGGLSELDKAGFIKRQLVETRQITKHVAQILDSRMNTKYDENDKLIREVKVITLKSKLVSDFRKDFQFYKVREINNYHHAHDAYLNAVVGTALIKKYPKLESEFVYGDYKVYDVRKMIAKSEQEIGKATAKYFFYSNIMNFFKTEITLANGEIRKRPLIETNGETGEIVWDKGRDFATVRKVLSMPQVNIVKKTEVQTGGFSKESILPKRNSDKLIARKKDWDPKKYGGFDSPTVAYSVLVVAKVEKGKSKKLKSVKELLGITIMERSSFEKNPIDFLEAKGYKEVKKDLIIKLPKYSLFELENGRKRMLASAGELQKGNELALPSKYVNFLYLASHYEKLKGSPEDNEQKQLFVEQHKHYLDEIIEQISEFSKRVILADANLDKVLSAYNKHRDKPIREQAENIIHLFTLTNLGAPAAFKYFDTTIDRKRYTSTKEVLDATLIHQSITGLYETRIDLSQLGGDGGGGGGSEAAAKGGGGSGGTLNIEDEYRLHETSKEPDVPLGSTWLSDFPQAWAETGGMGLAVRQAPLIIPLKATSTPVSIKQYPMSQEARLGIKPHIQRLLDQGILVPCQSPWNTPLLPVKKPGTNDYRPVQDLREVNKRVEDIHPTVPNPYNLLSGLPPSHQWYTVLDLKDAFFCLRLHPTSQPLFAFEWRDPEMGISGQLTWTRLPQGFKNSPTLFNEALHRDLADFRIQHPDLILLQYVDDLLLAATSEQDCQRGTRALLQTLGNLGYRASAKKAQICQKQVKYLGYLLKEGQRWLTEARKETVMGQPTPKTPRQLREFLGKAGFCRLFIPGFAEMAAPLYPLTKPGTLFNWGPDQQKAYQEIKQALLTAPALGLPDLTKPFELFVDEKQGYAKGVLTQKLGPWRRPVAYLSKKLDPVAAGWPPCLRMVAAIAVLTKDAGKLTMGQPLVILAPHAVEALVKQPPDRWLSNARMTHYQAMLLDTDRVQFGPVVALNPATLLPLPEKEAPHDCLEILAETHGTRPDLTDQPIPDADYTWYTDGSSFLQEGQRRAGAAVTTETEVIWARALPAGTSAQRAELIALTQALKMAEGKKLNVYTDSRYAFATAHVHGEIYRRRGWLTSEGREIKNKNEILALLKALFLPKRLSIIHCPGHQKGNSAEARGNRMADQAAREAAMKAVLETSTLLAGKRTADGSEFEKRTADGSEFESPKKKAKVE

SEQ ID NO: 1080 - protein, 2088 aa, synthetic construct
MPAAKRVKLDGGDKKYSIGLDIGTNSVGWAVITDEYKVPSKKFKVLGNTDRHSIKKNLIGALLFDSGETAEATRLKRTARRRYTRRKNRICYLQEIFSNEMAKVDDSFFHRLEESFLVEEDKKHERHPIFGNIVDEVAYHEKYPTIYHLRKKLVDSTDKADLRLIYLALAHMIKFRGHFLIEGDLNPDNSDVDKLFIQLVQTYNQLFEENPINASGVDAKAILSARLSKSRRLENLIAQLPGEKKNGLFGNLIALSLGLTPNFKSNFDLAEDAKLQLSKDTYDDDLDNLLAQIGDQYADLFLAAKNLSDAILLSDILRVNTEITKAPLSASMIKRYDEHHQDLTLLKALVRQQLPEKYKEIFFDQSKNGYAGYIDGGASQEEFYKFIKPILEKMDGTEELLVKLNREDLLRKQRTFDNGSIPHQIHLGELHAILRRQEDFYPFLKDNREKIEKILTFRIPYYVGPLARGNSRFAWMTRKSEETITPWNFEEVVDKGASAQSFIERMTNFDKNLPNEKVLPKHSLLYEYFTVYNELTKVKYVTEGMRKPAFLSGEQKKAIVDLLFKTNRKVTVKQLKEDYFKKIECFDSVEISGVEDRFNASLGTYHDLLKIIKDKDFLDNEENEDILEDIVLTLTLFEDREMIEERLKTYAHLFDDKVMKQLKRRRYTGWGRLSRKLINGIRDKQSGKTILDFLKSDGFANRNFMQLIHDDSLTFKEDIQKAQVSGQGDSLHEHIANLAGSPAIKKGILQTVKVVDELVKVMGRHKPENIVIEMARENQTTQKGQKNSRERMKRIEEGIKELGSQILKEHPVENTQLQNEKLYLYYLQNGRDMYVDQELDINRLSDYDVDHIVPQSFLKDDSIDNKVLTRSDKARGKSDNVPSEEVVKKMKNYWRQLLNAKLITQRKFDNLTKAERGGLSELDKAGFIKRQLVETRQITKHVAQILDSRMNTKYDENDKLIREVKVITLKSKLVSDFRKDFQFYKVREINNYHHAHDAYLNAVVGTALIKKYPKLESEFVYGDYKVYDVRKMIAKSEQEIGKATAKYFFYSNIMNFFKTEITLANGEIRKRPLIETNGETGEIVWDKGRDFATVRKVLSMPQVNIVKKTEVQTGGFSKESILPKRNSDKLIARKKDWDPKKYGGFDSPTVAYSVLVVAKVEKGKSKKLKSVKELLGITIMERSSFEKNPIDFLEAKGYKEVKKDLIIKLPKYSLFELENGRKRMLASAGELQKGNELALPSKYVNFLYLASHYEKLKGSPEDNEQKQLFVEQHKHYLDEIIEQISEFSKRVILADANLDKVLSAYNKHRDKPIREQAENIIHLFTLTNLGAPAAFKYFDTTIDRKRYTSTKEVLDATLIHQSITGLYETRIDLSQLGGDGGGGGGGTLNIEDEYRLHETSKEPDVPLGSTWLSDFPQAWAETGGMGLAVRQAPLIIPLKATSTPVSIKQYPMSQEARLGIKPHIQRLLDQGILVPCQSPWNTPLLPVKKPGTNDYRPVQDLREVNKRVEDIHPTVPNPYNLLSGLPPSHQWYTVLDLKDAFFCLRLHPTSQPLFAFEWRDPEMGISGQLTWTRLPQGFKNSPTLFNEALHRDLADFRIQHPDLILLQYVDDLLLAATSEQDCQRGTRALLQTLGNLGYRASAKKAQICQKQVKYLGYLLKEGQRWLTEARKETVMGQPTPKTPRQLREFLGKAGFCRLFIPGFAEMAAPLYPLTKPGTLFNWGPDQQKAYQEIKQALLTAPALGLPDLTKPFELFVDEKQGYAKGVLTQKLGPWRRPVAYLSKKLDPVAAGWPPCLRMVAAIAVLTKDAGKLTMGQPLVILAPHAVEALVKQPPDRWLSNARMTHYQAMLLDTDRVQFGPVVALNPATLLPLPEKEAPHDCLEILAETHGTRPDLTDQPIPDADYTWYTDGSSFLQEGQRRAGAAVTTETEVIWARALPAGTSAQRAELIALTQALKMAEGKKLNVYTDSRYAFATAHVHGEIYRRRGWLTSEGREIKNKNEILALLKALFLPKRLSIIHCPGHQKGNSAEARGNRMADQAAREAAMKAVLETSTLLAGKRTADGSEFEKRTADGSEFESPKKKAKVE

SEQ ID NO: 1081 - protein, 2096 aa, synthetic construct
MPAAKRVKLDGGDKKYSIGLDIGTNSVGWAVITDEYKVPSKKFKVLGNTDRHSIKKNLIGALLFDSGETAEATRLKRTARRRYTRRKNRICYLQEIFSNEMAKVDDSFFHRLEESFLVEEDKKHERHPIFGNIVDEVAYHEKYPTIYHLRKKLVDSTDKADLRLIYLALAHMIKFRGHFLIEGDLNPDNSDVDKLFIQLVQTYNQLFEENPINASGVDAKAILSARLSKSRRLENLIAQLPGEKKNGLFGNLIALSLGLTPNFKSNFDLAEDAKLQLSKDTYDDDLDNLLAQIGDQYADLFLAAKNLSDAILLSDILRVNTEITKAPLSASMIKRYDEHHQDLTLLKALVRQQLPEKYKEIFFDQSKNGYAGYIDGGASQEEFYKFIKPILEKMDGTEELLVKLNREDLLRKQRTFDNGSIPHQIHLGELHAILRRQEDFYPFLKDNREKIEKILTFRIPYYVGPLARGNSRFAWMTRKSEETITPWNFEEVVDKGASAQSFIERMTNFDKNLPNEKVLPKHSLLYEYFTVYNELTKVKYVTEGMRKPAFLSGEQKKAIVDLLFKTNRKVTVKQLKEDYFKKIECFDSVEISGVEDRFNASLGTYHDLLKIIKDKDFLDNEENEDILEDIVLTLTLFEDREMIEERLKTYAHLFDDKVMKQLKRRRYTGWGRLSRKLINGIRDKQSGKTILDFLKSDGFANRNFMQLIHDDSLTFKEDIQKAQVSGQGDSLHEHIANLAGSPAIKKGILQTVKVVDELVKVMGRHKPENIVIEMARENQTTQKGQKNSRERMKRIEEGIKELGSQILKEHPVENTQLQNEKLYLYYLQNGRDMYVDQELDINRLSDYDVDHIVPQSFLKDDSIDNKVLTRSDKARGKSDNVPSEEVVKKMKNYWRQLLNAKLITQRKFDNLTKAERGGLSELDKAGFIKRQLVETRQITKHVAQILDSRMNTKYDENDKLIREVKVITLKSKLVSDFRKDFQFYKVREINNYHHAHDAYLNAVVGTALIKKYPKLESEFVYGDYKVYDVRKMIAKSEQEIGKATAKYFFYSNIMNFFKTEITLANGEIRKRPLIETNGETGEIVWDKGRDFATVRKVLSMPQVNIVKKTEVQTGGFSKESILPKRNSDKLIARKKDWDPKKYGGFDSPTVAYSVLVVAKVEKGKSKKLKSVKELLGITIMERSSFEKNPIDFLEAKGYKEVKKDLIIKLPKYSLFELENGRKRMLASAGELQKGNELALPSKYVNFLYLASHYEKLKGSPEDNEQKQLFVEQHKHYLDEIIEQISEFSKRVILADANLDKVLSAYNKHRDKPIREQAENIIHLFTLTNLGAPAAFKYFDTTIDRKRYTSTKEVLDATLIHQSITGLYETRIDLSQLGGDGGGGSEAAAKGGGGGTLNIEDEYRLHETSKEPDVPLGSTWLSDFPQAWAETGGMGLAVRQAPLIIPLKATSTPVSIKQYPMSQEARLGIKPHIQRLLDQGILVPCQSPWNTPLLPVKKPGTNDYRPVQDLREVNKRVEDIHPTVPNPYNLLSGLPPSHQWYTVLDLKDAFFCLRLHPTSQPLFAFEWRDPEMGISGQLTWTRLPQGFKNSPTLFNEALHRDLADFRIQHPDLILLQYVDDLLLAATSEQDCQRGTRALLQTLGNLGYRASAKKAQICQKQVKYLGYLLKEGQRWLTEARKETVMGQPTPKTPRQLREFLGKAGFCRLFIPGFAEMAAPLYPLTKPGTLFNWGPDQQKAYQEIKQALLTAPALGLPDLTKPFELFVDEKQGYAKGVLTQKLGPWRRPVAYLSKKLDPVAAGWPPCLRMVAAIAVLTKDAGKLTMGQPLVILAPHAVEALVKQPPDRWLSNARMTHYQAMLLDTDRVQFGPVVALNPATLLPLPEKEAPHDCLEILAETHGTRPDLTDQPIPDADYTWYTDGSSFLQEGQRRAGAAVTTETEVIWARALPAGTSAQRAELIALTQALKMAEGKKLNVYTDSRYAFATAHVHGEIYRRRGWLTSEGREIKNKNEILALLKALFLPKRLSIIHCPGHQKGNSAEARGNRMADQAAREAAMKAVLETSTLLAGKRTADGSEFEKRTADGSEFESPKKKAKVE

SEQ ID NO: 1082 - protein, 2094 aa, synthetic construct
MPAAKRVKLDGGDKKYSIGLDIGTNSVGWAVITDEYKVPSKKFKVLGNTDRHSIKKNLIGALLFDSGETAEATRLKRTARRRYTRRKNRICYLQEIFSNEMAKVDDSFFHRLEESFLVEEDKKHERHPIFGNIVDEVAYHEKYPTIYHLRKKLVDSTDKADLRLIYLALAHMIKFRGHFLIEGDLNPDNSDVDKLFIQLVQTYNQLFEENPINASGVDAKAILSARLSKSRRLENLIAQLPGEKKNGLFGNLIALSLGLTPNFKSNFDLAEDAKLQLSKDTYDDDLDNLLAQIGDQYADLFLAAKNLSDAILLSDILRVNTEITKAPLSASMIKRYDEHHQDLTLLKALVRQQLPEKYKEIFFDQSKNGYAGYIDGGASQEEFYKFIKPILEKMDGTEELLVKLNREDLLRKQRTFDNGSIPHQIHLGELHAILRRQEDFYPFLKDNREKIEKILTFRIPYYVGPLARGNSRFAWMTRKSEETITPWNFEEVVDKGASAQSFIERMTNFDKNLPNEKVLPKHSLLYEYFTVYNELTKVKYVTEGMRKPAFLSGEQKKAIVDLLFKTNRKVTVKQLKEDYFKKIECFDSVEISGVEDRFNASLGTYHDLLKIIKDKDFLDNEENEDILEDIVLTLTLFEDREMIEERLKTYAHLFDDKVMKQLKRRRYTGWGRLSRKLINGIRDKQSGKTILDFLKSDGFANRNFMQLIHDDSLTFKEDIQKAQVSGQGDSLHEHIANLAGSPAIKKGILQTVKVVDELVKVMGRHKPENIVIEMARENQTTQKGQKNSRERMKRIEEGIKELGSQILKEHPVENTQLQNEKLYLYYLQNGRDMYVDQELDINRLSDYDVDHIVPQSFLKDDSIDNKVLTRSDKARGKSDNVPSEEVVKKMKNYWRQLLNAKLITQRKFDNLTKAERGGLSELDKAGFIKRQLVETRQITKHVAQILDSRMNTKYDENDKLIREVKVITLKSKLVSDFRKDFQFYKVREINNYHHAHDAYLNAVVGTALIKKYPKLESEFVYGDYKVYDVRKMIAKSEQEIGKATAKYFFYSNIMNFFKTEITLANGEIRKRPLIETNGETGEIVWDKGRDFATVRKVLSMPQVNIVKKTEVQTGGFSKESILPKRNSDKLIARKKDWDPKKYGGFDSPTVAYSVLVVAKVEKGKSKKLKSVKELLGITIMERSSFEKNPIDFLEAKGYKEVKKDLIIKLPKYSLFELENGRKRMLASAGELQKGNELALPSKYVNFLYLASHYEKLKGSPEDNEQKQLFVEQHKHYLDEIIEQISEFSKRVILADANLDKVLSAYNKHRDKPIREQAENIIHLFTLTNLGAPAAFKYFDTTIDRKRYTSTKEVLDATLIHQSITGLYETRIDLSQLGGDGGGSSGGSGGGGGTLNIEDEYRLHETSKEPDVPLGSTWLSDFPQAWAETGGMGLAVRQAPLIIPLKATSTPVSIKQYPMSQEARLGIKPHIQRLLDQGILVPCQSPWNTPLLPVKKPGTNDYRPVQDLREVNKRVEDIHPTVPNPYNLLSGLPPSHQWYTVLDLKDAFFCLRLHPTSQPLFAFEWRDPEMGISGQLTWTRLPQGFKNSPTLFNEALHRDLADFRIQHPDLILLQYVDDLLLAATSEQDCQRGTRALLQTLGNLGYRASAKKAQICQKQVKYLGYLLKEGQRWLTEARKETVMGQPTPKTPRQLREFLGKAGFCRLFIPGFAEMAAPLYPLTKPGTLFNWGPDQQKAYQEIKQALLTAPALGLPDLTKPFELFVDEKQGYAKGVLTQKLGPWRRPVAYLSKKLDPVAAGWPPCLRMVAAIAVLTKDAGKLTMGQPLVILAPHAVEALVKQPPDRWLSNARMTHYQAMLLDTDRVQFGPVVALNPATLLPLPEKEAPHDCLEILAETHGTRPDLTDQPIPDADYTWYTDGSSFLQEGQRRAGAAVTTETEVIWARALPAGTSAQRAELIALTQALKMAEGKKLNVYTDSRYAFATAHVHGEIYRRRGWLTSEGREIKNKNEILALLKALFLPKRLSIIHCPGHQKGNSAEARGNRMADQAAREAAMKAVLETSTLLAGKRTADGSEFEKRTADGSEFESPKKKAKVE

SEQ ID NO: 1083 - protein, 2093 aa, synthetic construct
MPAAKRVKLDGGDKKYSIGLDIGTNSVGWAVITDEYKVPSKKFKVLGNTDRHSIKKNLIGALLFDSGETAEATRLKRTARRRYTRRKNRICYLQEIFSNEMAKVDDSFFHRLEESFLVEEDKKHERHPIFGNIVDEVAYHEKYPTIYHLRKKLVDSTDKADLRLIYLALAHMIKFRGHFLIEGDLNPDNSDVDKLFIQLVQTYNQLFEENPINASGVDAKAILSARLSKSRRLENLIAQLPGEKKNGLFGNLIALSLGLTPNFKSNFDLAEDAKLQLSKDTYDDDLDNLLAQIGDQYADLFLAAKNLSDAILLSDILRVNTEITKAPLSASMIKRYDEHHQDLTLLKALVRQQLPEKYKEIFFDQSKNGYAGYIDGGASQEEFYKFIKPILEKMDGTEELLVKLNREDLLRKQRTFDNGSIPHQIHLGELHAILRRQEDFYPFLKDNREKIEKILTFRIPYYVGPLARGNSRFAWMTRKSEETITPWNFEEVVDKGASAQSFIERMTNFDKNLPNEKVLPKHSLLYEYFTVYNELTKVKYVTEGMRKPAFLSGEQKKAIVDLLFKTNRKVTVKQLKEDYFKKIECFDSVEISGVEDRFNASLGTYHDLLKIIKDKDFLDNEENEDILEDIVLTLTLFEDREMIEERLKTYAHLFDDKVMKQLKRRRYTGWGRLSRKLINGIRDKQSGKTILDFLKSDGFANRNFMQLIHDDSLTFKEDIQKAQVSGQGDSLHEHIANLAGSPAIKKGILQTVKVVDELVKVMGRHKPENIVIEMARENQTTQKGQKNSRERMKRIEEGIKELGSQILKEHPVENTQLQNEKLYLYYLQNGRDMYVDQELDINRLSDYDVDHIVPQSFLKDDSIDNKVLTRSDKARGKSDNVPSEEVVKKMKNYWRQLLNAKLITQRKFDNLTKAERGGLSELDKAGFIKRQLVETRQITKHVAQILDSRMNTKYDENDKLIREVKVITLKSKLVSDFRKDFQFYKVREINNYHHAHDAYLNAVVGTALIKKYPKLESEFVYGDYKVYDVRKMIAKSEQEIGKATAKYFFYSNIMNFFKTEITLANGEIRKRPLIETNGETGEIVWDKGRDFATVRKVLSMPQVNIVKKTEVQTGGFSKESILPKRNSDKLIARKKDWDPKKYGGFDSPTVAYSVLVVAKVEKGKSKKLKSVKELLGITIMERSSFEKNPIDFLEAKGYKEVKKDLIIKLPKYSLFELENGRKRMLASAGELQKGNELALPSKYVNFLYLASHYEKLKGSPEDNEQKQLFVEQHKHYLDEIIEQISEFSKRVILADANLDKVLSAYNKHRDKPIREQAENIIHLFTLTNLGAPAAFKYFDTTIDRKRYTSTKEVLDATLIHQSITGLYETRIDLSQLGGDGGGGSEAAAKGGTLNIEDEYRLHETSKEPDVPLGSTWLSDFPQAWAETGGMGLAVRQAPLIIPLKATSTPVSIKQYPMSQEARLGIKPHIQRLLDQGILVPCQSPWNTPLLPVKKPGTNDYRPVQDLREVNKRVEDIHPTVPNPYNLLSGLPPSHQWYTVLDLKDAFFCLRLHPTSQPLFAFEWRDPEMGISGQLTWTRLPQGFKNSPTLFNEALHRDLADFRIQHPDLILLQYVDDLLLAATSEQDCQRGTRALLQTLGNLGYRASAKKAQICQKQVKYLGYLLKEGQRWLTEARKETVMGQPTPKTPRQLREFLGKAGFCRLFIPGFAEMAAPLYPLTKPGTLFNWGPDQQKAYQEIKQALLTAPALGLPDLTKPFELFVDEKQGYAKGVLTQKLGPWRRPVAYLSKKLDPVAAGWPPCLRMVAAIAVLTKDAGKLTMGQPLVILAPHAVEALVKQPPDRWLSNARMTHYQAMLLDTDRVQFGPVVALNPATLLPLPEKEAPHDCLEILAETHGTRPDLTDQPIPDADYTWYTDGSSFLQEGQRRAGAAVTTETEVIWARALPAGTSAQRAELIALTQALKMAEGKKLNVYTDSRYAFATAHVHGEIYRRRGWLTSEGREIKNKNEILALLKALFLPKRLSIIHCPGHQKGNSAEARGNRMADQAAREAAMKAVLETSTLLAGKRTADGSEFEKRTADGSEFESPKKKAKVE

SEQ ID NO: 1084 - protein, 2094 aa, synthetic construct
MPAAKRVKLDGGDKKYSIGLDIGTNSVGWAVITDEYKVPSKKFKVLGNTDRHSIKKNLIGALLFDSGETAEATRLKRTARRRYTRRKNRICYLQEIFSNEMAKVDDSFFHRLEESFLVEEDKKHERHPIFGNIVDEVAYHEKYPTIYHLRKKLVDSTDKADLRLIYLALAHMIKFRGHFLIEGDLNPDNSDVDKLFIQLVQTYNQLFEENPINASGVDAKAILSARLSKSRRLENLIAQLPGEKKNGLFGNLIALSLGLTPNFKSNFDLAEDAKLQLSKDTYDDDLDNLLAQIGDQYADLFLAAKNLSDAILLSDILRVNTEITKAPLSASMIKRYDEHHQDLTLLKALVRQQLPEKYKEIFFDQSKNGYAGYIDGGASQEEFYKFIKPILEKMDGTEELLVKLNREDLLRKQRTFDNGSIPHQIHLGELHAILRRQEDFYPFLKDNREKIEKILTFRIPYYVGPLARGNSRFAWMTRKSEETITPWNFEEVVDKGASAQSFIERMTNFDKNLPNEKVLPKHSLLYEYFTVYNELTKVKYVTEGMRKPAFLSGEQKKAIVDLLFKTNRKVTVKQLKEDYFKKIECFDSVEISGVEDRFNASLGTYHDLLKIIKDKDFLDNEENEDILEDIVLTLTLFEDREMIEERLKTYAHLFDDKVMKQLKRRRYTGWGRLSRKLINGIRDKQSGKTILDFLKSDGFANRNFMQLIHDDSLTFKEDIQKAQVSGQGDSLHEHIANLAGSPAIKKGILQTVKVVDELVKVMGRHKPENIVIEMARENQTTQKGQKNSRERMKRIEEGIKELGSQILKEHPVENTQLQNEKLYLYYLQNGRDMYVDQELDINRLSDYDVDHIVPQSFLKDDSIDNKVLTRSDKARGKSDNVPSEEVVKKMKNYWRQLLNAKLITQRKFDNLTKAERGGLSELDKAGFIKRQLVETRQITKHVAQILDSRMNTKYDENDKLIREVKVITLKSKLVSDFRKDFQFYKVREINNYHHAHDAYLNAVVGTALIKKYPKLESEFVYGDYKVYDVRKMIAKSEQEIGKATAKYFFYSNIMNFFKTEITLANGEIRKRPLIETNGETGEIVWDKGRDFATVRKVLSMPQVNIVKKTEVQTGGFSKESILPKRNSDKLIARKKDWDPKKYGGFDSPTVAYSVLVVAKVEKGKSKKLKSVKELLGITIMERSSFEKNPIDFLEAKGYKEVKKDLIIKLPKYSLFELENGRKRMLASAGELQKGNELALPSKYVNFLYLASHYEKLKGSPEDNEQKQLFVEQHKHYLDEIIEQISEFSKRVILADANLDKVLSAYNKHRDKPIREQAENIIHLFTLTNLGAPAAFKYFDTTIDRKRYTSTKEVLDATLIHQSITGLYETRIDLSQLGGDGGGSSGGGPAPGGTLNIEDEYRLHETSKEPDVPLGSTWLSDFPQAWAETGGMGLAVRQAPLIIPLKATSTPVSIKQYPMSQEARLGIKPHIQRLLDQGILVPCQSPWNTPLLPVKKPGTNDYRPVQDLREVNKRVEDIHPTVPNPYNLLSGLPPSHQWYTVLDLKDAFFCLRLHPTSQPLFAFEWRDPEMGISGQLTWTRLPQGFKNSPTLFNEALHRDLADFRIQHPDLILLQYVDDLLLAATSEQDCQRGTRALLQTLGNLGYRASAKKAQICQKQVKYLGYLLKEGQRWLTEARKETVMGQPTPKTPRQLREFLGKAGFCRLFIPGFAEMAAPLYPLTKPGTLFNWGPDQQKAYQEIKQALLTAPALGLPDLTKPFELFVDEKQGYAKGVLTQKLGPWRRPVAYLSKKLDPVAAGWPPCLRMVAAIAVLTKDAGKLTMGQPLVILAPHAVEALVKQPPDRWLSNARMTHYQAMLLDTDRVQFGPVVALNPATLLPLPEKEAPHDCLEILAETHGTRPDLTDQPIPDADYTWYTDGSSFLQEGQRRAGAAVTTETEVIWARALPAGTSAQRAELIALTQALKMAEGKKLNVYTDSRYAFATAHVHGEIYRRRGWLTSEGREIKNKNEILALLKALFLPKRLSIIHCPGHQKGNSAEARGNRMADQAAREAAMKAVLETSTLLAGKRTADGSEFEKRTADGSEFESPKKKAKVE

SEQ ID NO: 1085 - protein, 2094 aa, synthetic construct
MPAAKRVKLDGGDKKYSIGLDIGTNSVGWAVITDEYKVPSKKFKVLGNTDRHSIKKNLIGALLFDSGETAEATRLKRTARRRYTRRKNRICYLQEIFSNEMAKVDDSFFHRLEESFLVEEDKKHERHPIFGNIVDEVAYHEKYPTIYHLRKKLVDSTDKADLRLIYLALAHMIKFRGHFLIEGDLNPDNSDVDKLFIQLVQTYNQLFEENPINASGVDAKAILSARLSKSRRLENLIAQLPGEKKNGLFGNLIALSLGLTPNFKSNFDLAEDAKLQLSKDTYDDDLDNLLAQIGDQYADLFLAAKNLSDAILLSDILRVNTEITKAPLSASMIKRYDEHHQDLTLLKALVRQQLPEKYKEIFFDQSKNGYAGYIDGGASQEEFYKFIKPILEKMDGTEELLVKLNREDLLRKQRTFDNGSIPHQIHLGELHAILRRQEDFYPFLKDNREKIEKILTFRIPYYVGPLARGNSRFAWMTRKSEETITPWNFEEVVDKGASAQSFIERMTNFDKNLPNEKVLPKHSLLYEYFTVYNELTKVKYVTEGMRKPAFLSGEQKKAIVDLLFKTNRKVTVKQLKEDYFKKIECFDSVEISGVEDRFNASLGTYHDLLKIIKDKDFLDNEENEDILEDIVLTLTLFEDREMIEERLKTYAHLFDDKVMKQLKRRRYTGWGRLSRKLINGIRDKQSGKTILDFLKSDGFANRNFMQLIHDDSLTFKEDIQKAQVSGQGDSLHEHIANLAGSPAIKKGILQTVKVVDELVKVMGRHKPENIVIEMARENQTTQKGQKNSRERMKRIEEGIKELGSQILKEHPVENTQLQNEKLYLYYLQNGRDMYVDQELDINRLSDYDVDHIVPQSFLKDDSIDNKVLTRSDKARGKSDNVPSEEVVKKMKNYWRQLLNAKLITQRKFDNLTKAERGGLSELDKAGFIKRQLVETRQITKHVAQILDSRMNTKYDENDKLIREVKVITLKSKLVSDFRKDFQFYKVREINNYHHAHDAYLNAVVGTALIKKYPKLESEFVYGDYKVYDVRKMIAKSEQEIGKATAKYFFYSNIMNFFKTEITLANGEIRKRPLIETNGETGEIVWDKGRDFATVRKVLSMPQVNIVKKTEVQTGGFSKESILPKRNSDKLIARKKDWDPKKYGGFDSPTVAYSVLVVAKVEKGKSKKLKSVKELLGITIMERSSFEKNPIDFLEAKGYKEVKKDLIIKLPKYSLFELENGRKRMLASAGELQKGNELALPSKYVNFLYLASHYEKLKGSPEDNEQKQLFVEQHKHYLDEIIEQISEFSKRVILADANLDKVLSAYNKHRDKPIREQAENIIHLFTLTNLGAPAAFKYFDTTIDRKRYTSTKEVLDATLIHQSITGLYETRIDLSQLGGDGGGGSGGGPAPGGTLNIEDEYRLHETSKEPDVPLGSTWLSDFPQAWAETGGMGLAVRQAPLIIPLKATSTPVSIKQYPMSQEARLGIKPHIQRLLDQGILVPCQSPWNTPLLPVKKPGTNDYRPVQDLREVNKRVEDIHPTVPNPYNLLSGLPPSHQWYTVLDLKDAFFCLRLHPTSQPLFAFEWRDPEMGISGQLTWTRLPQGFKNSPTLFNEALHRDLADFRIQHPDLILLQYVDDLLLAATSEQDCQRGTRALLQTLGNLGYRASAKKAQICQKQVKYLGYLLKEGQRWLTEARKETVMGQPTPKTPRQLREFLGKAGFCRLFIPGFAEMAAPLYPLTKPGTLFNWGPDQQKAYQEIKQALLTAPALGLPDLTKPFELFVDEKQGYAKGVLTQKLGPWRRPVAYLSKKLDPVAAGWPPCLRMVAAIAVLTKDAGKLTMGQPLVILAPHAVEALVKQPPDRWLSNARMTHYQAMLLDTDRVQFGPVVALNPATLLPLPEKEAPHDCLEILAETHGTRPDLTDQPIPDADYTWYTDGSSFLQEGQRRAGAAVTTETEVIWARALPAGTSAQRAELIALTQALKMAEGKKLNVYTDSRYAFATAHVHGEIYRRRGWLTSEGREIKNKNEILALLKALFLPKRLSIIHCPGHQKGNSAEARGNRMADQAAREAAMKAVLETSTLLAGKRTADGSEFEKRTADGSEFESPKKKAKVE

SEQ ID NO: 1086 - protein, 2091 aa, synthetic construct
MPAAKRVKLDGGDKKYSIGLDIGTNSVGWAVITDEYKVPSKKFKVLGNTDRHSIKKNLIGALLFDSGETAEATRLKRTARRRYTRRKNRICYLQEIFSNEMAKVDDSFFHRLEESFLVEEDKKHERHPIFGNIVDEVAYHEKYPTIYHLRKKLVDSTDKADLRLIYLALAHMIKFRGHFLIEGDLNPDNSDVDKLFIQLVQTYNQLFEENPINASGVDAKAILSARLSKSRRLENLIAQLPGEKKNGLFGNLIALSLGLTPNFKSNFDLAEDAKLQLSKDTYDDDLDNLLAQIGDQYADLFLAAKNLSDAILLSDILRVNTEITKAPLSASMIKRYDEHHQDLTLLKALVRQQLPEKYKEIFFDQSKNGYAGYIDGGASQEEFYKFIKPILEKMDGTEELLVKLNREDLLRKQRTFDNGSIPHQIHLGELHAILRRQEDFYPFLKDNREKIEKILTFRIPYYVGPLARGNSRFAWMTRKSEETITPWNFEEVVDKGASAQSFIERMTNFDKNLPNEKVLPKHSLLYEYFTVYNELTKVKYVTEGMRKPAFLSGEQKKAIVDLLFKTNRKVTVKQLKEDYFKKIECFDSVEISGVEDRFNASLGTYHDLLKIIKDKDFLDNEENEDILEDIVLTLTLFEDREMIEERLKTYAHLFDDKVMKQLKRRRYTGWGRLSRKLINGIRDKQSGKTILDFLKSDGFANRNFMQLIHDDSLTFKEDIQKAQVSGQGDSLHEHIANLAGSPAIKKGILQTVKVVDELVKVMGRHKPENIVIEMARENQTTQKGQKNSRERMKRIEEGIKELGSQILKEHPVENTQLQNEKLYLYYLQNGRDMYVDQELDINRLSDYDVDHIVPQSFLKDDSIDNKVLTRSDKARGKSDNVPSEEVVKKMKNYWRQLLNAKLITQRKFDNLTKAERGGLSELDKAGFIKRQLVETRQITKHVAQILDSRMNTKYDENDKLIREVKVITLKSKLVSDFRKDFQFYKVREINNYHHAHDAYLNAVVGTALIKKYPKLESEFVYGDYKVYDVRKMIAKSEQEIGKATAKYFFYSNIMNFFKTEITLANGEIRKRPLIETNGETGEIVWDKGRDFATVRKVLSMPQVNIVKKTEVQTGGFSKESILPKRNSDKLIARKKDWDPKKYGGFDSPTVAYSVLVVAKVEKGKSKKLKSVKELLGITIMERSSFEKNPIDFLEAKGYKEVKKDLIIKLPKYSLFELENGRKRMLASAGELQKGNELALPSKYVNFLYLASHYEKLKGSPEDNEQKQLFVEQHKHYLDEIIEQISEFSKRVILADANLDKVLSAYNKHRDKPIREQAENIIHLFTLTNLGAPAAFKYFDTTIDRKRYTSTKEVLDATLIHQSITGLYETRIDLSQLGGDGGGSSPAPGGTLNIEDEYRLHETSKEPDVPLGSTWLSDFPQAWAETGGMGLAVRQAPLIIPLKATSTPVSIKQYPMSQEARLGIKPHIQRLLDQGILVPCQSPWNTPLLPVKKPGTNDYRPVQDLREVNKRVEDIHPTVPNPYNLLSGLPPSHQWYTVLDLKDAFFCLRLHPTSQPLFAFEWRDPEMGISGQLTWTRLPQGFKNSPTLFNEALHRDLADFRIQHPDLILLQYVDDLLLAATSEQDCQRGTRALLQTLGNLGYRASAKKAQICQKQVKYLGYLLKEGQRWLTEARKETVMGQPTPKTPRQLREFLGKAGFCRLFIPGFAEMAAPLYPLTKPGTLFNWGPDQQKAYQEIKQALLTAPALGLPDLTKPFELFVDEKQGYAKGVLTQKLGPWRRPVAYLSKKLDPVAAGWPPCLRMVAAIAVLTKDAGKLTMGQPLVILAPHAVEALVKQPPDRWLSNARMTHYQAMLLDTDRVQFGPVVALNPATLLPLPEKEAPHDCLEILAETHGTRPDLTDQPIPDADYTWYTDGSSFLQEGQRRAGAAVTTETEVIWARALPAGTSAQRAELIALTQALKMAEGKKLNVYTDSRYAFATAHVHGEIYRRRGWLTSEGREIKNKNEILALLKALFLPKRLSIIHCPGHQKGNSAEARGNRMADQAAREAAMKAVLETSTLLAGKRTADGSEFEKRTADGSEFESPKKKAKVE

SEQ ID NO: 1087 - protein, 2094 aa, synthetic construct
MPAAKRVKLDGGDKKYSIGLDIGTNSVGWAVITDEYKVPSKKFKVLGNTDRHSIKKNLIGALLFDSGETAEATRLKRTARRRYTRRKNRICYLQEIFSNEMAKVDDSFFHRLEESFLVEEDKKHERHPIFGNIVDEVAYHEKYPTIYHLRKKLVDSTDKADLRLIYLALAHMIKFRGHFLIEGDLNPDNSDVDKLFIQLVQTYNQLFEENPINASGVDAKAILSARLSKSRRLENLIAQLPGEKKNGLFGNLIALSLGLTPNFKSNFDLAEDAKLQLSKDTYDDDLDNLLAQIGDQYADLFLAAKNLSDAILLSDILRVNTEITKAPLSASMIKRYDEHHQDLTLLKALVRQQLPEKYKEIFFDQSKNGYAGYIDGGASQEEFYKFIKPILEKMDGTEELLVKLNREDLLRKQRTFDNGSIPHQIHLGELHAILRRQEDFYPFLKDNREKIEKILTFRIPYYVGPLARGNSRFAWMTRKSEETITPWNFEEVVDKGASAQSFIERMTNFDKNLPNEKVLPKHSLLYEYFTVYNELTKVKYVTEGMRKPAFLSGEQKKAIVDLLFKTNRKVTVKQLKEDYFKKIECFDSVEISGVEDRFNASLGTYHDLLKIIKDKDFLDNEENEDILEDIVLTLTLFEDREMIEERLKTYAHLFDDKVMKQLKRRRYTGWGRLSRKLINGIRDKQSGKTILDFLKSDGFANRNFMQLIHDDSLTFKEDIQKAQVSGQGDSLHEHIANLAGSPAIKKGILQTVKVVDELVKVMGRHKPENIVIEMARENQTTQKGQKNSRERMKRIEEGIKELGSQILKEHPVENTQLQNEKLYLYYLQNGRDMYVDQELDINRLSDYDVDHIVPQSFLKDDSIDNKVLTRSDKARGKSDNVPSEEVVKKMKNYWRQLLNAKLITQRKFDNLTKAERGGLSELDKAGFIKRQLVETRQITKHVAQILDSRMNTKYDENDKLIREVKVITLKSKLVSDFRKDFQFYKVREINNYHHAHDAYLNAVVGTALIKKYPKLESEFVYGDYKVYDVRKMIAKSEQEIGKATAKYFFYSNIMNFFKTEITLANGEIRKRPLIETNGETGEIVWDKGRDFATVRKVLSMPQVNIVKKTEVQTGGFSKESILPKRNSDKLIARKKDWDPKKYGGFDSPTVAYSVLVVAKVEKGKSKKLKSVKELLGITIMERSSFEKNPIDFLEAKGYKEVKKDLIIKLPKYSLFELENGRKRMLASAGELQKGNELALPSKYVNFLYLASHYEKLKGSPEDNEQKQLFVEQHKHYLDEIIEQISEFSKRVILADANLDKVLSAYNKHRDKPIREQAENIIHLFTLTNLGAPAAFKYFDTTIDRKRYTSTKEVLDATLIHQSITGLYETRIDLSQLGGDGGGGGGSSGGSGGTLNIEDEYRLHETSKEPDVPLGSTWLSDFPQAWAETGGMGLAVRQAPLIIPLKATSTPVSIKQYPMSQEARLGIKPHIQRLLDQGILVPCQSPWNTPLLPVKKPGTNDYRPVQDLREVNKRVEDIHPTVPNPYNLLSGLPPSHQWYTVLDLKDAFFCLRLHPTSQPLFAFEWRDPEMGISGQLTWTRLPQGFKNSPTLFNEALHRDLADFRIQHPDLILLQYVDDLLLAATSEQDCQRGTRALLQTLGNLGYRASAKKAQICQKQVKYLGYLLKEGQRWLTEARKETVMGQPTPKTPRQLREFLGKAGFCRLFIPGFAEMAAPLYPLTKPGTLFNWGPDQQKAYQEIKQALLTAPALGLPDLTKPFELFVDEKQGYAKGVLTQKLGPWRRPVAYLSKKLDPVAAGWPPCLRMVAAIAVLTKDAGKLTMGQPLVILAPHAVEALVKQPPDRWLSNARMTHYQAMLLDTDRVQFGPVVALNPATLLPLPEKEAPHDCLEILAETHGTRPDLTDQPIPDADYTWYTDGSSFLQEGQRRAGAAVTTETEVIWARALPAGTSAQRAELIALTQALKMAEGKKLNVYTDSRYAFATAHVHGEIYRRRGWLTSEGREIKNKNEILALLKALFLPKRLSIIHCPGHQKGNSAEARGNRMADQAAREAAMKAVLETSTLLAGKRTADGSEFEKRTADGSEFESPKKKAKVE

SEQ ID NO: 1088 - protein, 2096 aa, synthetic construct
MPAAKRVKLDGGDKKYSIGLDIGTNSVGWAVITDEYKVPSKKFKVLGNTDRHSIKKNLIGALLFDSGETAEATRLKRTARRRYTRRKNRICYLQEIFSNEMAKVDDSFFHRLEESFLVEEDKKHERHPIFGNIVDEVAYHEKYPTIYHLRKKLVDSTDKADLRLIYLALAHMIKFRGHFLIEGDLNPDNSDVDKLFIQLVQTYNQLFEENPINASGVDAKAILSARLSKSRRLENLIAQLPGEKKNGLFGNLIALSLGLTPNFKSNFDLAEDAKLQLSKDTYDDDLDNLLAQIGDQYADLFLAAKNLSDAILLSDILRVNTEITKAPLSASMIKRYDEHHQDLTLLKALVRQQLPEKYKEIFFDQSKNGYAGYIDGGASQEEFYKFIKPILEKMDGTEELLVKLNREDLLRKQRTFDNGSIPHQIHLGELHAILRRQEDFYPFLKDNREKIEKILTFRIPYYVGPLARGNSRFAWMTRKSEETITPWNFEEVVDKGASAQSFIERMTNFDKNLPNEKVLPKHSLLYEYFTVYNELTKVKYVTEGMRKPAFLSGEQKKAIVDLLFKTNRKVTVKQLKEDYFKKIECFDSVEISGVEDRFNASLGTYHDLLKIIKDKDFLDNEENEDILEDIVLTLTLFEDREMIEERLKTYAHLFDDKVMKQLKRRRYTGWGRLSRKLINGIRDKQSGKTILDFLKSDGFANRNFMQLIHDDSLTFKEDIQKAQVSGQGDSLHEHIANLAGSPAIKKGILQTVKVVDELVKVMGRHKPENIVIEMARENQTTQKGQKNSRERMKRIEEGIKELGSQILKEHPVENTQLQNEKLYLYYLQNGRDMYVDQELDINRLSDYDVDHIVPQSFLKDDSIDNKVLTRSDKARGKSDNVPSEEVVKKMKNYWRQLLNAKLITQRKFDNLTKAERGGLSELDKAGFIKRQLVETRQITKHVAQILDSRMNTKYDENDKLIREVKVITLKSKLVSDFRKDFQFYKVREINNYHHAHDAYLNAVVGTALIKKYPKLESEFVYGDYKVYDVRKMIAKSEQEIGKATAKYFFYSNIMNFFKTEITLANGEIRKRPLIETNGETGEIVWDKGRDFATVRKVLSMPQVNIVKKTEVQTGGFSKESILPKRNSDKLIARKKDWDPKKYGGFDSPTVAYSVLVVAKVEKGKSKKLKSVKELLGITIMERSSFEKNPIDFLEAKGYKEVKKDLIIKLPKYSLFELENGRKRMLASAGELQKGNELALPSKYVNFLYLASHYEKLKGSPEDNEQKQLFVEQHKHYLDEIIEQISEFSKRVILADANLDKVLSAYNKHRDKPIREQAENIIHLFTLTNLGAPAAFKYFDTTIDRKRYTSTKEVLDATLIHQSITGLYETRIDLSQLGGDGGGGGEAAAKGSSGGTLNIEDEYRLHETSKEPDVPLGSTWLSDFPQAWAETGGMGLAVRQAPLIIPLKATSTPVSIKQYPMSQEARLGIKPHIQRLLDQGILVPCQSPWNTPLLPVKKPGTNDYRPVQDLREVNKRVEDIHPTVPNPYNLLSGLPPSHQWYTVLDLKDAFFCLRLHPTSQPLFAFEWRDPEMGISGQLTWTRLPQGFKNSPTLFNEALHRDLADFRIQHPDLILLQYVDDLLLAATSEQDCQRGTRALLQTLGNLGYRASAKKAQICQKQVKYLGYLLKEGQRWLTEARKETVMGQPTPKTPRQLREFLGKAGFCRLFIPGFAEMAAPLYPLTKPGTLFNWGPDQQKAYQEIKQALLTAPALGLPDLTKPFELFVDEKQGYAKGVLTQKLGPWRRPVAYLSKKLDPVAAGWPPCLRMVAAIAVLTKDAGKLTMGQPLVILAPHAVEALVKQPPDRWLSNARMTHYQAMLLDTDRVQFGPVVALNPATLLPLPEKEAPHDCLEILAETHGTRPDLTDQPIPDADYTWYTDGSSFLQEGQRRAGAAVTTETEVIWARALPAGTSAQRAELIALTQALKMAEGKKLNVYTDSRYAFATAHVHGEIYRRRGWLTSEGREIKNKNEILALLKALFLPKRLSIIHCPGHQKGNSAEARGNRMADQAAREAAMKAVLETSTLLAGKRTADGSEFEKRTADGSEFESPKKKAKVE

SEQ ID NO: 1089 - protein, 2094 aa, synthetic construct
MPAAKRVKLDGGDKKYSIGLDIGTNSVGWAVITDEYKVPSKKFKVLGNTDRHSIKKNLIGALLFDSGETAEATRLKRTARRRYTRRKNRICYLQEIFSNEMAKVDDSFFHRLEESFLVEEDKKHERHPIFGNIVDEVAYHEKYPTIYHLRKKLVDSTDKADLRLIYLALAHMIKFRGHFLIEGDLNPDNSDVDKLFIQLVQTYNQLFEENPINASGVDAKAILSARLSKSRRLENLIAQLPGEKKNGLFGNLIALSLGLTPNFKSNFDLAEDAKLQLSKDTYDDDLDNLLAQIGDQYADLFLAAKNLSDAILLSDILRVNTEITKAPLSASMIKRYDEHHQDLTLLKALVRQQLPEKYKEIFFDQSKNGYAGYIDGGASQEEFYKFIKPILEKMDGTEELLVKLNREDLLRKQRTFDNGSIPHQIHLGELHAILRRQEDFYPFLKDNREKIEKILTFRIPYYVGPLARGNSRFAWMTRKSEETITPWNFEEVVDKGASAQSFIERMTNFDKNLPNEKVLPKHSLLYEYFTVYNELTKVKYVTEGMRKPAFLSGEQKKAIVDLLFKTNRKVTVKQLKEDYFKKIECFDSVEISGVEDRFNASLGTYHDLLKIIKDKDFLDNEENEDILEDIVLTLTLFEDREMIEERLKTYAHLFDDKVMKQLKRRRYTGWGRLSRKLINGIRDKQSGKTILDFLKSDGFANRNFMQLIHDDSLTFKEDIQKAQVSGQGDSLHEHIANLAGSPAIKKGILQTVKVVDELVKVMGRHKPENIVIEMARENQTTQKGQKNSRERMKRIEEGIKELGSQILKEHPVENTQLQNEKLYLYYLQNGRDMYVDQELDINRLSDYDVDHIVPQSFLKDDSIDNKVLTRSDKARGKSDNVPSEEVVKKMKNYWRQLLNAKLITQRKFDNLTKAERGGLSELDKAGFIKRQLVETRQITKHVAQILDSRMNTKYDENDKLIREVKVITLKSKLVSDFRKDFQFYKVREINNYHHAHDAYLNAVVGTALIKKYPKLESEFVYGDYKVYDVRKMIAKSEQEIGKATAKYFFYSNIMNFFKTEITLANGEIRKRPLIETNGETGEIVWDKGRDFATVRKVLSMPQVNIVKKTEVQTGGFSKESILPKRNSDKLIARKKDWDPKKYGGFDSPTVAYSVLVVAKVEKGKSKKLKSVKELLGITIMERSSFEKNPIDFLEAKGYKEVKKDLIIKLPKYSLFELENGRKRMLASAGELQKGNELALPSKYVNFLYLASHYEKLKGSPEDNEQKQLFVEQHKHYLDEIIEQISEFSKRVILADANLDKVLSAYNKHRDKPIREQAENIIHLFTLTNLGAPAAFKYFDTTIDRKRYTSTKEVLDATLIHQSITGLYETRIDLSQLGGDGGGSSGSSGSSGGTLNIEDEYRLHETSKEPDVPLGSTWLSDFPQAWAETGGMGLAVRQAPLIIPLKATSTPVSIKQYPMSQEARLGIKPHIQRLLDQGILVPCQSPWNTPLLPVKKPGTNDYRPVQDLREVNKRVEDIHPTVPNPYNLLSGLPPSHQWYTVLDLKDAFFCLRLHPTSQPLFAFEWRDPEMGISGQLTWTRLPQGFKNSPTLFNEALHRDLADFRIQHPDLILLQYVDDLLLAATSEQDCQRGTRALLQTLGNLGYRASAKKAQICQKQVKYLGYLLKEGQRWLTEARKETVMGQPTPKTPRQLREFLGKAGFCRLFIPGFAEMAAPLYPLTKPGTLFNWGPDQQKAYQEIKQALLTAPALGLPDLTKPFELFVDEKQGYAKGVLTQKLGPWRRPVAYLSKKLDPVAAGWPPCLRMVAAIAVLTKDAGKLTMGQPLVILAPHAVEALVKQPPDRWLSNARMTHYQAMLLDTDRVQFGPVVALNPATLLPLPEKEAPHDCLEILAETHGTRPDLTDQPIPDADYTWYTDGSSFLQEGQRRAGAAVTTETEVIWARALPAGTSAQRAELIALTQALKMAEGKKLNVYTDSRYAFATAHVHGEIYRRRGWLTSEGREIKNKNEILALLKALFLPKRLSIIHCPGHQKGNSAEARGNRMADQAAREAAMKAVLETSTLLAGKRTADGSEFEKRTADGSEFESPKKKAKVE

SEQ ID NO: 1090 - protein, 2096 aa, synthetic construct
MPAAKRVKLDGGDKKYSIGLDIGTNSVGWAVITDEYKVPSKKFKVLGNTDRHSIKKNLIGALLFDSGETAEATRLKRTARRRYTRRKNRICYLQEIFSNEMAKVDDSFFHRLEESFLVEEDKKHERHPIFGNIVDEVAYHEKYPTIYHLRKKLVDSTDKADLRLIYLALAHMIKFRGHFLIEGDLNPDNSDVDKLFIQLVQTYNQLFEENPINASGVDAKAILSARLSKSRRLENLIAQLPGEKKNGLFGNLIALSLGLTPNFKSNFDLAEDAKLQLSKDTYDDDLDNLLAQIGDQYADLFLAAKNLSDAILLSDILRVNTEITKAPLSASMIKRYDEHHQDLTLLKALVRQQLPEKYKEIFFDQSKNGYAGYIDGGASQEEFYKFIKPILEKMDGTEELLVKLNREDLLRKQRTFDNGSIPHQIHLGELHAILRRQEDFYPFLKDNREKIEKILTFRIPYYVGPLARGNSRFAWMTRKSEETITPWNFEEVVDKGASAQSFIERMTNFDKNLPNEKVLPKHSLLYEYFTVYNELTKVKYVTEGMRKPAFLSGEQKKAIVDLLFKTNRKVTVKQLKEDYFKKIECFDSVEISGVEDRFNASLGTYHDLLKIIKDKDFLDNEENEDILEDIVLTLTLFEDREMIEERLKTYAHLFDDKVMKQLKRRRYTGWGRLSRKLINGIRDKQSGKTILDFLKSDGFANRNFMQLIHDDSLTFKEDIQKAQVSGQGDSLHEHIANLAGSPAIKKGILQTVKVVDELVKVMGRHKPENIVIEMARENQTTQKGQKNSRERMKRIEEGIKELGSQILKEHPVENTQLQNEKLYLYYLQNGRDMYVDQELDINRLSDYDVDHIVPQSFLKDDSIDNKVLTRSDKARGKSDNVPSEEVVKKMKNYWRQLLNAKLITQRKFDNLTKAERGGLSELDKAGFIKRQLVETRQITKHVAQILDSRMNTKYDENDKLIREVKVITLKSKLVSDFRKDFQFYKVREINNYHHAHDAYLNAVVGTALIKKYPKLESEFVYGDYKVYDVRKMIAKSEQEIGKATAKYFFYSNIMNFFKTEITLANGEIRKRPLIETNGETGEIVWDKGRDFATVRKVLSMPQVNIVKKTEVQTGGFSKESILPKRNSDKLIARKKDWDPKKYGGFDSPTVAYSVLVVAKVEKGKSKKLKSVKELLGITIMERSSFEKNPIDFLEAKGYKEVKKDLIIKLPKYSLFELENGRKRMLASAGELQKGNELALPSKYVNFLYLASHYEKLKGSPEDNEQKQLFVEQHKHYLDEIIEQISEFSKRVILADANLDKVLSAYNKHRDKPIREQAENIIHLFTLTNLGAPAAFKYFDTTIDRKRYTSTKEVLDATLIHQSITGLYETRIDLSQLGGDGGGGSPAPEAAAKGGTLNIEDEYRLHETSKEPDVPLGSTWLSDFPQAWAETGGMGLAVRQAPLIIPLKATSTPVSIKQYPMSQEARLGIKPHIQRLLDQGILVPCQSPWNTPLLPVKKPGTNDYRPVQDLREVNKRVEDIHPTVPNPYNLLSGLPPSHQWYTVLDLKDAFFCLRLHPTSQPLFAFEWRDPEMGISGQLTWTRLPQGFKNSPTLFNEALHRDLADFRIQHPDLILLQYVDDLLLAATSEQDCQRGTRALLQTLGNLGYRASAKKAQICQKQVKYLGYLLKEGQRWLTEARKETVMGQPTPKTPRQLREFLGKAGFCRLFIPGFAEMAAPLYPLTKPGTLFNWGPDQQKAYQEIKQALLTAPALGLPDLTKPFELFVDEKQGYAKGVLTQKLGPWRRPVAYLSKKLDPVAAGWPPCLRMVAAIAVLTKDAGKLTMGQPLVILAPHAVEALVKQPPDRWLSNARMTHYQAMLLDTDRVQFGPVVALNPATLLPLPEKEAPHDCLEILAETHGTRPDLTDQPIPDADYTWYTDGSSFLQEGQRRAGAAVTTETEVIWARALPAGTSAQRAELIALTQALKMAEGKKLNVYTDSRYAFATAHVHGEIYRRRGWLTSEGREIKNKNEILALLKALFLPKRLSIIHCPGHQKGNSAEARGNRMADQAAREAAMKAVLETSTLLAGKRTADGSEFEKRTADGSEFESPKKKAKVE

SEQ ID NO: 1091 - protein, 2096 aa, synthetic construct
MPAAKRVKLDGGDKKYSIGLDIGTNSVGWAVITDEYKVPSKKFKVLGNTDRHSIKKNLIGALLFDSGETAEATRLKRTARRRYTRRKNRICYLQEIFSNEMAKVDDSFFHRLEESFLVEEDKKHERHPIFGNIVDEVAYHEKYPTIYHLRKKLVDSTDKADLRLIYLALAHMIKFRGHFLIEGDLNPDNSDVDKLFIQLVQTYNQLFEENPINASGVDAKAILSARLSKSRRLENLIAQLPGEKKNGLFGNLIALSLGLTPNFKSNFDLAEDAKLQLSKDTYDDDLDNLLAQIGDQYADLFLAAKNLSDAILLSDILRVNTEITKAPLSASMIKRYDEHHQDLTLLKALVRQQLPEKYKEIFFDQSKNGYAGYIDGGASQEEFYKFIKPILEKMDGTEELLVKLNREDLLRKQRTFDNGSIPHQIHLGELHAILRRQEDFYPFLKDNREKIEKILTFRIPYYVGPLARGNSRFAWMTRKSEETITPWNFEEVVDKGASAQSFIERMTNFDKNLPNEKVLPKHSLLYEYFTVYNELTKVKYVTEGMRKPAFLSGEQKKAIVDLLFKTNRKVTVKQLKEDYFKKIECFDSVEISGVEDRFNASLGTYHDLLKIIKDKDFLDNEENEDILEDIVLTLTLFEDREMIEERLKTYAHLFDDKVMKQLKRRRYTGWGRLSRKLINGIRDKQSGKTILDFLKSDGFANRNFMQLIHDDSLTFKEDIQKAQVSGQGDSLHEHIANLAGSPAIKKGILQTVKVVDELVKVMGRHKPENIVIEMARENQTTQKGQKNSRERMKRIEEGIKELGSQILKEHPVENTQLQNEKLYLYYLQNGRDMYVDQELDINRLSDYDVDHIVPQSFLKDDSIDNKVLTRSDKARGKSDNVPSEEVVKKMKNYWRQLLNAKLITQRKFDNLTKAERGGLSELDKAGFIKRQLVETRQITKHVAQILDSRMNTKYDENDKLIREVKVITLKSKLVSDFRKDFQFYKVREINNYHHAHDAYLNAVVGTALIKKYPKLESEFVYGDYKVYDVRKMIAKSEQEIGKATAKYFFYSNIMNFFKTEITLANGEIRKRPLIETNGETGEIVWDKGRDFATVRKVLSMPQVNIVKKTEVQTGGFSKESILPKRNSDKLIARKKDWDPKKYGGFDSPTVAYSVLVVAKVEKGKSKKLKSVKELLGITIMERSSFEKNPIDFLEAKGYKEVKKDLIIKLPKYSLFELENGRKRMLASAGELQKGNELALPSKYVNFLYLASHYEKLKGSPEDNEQKQLFVEQHKHYLDEIIEQISEFSKRVILADANLDKVLSAYNKHRDKPIREQAENIIHLFTLTNLGAPAAFKYFDTTIDRKRYTSTKEVLDATLIHQSITGLYETRIDLSQLGGDGGEAAAKGGGGGSGGTLNIEDEYRLHETSKEPDVPLGSTWLSDFPQAWAETGGMGLAVRQAPLIIPLKATSTPVSIKQYPMSQEARLGIKPHIQRLLDQGILVPCQSPWNTPLLPVKKPGTNDYRPVQDLREVNKRVEDIHPTVPNPYNLLSGLPPSHQWYTVLDLKDAFFCLRLHPTSQPLFAFEWRDPEMGISGQLTWTRLPQGFKNSPTLFNEALHRDLADFRIQHPDLILLQYVDDLLLAATSEQDCQRGTRALLQTLGNLGYRASAKKAQICQKQVKYLGYLLKEGQRWLTEARKETVMGQPTPKTPRQLREFLGKAGFCRLFIPGFAEMAAPLYPLTKPGTLFNWGPDQQKAYQEIKQALLTAPALGLPDLTKPFELFVDEKQGYAKGVLTQKLGPWRRPVAYLSKKLDPVAAGWPPCLRMVAAIAVLTKDAGKLTMGQPLVILAPHAVEALVKQPPDRWLSNARMTHYQAMLLDTDRVQFGPVVALNPATLLPLPEKEAPHDCLEILAETHGTRPDLTDQPIPDADYTWYTDGSSFLQEGQRRAGAAVTTETEVIWARALPAGTSAQRAELIALTQALKMAEGKKLNVYTDSRYAFATAHVHGEIYRRRGWLTSEGREIKNKNEILALLKALFLPKRLSIIHCPGHQKGNSAEARGNRMADQAAREAAMKAVLETSTLLAGKRTADGSEFEKRTADGSEFESPKKKAKVE

SEQ ID NO: 1092 - protein, 2109 aa, synthetic construct
MPAAKRVKLDGGDKKYSIGLDIGTNSVGWAVITDEYKVPSKKFKVLGNTDRHSIKKNLIGALLFDSGETAEATRLKRTARRRYTRRKNRICYLQEIFSNEMAKVDDSFFHRLEESFLVEEDKKHERHPIFGNIVDEVAYHEKYPTIYHLRKKLVDSTDKADLRLIYLALAHMIKFRGHFLIEGDLNPDNSDVDKLFIQLVQTYNQLFEENPINASGVDAKAILSARLSKSRRLENLIAQLPGEKKNGLFGNLIALSLGLTPNFKSNFDLAEDAKLQLSKDTYDDDLDNLLAQIGDQYADLFLAAKNLSDAILLSDILRVNTEITKAPLSASMIKRYDEHHQDLTLLKALVRQQLPEKYKEIFFDQSKNGYAGYIDGGASQEEFYKFIKPILEKMDGTEELLVKLNREDLLRKQRTFDNGSIPHQIHLGELHAILRRQEDFYPFLKDNREKIEKILTFRIPYYVGPLARGNSRFAWMTRKSEETITPWNFEEVVDKGASAQSFIERMTNFDKNLPNEKVLPKHSLLYEYFTVYNELTKVKYVTEGMRKPAFLSGEQKKAIVDLLFKTNRKVTVKQLKEDYFKKIECFDSVEISGVEDRFNASLGTYHDLLKIIKDKDFLDNEENEDILEDIVLTLTLFEDREMIEERLKTYAHLFDDKVMKQLKRRRYTGWGRLSRKLINGIRDKQSGKTILDFLKSDGFANRNFMQLIHDDSLTFKEDIQKAQVSGQGDSLHEHIANLAGSPAIKKGILQTVKVVDELVKVMGRHKPENIVIEMARENQTTQKGQKNSRERMKRIEEGIKELGSQILKEHPVENTQLQNEKLYLYYLQNGRDMYVDQELDINRLSDYDVDHIVPQSFLKDDSIDNKVLTRSDKARGKSDNVPSEEVVKKMKNYWRQLLNAKLITQRKFDNLTKAERGGLSELDKAGFIKRQLVETRQITKHVAQILDSRMNTKYDENDKLIREVKVITLKSKLVSDFRKDFQFYKVREINNYHHAHDAYLNAVVGTALIKKYPKLESEFVYGDYKVYDVRKMIAKSEQEIGKATAKYFFYSNIMNFFKTEITLANGEIRKRPLIETNGETGEIVWDKGRDFATVRKVLSMPQVNIVKKTEVQTGGFSKESILPKRNSDKLIARKKDWDPKKYGGFDSPTVAYSVLVVAKVEKGKSKKLKSVKELLGITIMERSSFEKNPIDFLEAKGYKEVKKDLIIKLPKYSLFELENGRKRMLASAGELQKGNELALPSKYVNFLYLASHYEKLKGSPEDNEQKQLFVEQHKHYLDEIIEQISEFSKRVILADANLDKVLSAYNKHRDKPIREQAENIIHLFTLTNLGAPAAFKYFDTTIDRKRYTSTKEVLDATLIHQSITGLYETRIDLSQLGGDGGSGGSSGGSSGSETPGTSESATPESSGGSSGGSSGGVPWILKKPLELTIKLDLEEQQGTLLNNSILSKKGKEELKQLFEKYSALWQSWENQVGHRRIRPHKIATGTVKPTPQKQYHINPKAKPDIQIVINDLLKQGVLIQKESTMNTPVYPVPKPNGRWRMVLDYRAVNKVTPLIAVQNQHSYGILGSLFKGRYKTTIDLSNGFWAHPIVPEDYWITAFTWQGKQYCWTVLPQGFLNSPGLFNGDVVDLLQGIPNVEVYVDDVYISHDSEKEHLEYLDILFNRLKEAGYIISLKKSNIANSIVDFLGFQITNEGRGLTDTFKEKLENITAPTTLKQLQSILGLLNFARNFIPDFTELIAPLYALIPKSPKNYVPWQIEHSTTLETLITKLNGAEYLQGRKGDKTLIMKVNASYTTGYIRYYNEGEKKPISYVSIVFSKTELKFTELEKLLTTVHKGLLKALDLSMGQNIHVYSPIVSMQNIQKTPQTAKKALASRWLSWLSYLEDPRIRFFYDPQMPALKDLPAVDTGKDNKKHPSNFQHIFYTDGSAITSPTKEGHLNAGMGIVYFINKDGNLQKQQEWSISLGNHTAQFAEIAAFEFALKKCLPLGGNILVVTDSNYVAKAYNEELDVWASNGFVNNRKKPLKHISKWKSVADLKRLRPDVVVTHEPGHQKLDSSPHAYGNNLADQLATQASFKVHAGKRTADGSEFEKRTADGSEFESPKKKAKVE

SEQ ID NO: 1093 - protein, 2122 aa, synthetic construct
MPAAKRVKLDGGDKKYSIGLDIGTNSVGWAVITDEYKVPSKKFKVLGNTDRHSIKKNLIGALLFDSGETAEATRLKRTARRRYTRRKNRICYLQEIFSNEMAKVDDSFFHRLEESFLVEEDKKHERHPIFGNIVDEVAYHEKYPTIYHLRKKLVDSTDKADLRLIYLALAHMIKFRGHFLIEGDLNPDNSDVDKLFIQLVQTYNQLFEENPINASGVDAKAILSARLSKSRRLENLIAQLPGEKKNGLFGNLIALSLGLTPNFKSNFDLAEDAKLQLSKDTYDDDLDNLLAQIGDQYADLFLAAKNLSDAILLSDILRVNTEITKAPLSASMIKRYDEHHQDLTLLKALVRQQLPEKYKEIFFDQSKNGYAGYIDGGASQEEFYKFIKPILEKMDGTEELLVKLNREDLLRKQRTFDNGSIPHQIHLGELHAILRRQEDFYPFLKDNREKIEKILTFRIPYYVGPLARGNSRFAWMTRKSEETITPWNFEEVVDKGASAQSFIERMTNFDKNLPNEKVLPKHSLLYEYFTVYNELTKVKYVTEGMRKPAFLSGEQKKAIVDLLFKTNRKVTVKQLKEDYFKKIECFDSVEISGVEDRFNASLGTYHDLLKIIKDKDFLDNEENEDILEDIVLTLTLFEDREMIEERLKTYAHLFDDKVMKQLKRRRYTGWGRLSRKLINGIRDKQSGKTILDFLKSDGFANRNFMQLIHDDSLTFKEDIQKAQVSGQGDSLHEHIANLAGSPAIKKGILQTVKVVDELVKVMGRHKPENIVIEMARENQTTQKGQKNSRERMKRIEEGIKELGSQILKEHPVENTQLQNEKLYLYYLQNGRDMYVDQELDINRLSDYDVDHIVPQSFLKDDSIDNKVLTRSDKARGKSDNVPSEEVVKKMKNYWRQLLNAKLITQRKFDNLTKAERGGLSELDKAGFIKRQLVETRQITKHVAQILDSRMNTKYDENDKLIREVKVITLKSKLVSDFRKDFQFYKVREINNYHHAHDAYLNAVVGTALIKKYPKLESEFVYGDYKVYDVRKMIAKSEQEIGKATAKYFFYSNIMNFFKTEITLANGEIRKRPLIETNGETGEIVWDKGRDFATVRKVLSMPQVNIVKKTEVQTGGFSKESILPKRNSDKLIARKKDWDPKKYGGFDSPTVAYSVLVVAKVEKGKSKKLKSVKELLGITIMERSSFEKNPIDFLEAKGYKEVKKDLIIKLPKYSLFELENGRKRMLASAGELQKGNELALPSKYVNFLYLASHYEKLKGSPEDNEQKQLFVEQHKHYLDEIIEQISEFSKRVILADANLDKVLSAYNKHRDKPIREQAENIIHLFTLTNLGAPAAFKYFDTTIDRKRYTSTKEVLDATLIHQSITGLYETRIDLSQLGGDGGAEAAAKEAAAKEAAAKEAAAKALEAEAAAKEAAAKEAAAKEAAAKAGGVPWILKKPLELTIKLDLEEQQGTLLNNSILSKKGKEELKQLFEKYSALWQSWENQVGHRRIRPHKIATGTVKPTPQKQYHINPKAKPDIQIVINDLLKQGVLIQKESTMNTPVYPVPKPNGRWRMVLDYRAVNKVTPLIAVQNQHSYGILGSLFKGRYKTTIDLSNGFWAHPIVPEDYWITAFTWQGKQYCWTVLPQGFLNSPGLFNGDVVDLLQGIPNVEVYVDDVYISHDSEKEHLEYLDILFNRLKEAGYIISLKKSNIANSIVDFLGFQITNEGRGLTDTFKEKLENITAPTTLKQLQSILGLLNFARNFIPDFTELIAPLYALIPKSPKNYVPWQIEHSTTLETLITKLNGAEYLQGRKGDKTLIMKVNASYTTGYIRYYNEGEKKPISYVSIVFSKTELKFTELEKLLTTVHKGLLKALDLSMGQNIHVYSPIVSMQNIQKTPQTAKKALASRWLSWLSYLEDPRIRFFYDPQMPALKDLPAVDTGKDNKKHPSNFQHIFYTDGSAITSPTKEGHLNAGMGIVYFINKDGNLQKQQEWSISLGNHTAQFAEIAAFEFALKKCLPLGGNILVVTDSNYVAKAYNEELDVWASNGFVNNRKKPLKHISKWKSVADLKRLRPDVVVTHEPGHQKLDSSPHAYGNNLADQLATQASFKVHAGKRTADGSEFEKRTADGSEFESPKKKAKVE

SEQ ID NO: 1094 - protein, 2106 aa, synthetic construct
MPAAKRVKLDGGDKKYSIGLDIGTNSVGWAVITDEYKVPSKKFKVLGNTDRHSIKKNLIGALLFDSGETAEATRLKRTARRRYTRRKNRICYLQEIFSNEMAKVDDSFFHRLEESFLVEEDKKHERHPIFGNIVDEVAYHEKYPTIYHLRKKLVDSTDKADLRLIYLALAHMIKFRGHFLIEGDLNPDNSDVDKLFIQLVQTYNQLFEENPINASGVDAKAILSARLSKSRRLENLIAQLPGEKKNGLFGNLIALSLGLTPNFKSNFDLAEDAKLQLSKDTYDDDLDNLLAQIGDQYADLFLAAKNLSDAILLSDILRVNTEITKAPLSASMIKRYDEHHQDLTLLKALVRQQLPEKYKEIFFDQSKNGYAGYIDGGASQEEFYKFIKPILEKMDGTEELLVKLNREDLLRKQRTFDNGSIPHQIHLGELHAILRRQEDFYPFLKDNREKIEKILTFRIPYYVGPLARGNSRFAWMTRKSEETITPWNFEEVVDKGASAQSFIERMTNFDKNLPNEKVLPKHSLLYEYFTVYNELTKVKYVTEGMRKPAFLSGEQKKAIVDLLFKTNRKVTVKQLKEDYFKKIECFDSVEISGVEDRFNASLGTYHDLLKIIKDKDFLDNEENEDILEDIVLTLTLFEDREMIEERLKTYAHLFDDKVMKQLKRRRYTGWGRLSRKLINGIRDKQSGKTILDFLKSDGFANRNFMQLIHDDSLTFKEDIQKAQVSGQGDSLHEHIANLAGSPAIKKGILQTVKVVDELVKVMGRHKPENIVIEMARENQTTQKGQKNSRERMKRIEEGIKELGSQILKEHPVENTQLQNEKLYLYYLQNGRDMYVDQELDINRLSDYDVDHIVPQSFLKDDSIDNKVLTRSDKARGKSDNVPSEEVVKKMKNYWRQLLNAKLITQRKFDNLTKAERGGLSELDKAGFIKRQLVETRQITKHVAQILDSRMNTKYDENDKLIREVKVITLKSKLVSDFRKDFQFYKVREINNYHHAHDAYLNAVVGTALIKKYPKLESEFVYGDYKVYDVRKMIAKSEQEIGKATAKYFFYSNIMNFFKTEITLANGEIRKRPLIETNGETGEIVWDKGRDFATVRKVLSMPQVNIVKKTEVQTGGFSKESILPKRNSDKLIARKKDWDPKKYGGFDSPTVAYSVLVVAKVEKGKSKKLKSVKELLGITIMERSSFEKNPIDFLEAKGYKEVKKDLIIKLPKYSLFELENGRKRMLASAGELQKGNELALPSKYVNFLYLASHYEKLKGSPEDNEQKQLFVEQHKHYLDEIIEQISEFSKRVILADANLDKVLSAYNKHRDKPIREQAENIIHLFTLTNLGAPAAFKYFDTTIDRKRYTSTKEVLDATLIHQSITGLYETRIDLSQLGGDGGEAAAKEAAAKEAAAKEAAAKEAAAKEAAAKGGVPWILKKPLELTIKLDLEEQQGTLLNNSILSKKGKEELKQLFEKYSALWQSWENQVGHRRIRPHKIATGTVKPTPQKQYHINPKAKPDIQIVINDLLKQGVLIQKESTMNTPVYPVPKPNGRWRMVLDYRAVNKVTPLIAVQNQHSYGILGSLFKGRYKTTIDLSNGFWAHPIVPEDYWITAFTWQGKQYCWTVLPQGFLNSPGLFNGDVVDLLQGIPNVEVYVDDVYISHDSEKEHLEYLDILFNRLKEAGYIISLKKSNIANSIVDFLGFQITNEGRGLTDTFKEKLENITAPTTLKQLQSILGLLNFARNFIPDFTELIAPLYALIPKSPKNYVPWQIEHSTTLETLITKLNGAEYLQGRKGDKTLIMKVNASYTTGYIRYYNEGEKKPISYVSIVFSKTELKFTELEKLLTTVHKGLLKALDLSMGQNIHVYSPIVSMQNIQKTPQTAKKALASRWLSWLSYLEDPRIRFFYDPQMPALKDLPAVDTGKDNKKHPSNFQHIFYTDGSAITSPTKEGHLNAGMGIVYFINKDGNLQKQQEWSISLGNHTAQFAEIAAFEFALKKCLPLGGNILVVTDSNYVAKAYNEELDVWASNGFVNNRKKPLKHISKWKSVADLKRLRPDVVVTHEPGHQKLDSSPHAYGNNLADQLATQASFKVHAGKRTADGSEFEKRTADGSEFESPKKKAKVE

SEQ ID NO: 1095 - protein, 2094 aa, synthetic construct
MPAAKRVKLDGGDKKYSIGLDIGTNSVGWAVITDEYKVPSKKFKVLGNTDRHSIKKNLIGALLFDSGETAEATRLKRTARRRYTRRKNRICYLQEIFSNEMAKVDDSFFHRLEESFLVEEDKKHERHPIFGNIVDEVAYHEKYPTIYHLRKKLVDSTDKADLRLIYLALAHMIKFRGHFLIEGDLNPDNSDVDKLFIQLVQTYNQLFEENPINASGVDAKAILSARLSKSRRLENLIAQLPGEKKNGLFGNLIALSLGLTPNFKSNFDLAEDAKLQLSKDTYDDDLDNLLAQIGDQYADLFLAAKNLSDAILLSDILRVNTEITKAPLSASMIKRYDEHHQDLTLLKALVRQQLPEKYKEIFFDQSKNGYAGYIDGGASQEEFYKFIKPILEKMDGTEELLVKLNREDLLRKQRTFDNGSIPHQIHLGELHAILRRQEDFYPFLKDNREKIEKILTFRIPYYVGPLARGNSRFAWMTRKSEETITPWNFEEVVDKGASAQSFIERMTNFDKNLPNEKVLPKHSLLYEYFTVYNELTKVKYVTEGMRKPAFLSGEQKKAIVDLLFKTNRKVTVKQLKEDYFKKIECFDSVEISGVEDRFNASLGTYHDLLKIIKDKDFLDNEENEDILEDIVLTLTLFEDREMIEERLKTYAHLFDDKVMKQLKRRRYTGWGRLSRKLINGIRDKQSGKTILDFLKSDGFANRNFMQLIHDDSLTFKEDIQKAQVSGQGDSLHEHIANLAGSPAIKKGILQTVKVVDELVKVMGRHKPENIVIEMARENQTTQKGQKNSRERMKRIEEGIKELGSQILKEHPVENTQLQNEKLYLYYLQNGRDMYVDQELDINRLSDYDVDHIVPQSFLKDDSIDNKVLTRSDKARGKSDNVPSEEVVKKMKNYWRQLLNAKLITQRKFDNLTKAERGGLSELDKAGFIKRQLVETRQITKHVAQILDSRMNTKYDENDKLIREVKVITLKSKLVSDFRKDFQFYKVREINNYHHAHDAYLNAVVGTALIKKYPKLESEFVYGDYKVYDVRKMIAKSEQEIGKATAKYFFYSNIMNFFKTEITLANGEIRKRPLIETNGETGEIVWDKGRDFATVRKVLSMPQVNIVKKTEVQTGGFSKESILPKRNSDKLIARKKDWDPKKYGGFDSPTVAYSVLVVAKVEKGKSKKLKSVKELLGITIMERSSFEKNPIDFLEAKGYKEVKKDLIIKLPKYSLFELENGRKRMLASAGELQKGNELALPSKYVNFLYLASHYEKLKGSPEDNEQKQLFVEQHKHYLDEIIEQISEFSKRVILADANLDKVLSAYNKHRDKPIREQAENIIHLFTLTNLGAPAAFKYFDTTIDRKRYTSTKEVLDATLIHQSITGLYETRIDLSQLGGDGGGSSGSSGSSGSSGSSGSSGGVPWILKKPLELTIKLDLEEQQGTLLNNSILSKKGKEELKQLFEKYSALWQSWENQVGHRRIRPHKIATGTVKPTPQKQYHINPKAKPDIQIVINDLLKQGVLIQKESTMNTPVYPVPKPNGRWRMVLDYRAVNKVTPLIAVQNQHSYGILGSLFKGRYKTTIDLSNGFWAHPIVPEDYWITAFTWQGKQYCWTVLPQGFLNSPGLFNGDVVDLLQGIPNVEVYVDDVYISHDSEKEHLEYLDILFNRLKEAGYIISLKKSNIANSIVDFLGFQITNEGRGLTDTFKEKLENITAPTTLKQLQSILGLLNFARNFIPDFTELIAPLYALIPKSPKNYVPWQIEHSTTLETLITKLNGAEYLQGRKGDKTLIMKVNASYTTGYIRYYNEGEKKPISYVSIVFSKTELKFTELEKLLTTVHKGLLKALDLSMGQNIHVYSPIVSMQNIQKTPQTAKKALASRWLSWLSYLEDPRIRFFYDPQMPALKDLPAVDTGKDNKKHPSNFQHIFYTDGSAITSPTKEGHLNAGMGIVYFINKDGNLQKQQEWSISLGNHTAQFAEIAAFEFALKKCLPLGGNILVVTDSNYVAKAYNEELDVWASNGFVNNRKKPLKHISKWKSVADLKRLRPDVVVTHEPGHQKLDSSPHAYGNNLADQLATQASFKVHAGKRTADGSEFEKRTADGSEFESPKKKAKVE

SEQ ID NO: 1096 - protein, 2087 aa, synthetic construct
MPAAKRVKLDGGDKKYSIGLDIGTNSVGWAVITDEYKVPSKKFKVLGNTDRHSIKKNLIGALLFDSGETAEATRLKRTARRRYTRRKNRICYLQEIFSNEMAKVDDSFFHRLEESFLVEEDKKHERHPIFGNIVDEVAYHEKYPTIYHLRKKLVDSTDKADLRLIYLALAHMIKFRGHFLIEGDLNPDNSDVDKLFIQLVQTYNQLFEENPINASGVDAKAILSARLSKSRRLENLIAQLPGEKKNGLFGNLIALSLGLTPNFKSNFDLAEDAKLQLSKDTYDDDLDNLLAQIGDQYADLFLAAKNLSDAILLSDILRVNTEITKAPLSASMIKRYDEHHQDLTLLKALVRQQLPEKYKEIFFDQSKNGYAGYIDGGASQEEFYKFIKPILEKMDGTEELLVKLNREDLLRKQRTFDNGSIPHQIHLGELHAILRRQEDFYPFLKDNREKIEKILTFRIPYYVGPLARGNSRFAWMTRKSEETITPWNFEEVVDKGASAQSFIERMTNFDKNLPNEKVLPKHSLLYEYFTVYNELTKVKYVTEGMRKPAFLSGEQKKAIVDLLFKTNRKVTVKQLKEDYFKKIECFDSVEISGVEDRFNASLGTYHDLLKIIKDKDFLDNEENEDILEDIVLTLTLFEDREMIEERLKTYAHLFDDKVMKQLKRRRYTGWGRLSRKLINGIRDKQSGKTILDFLKSDGFANRNFMQLIHDDSLTFKEDIQKAQVSGQGDSLHEHIANLAGSPAIKKGILQTVKVVDELVKVMGRHKPENIVIEMARENQTTQKGQKNSRERMKRIEEGIKELGSQILKEHPVENTQLQNEKLYLYYLQNGRDMYVDQELDINRLSDYDVDHIVPQSFLKDDSIDNKVLTRSDKARGKSDNVPSEEVVKKMKNYWRQLLNAKLITQRKFDNLTKAERGGLSELDKAGFIKRQLVETRQITKHVAQILDSRMNTKYDENDKLIREVKVITLKSKLVSDFRKDFQFYKVREINNYHHAHDAYLNAVVGTALIKKYPKLESEFVYGDYKVYDVRKMIAKSEQEIGKATAKYFFYSNIMNFFKTEITLANGEIRKRPLIETNGETGEIVWDKGRDFATVRKVLSMPQVNIVKKTEVQTGGFSKESILPKRNSDKLIARKKDWDPKKYGGFDSPTVAYSVLVVAKVEKGKSKKLKSVKELLGITIMERSSFEKNPIDFLEAKGYKEVKKDLIIKLPKYSLFELENGRKRMLASAGELQKGNELALPSKYVNFLYLASHYEKLKGSPEDNEQKQLFVEQHKHYLDEIIEQISEFSKRVILADANLDKVLSAYNKHRDKPIREQAENIIHLFTLTNLGAPAAFKYFDTTIDRKRYTSTKEVLDATLIHQSITGLYETRIDLSQLGGDGGPAPGGGEAAAKGGVPWILKKPLELTIKLDLEEQQGTLLNNSILSKKGKEELKQLFEKYSALWQSWENQVGHRRIRPHKIATGTVKPTPQKQYHINPKAKPDIQIVINDLLKQGVLIQKESTMNTPVYPVPKPNGRWRMVLDYRAVNKVTPLIAVQNQHSYGILGSLFKGRYKTTIDLSNGFWAHPIVPEDYWITAFTWQGKQYCWTVLPQGFLNSPGLFNGDVVDLLQGIPNVEVYVDDVYISHDSEKEHLEYLDILFNRLKEAGYIISLKKSNIANSIVDFLGFQITNEGRGLTDTFKEKLENITAPTTLKQLQSILGLLNFARNFIPDFTELIAPLYALIPKSPKNYVPWQIEHSTTLETLITKLNGAEYLQGRKGDKTLIMKVNASYTTGYIRYYNEGEKKPISYVSIVFSKTELKFTELEKLLTTVHKGLLKALDLSMGQNIHVYSPIVSMQNIQKTPQTAKKALASRWLSWLSYLEDPRIRFFYDPQMPALKDLPAVDTGKDNKKHPSNFQHIFYTDGSAITSPTKEGHLNAGMGIVYFINKDGNLQKQQEWSISLGNHTAQFAEIAAFEFALKKCLPLGGNILVVTDSNYVAKAYNEELDVWASNGFVNNRKKPLKHISKWKSVADLKRLRPDVVVTHEPGHQKLDSSPHAYGNNLADQLATQASFKVHAGKRTADGSEFEKRTADGSEFESPKKKAKVE

SEQ ID NO: 1097 - protein, 2087 aa, synthetic construct
MPAAKRVKLDGGDKKYSIGLDIGTNSVGWAVITDEYKVPSKKFKVLGNTDRHSIKKNLIGALLFDSGETAEATRLKRTARRRYTRRKNRICYLQEIFSNEMAKVDDSFFHRLEESFLVEEDKKHERHPIFGNIVDEVAYHEKYPTIYHLRKKLVDSTDKADLRLIYLALAHMIKFRGHFLIEGDLNPDNSDVDKLFIQLVQTYNQLFEENPINASGVDAKAILSARLSKSRRLENLIAQLPGEKKNGLFGNLIALSLGLTPNFKSNFDLAEDAKLQLSKDTYDDDLDNLLAQIGDQYADLFLAAKNLSDAILLSDILRVNTEITKAPLSASMIKRYDEHHQDLTLLKALVRQQLPEKYKEIFFDQSKNGYAGYIDGGASQEEFYKFIKPILEKMDGTEELLVKLNREDLLRKQRTFDNGSIPHQIHLGELHAILRRQEDFYPFLKDNREKIEKILTFRIPYYVGPLARGNSRFAWMTRKSEETITPWNFEEVVDKGASAQSFIERMTNFDKNLPNEKVLPKHSLLYEYFTVYNELTKVKYVTEGMRKPAFLSGEQKKAIVDLLFKTNRKVTVKQLKEDYFKKIECFDSVEISGVEDRFNASLGTYHDLLKIIKDKDFLDNEENEDILEDIVLTLTLFEDREMIEERLKTYAHLFDDKVMKQLKRRRYTGWGRLSRKLINGIRDKQSGKTILDFLKSDGFANRNFMQLIHDDSLTFKEDIQKAQVSGQGDSLHEHIANLAGSPAIKKGILQTVKVVDELVKVMGRHKPENIVIEMARENQTTQKGQKNSRERMKRIEEGIKELGSQILKEHPVENTQLQNEKLYLYYLQNGRDMYVDQELDINRLSDYDVDHIVPQSFLKDDSIDNKVLTRSDKARGKSDNVPSEEVVKKMKNYWRQLLNAKLITQRKFDNLTKAERGGLSELDKAGFIKRQLVETRQITKHVAQILDSRMNTKYDENDKLIREVKVITLKSKLVSDFRKDFQFYKVREINNYHHAHDAYLNAVVGTALIKKYPKLESEFVYGDYKVYDVRKMIAKSEQEIGKATAKYFFYSNIMNFFKTEITLANGEIRKRPLIETNGETGEIVWDKGRDFATVRKVLSMPQVNIVKKTEVQTGGFSKESILPKRNSDKLIARKKDWDPKKYGGFDSPTVAYSVLVVAKVEKGKSKKLKSVKELLGITIMERSSFEKNPIDFLEAKGYKEVKKDLIIKLPKYSLFELENGRKRMLASAGELQKGNELALPSKYVNFLYLASHYEKLKGSPEDNEQKQLFVEQHKHYLDEIIEQISEFSKRVILADANLDKVLSAYNKHRDKPIREQAENIIHLFTLTNLGAPAAFKYFDTTIDRKRYTSTKEVLDATLIHQSITGLYETRIDLSQLGGDGGGGSEAAAKPAPGGVPWILKKPLELTIKLDLEEQQGTLLNNSILSKKGKEELKQLFEKYSALWQSWENQVGHRRIRPHKIATGTVKPTPQKQYHINPKAKPDIQIVINDLLKQGVLIQKESTMNTPVYPVPKPNGRWRMVLDYRAVNKVTPLIAVQNQHSYGILGSLFKGRYKTTIDLSNGFWAHPIVPEDYWITAFTWQGKQYCWTVLPQGFLNSPGLFNGDVVDLLQGIPNVEVYVDDVYISHDSEKEHLEYLDILFNRLKEAGYIISLKKSNIANSIVDFLGFQITNEGRGLTDTFKEKLENITAPTTLKQLQSILGLLNFARNFIPDFTELIAPLYALIPKSPKNYVPWQIEHSTTLETLITKLNGAEYLQGRKGDKTLIMKVNASYTTGYIRYYNEGEKKPISYVSIVFSKTELKFTELEKLLTTVHKGLLKALDLSMGQNIHVYSPIVSMQNIQKTPQTAKKALASRWLSWLSYLEDPRIRFFYDPQMPALKDLPAVDTGKDNKKHPSNFQHIFYTDGSAITSPTKEGHLNAGMGIVYFINKDGNLQKQQEWSISLGNHTAQFAEIAAFEFALKKCLPLGGNILVVTDSNYVAKAYNEELDVWASNGFVNNRKKPLKHISKWKSVADLKRLRPDVVVTHEPGHQKLDSSPHAYGNNLADQLATQASFKVHAGKRTADGSEFEKRTADGSEFESPKKKAKVE

SEQ ID NO: 1098 - protein, 2085 aa, synthetic construct
MPAAKRVKLDGGDKKYSIGLDIGTNSVGWAVITDEYKVPSKKFKVLGNTDRHSIKKNLIGALLFDSGETAEATRLKRTARRRYTRRKNRICYLQEIFSNEMAKVDDSFFHRLEESFLVEEDKKHERHPIFGNIVDEVAYHEKYPTIYHLRKKLVDSTDKADLRLIYLALAHMIKFRGHFLIEGDLNPDNSDVDKLFIQLVQTYNQLFEENPINASGVDAKAILSARLSKSRRLENLIAQLPGEKKNGLFGNLIALSLGLTPNFKSNFDLAEDAKLQLSKDTYDDDLDNLLAQIGDQYADLFLAAKNLSDAILLSDILRVNTEITKAPLSASMIKRYDEHHQDLTLLKALVRQQLPEKYKEIFFDQSKNGYAGYIDGGASQEEFYKFIKPILEKMDGTEELLVKLNREDLLRKQRTFDNGSIPHQIHLGELHAILRRQEDFYPFLKDNREKIEKILTFRIPYYVGPLARGNSRFAWMTRKSEETITPWNFEEVVDKGASAQSFIERMTNFDKNLPNEKVLPKHSLLYEYFTVYNELTKVKYVTEGMRKPAFLSGEQKKAIVDLLFKTNRKVTVKQLKEDYFKKIECFDSVEISGVEDRFNASLGTYHDLLKIIKDKDFLDNEENEDILEDIVLTLTLFEDREMIEERLKTYAHLFDDKVMKQLKRRRYTGWGRLSRKLINGIRDKQSGKTILDFLKSDGFANRNFMQLIHDDSLTFKEDIQKAQVSGQGDSLHEHIANLAGSPAIKKGILQTVKVVDELVKVMGRHKPENIVIEMARENQTTQKGQKNSRERMKRIEEGIKELGSQILKEHPVENTQLQNEKLYLYYLQNGRDMYVDQELDINRLSDYDVDHIVPQSFLKDDSIDNKVLTRSDKARGKSDNVPSEEVVKKMKNYWRQLLNAKLITQRKFDNLTKAERGGLSELDKAGFIKRQLVETRQITKHVAQILDSRMNTKYDENDKLIREVKVITLKSKLVSDFRKDFQFYKVREINNYHHAHDAYLNAVVGTALIKKYPKLESEFVYGDYKVYDVRKMIAKSEQEIGKATAKYFFYSNIMNFFKTEITLANGEIRKRPLIETNGETGEIVWDKGRDFATVRKVLSMPQVNIVKKTEVQTGGFSKESILPKRNSDKLIARKKDWDPKKYGGFDSPTVAYSVLVVAKVEKGKSKKLKSVKELLGITIMERSSFEKNPIDFLEAKGYKEVKKDLIIKLPKYSLFELENGRKRMLASAGELQKGNELALPSKYVNFLYLASHYEKLKGSPEDNEQKQLFVEQHKHYLDEIIEQISEFSKRVILADANLDKVLSAYNKHRDKPIREQAENIIHLFTLTNLGAPAAFKYFDTTIDRKRYTSTKEVLDATLIHQSITGLYETRIDLSQLGGDGGPAPGGSGGGGGVPWILKKPLELTIKLDLEEQQGTLLNNSILSKKGKEELKQLFEKYSALWQSWENQVGHRRIRPHKIATGTVKPTPQKQYHINPKAKPDIQIVINDLLKQGVLIQKESTMNTPVYPVPKPNGRWRMVLDYRAVNKVTPLIAVQNQHSYGILGSLFKGRYKTTIDLSNGFWAHPIVPEDYWITAFTWQGKQYCWTVLPQGFLNSPGLFNGDVVDLLQGIPNVEVYVDDVYISHDSEKEHLEYLDILFNRLKEAGYIISLKKSNIANSIVDFLGFQITNEGRGLTDTFKEKLENITAPTTLKQLQSILGLLNFARNFIPDFTELIAPLYALIPKSPKNYVPWQIEHSTTLETLITKLNGAEYLQGRKGDKTLIMKVNASYTTGYIRYYNEGEKKPISYVSIVFSKTELKFTELEKLLTTVHKGLLKALDLSMGQNIHVYSPIVSMQNIQKTPQTAKKALASRWLSWLSYLEDPRIRFFYDPQMPALKDLPAVDTGKDNKKHPSNFQHIFYTDGSAITSPTKEGHLNAGMGIVYFINKDGNLQKQQEWSISLGNHTAQFAEIAAFEFALKKCLPLGGNILVVTDSNYVAKAYNEELDVWASNGFVNNRKKPLKHISKWKSVADLKRLRPDVVVTHEPGHQKLDSSPHAYGNNLADQLATQASFKVHAGKRTADGSEFEKRTADGSEFESPKKKAKVE

SEQ ID NO: 1099 - protein, 2087 aa, synthetic construct
MPAAKRVKLDGGDKKYSIGLDIGTNSVGWAVITDEYKVPSKKFKVLGNTDRHSIKKNLIGALLFDSGETAEATRLKRTARRRYTRRKNRICYLQEIFSNEMAKVDDSFFHRLEESFLVEEDKKHERHPIFGNIVDEVAYHEKYPTIYHLRKKLVDSTDKADLRLIYLALAHMIKFRGHFLIEGDLNPDNSDVDKLFIQLVQTYNQLFEENPINASGVDAKAILSARLSKSRRLENLIAQLPGEKKNGLFGNLIALSLGLTPNFKSNFDLAEDAKLQLSKDTYDDDLDNLLAQIGDQYADLFLAAKNLSDAILLSDILRVNTEITKAPLSASMIKRYDEHHQDLTLLKALVRQQLPEKYKEIFFDQSKNGYAGYIDGGASQEEFYKFIKPILEKMDGTEELLVKLNREDLLRKQRTFDNGSIPHQIHLGELHAILRRQEDFYPFLKDNREKIEKILTFRIPYYVGPLARGNSRFAWMTRKSEETITPWNFEEVVDKGASAQSFIERMTNFDKNLPNEKVLPKHSLLYEYFTVYNELTKVKYVTEGMRKPAFLSGEQKKAIVDLLFKTNRKVTVKQLKEDYFKKIECFDSVEISGVEDRFNASLGTYHDLLKIIKDKDFLDNEENEDILEDIVLTLTLFEDREMIEERLKTYAHLFDDKVMKQLKRRRYTGWGRLSRKLINGIRDKQSGKTILDFLKSDGFANRNFMQLIHDDSLTFKEDIQKAQVSGQGDSLHEHIANLAGSPAIKKGILQTVKVVDELVKVMGRHKPENIVIEMARENQTTQKGQKNSRERMKRIEEGIKELGSQILKEHPVENTQLQNEKLYLYYLQNGRDMYVDQELDINRLSDYDVDHIVPQSFLKDDSIDNKVLTRSDKARGKSDNVPSEEVVKKMKNYWRQLLNAKLITQRKFDNLTKAERGGLSELDKAGFIKRQLVETRQITKHVAQILDSRMNTKYDENDKLIREVKVITLKSKLVSDFRKDFQFYKVREINNYHHAHDAYLNAVVGTALIKKYPKLESEFVYGDYKVYDVRKMIAKSEQEIGKATAKYFFYSNIMNFFKTEITLANGEIRKRPLIETNGETGEIVWDKGRDFATVRKVLSMPQVNIVKKTEVQTGGFSKESILPKRNSDKLIARKKDWDPKKYGGFDSPTVAYSVLVVAKVEKGKSKKLKSVKELLGITIMERSSFEKNPIDFLEAKGYKEVKKDLIIKLPKYSLFELENGRKRMLASAGELQKGNELALPSKYVNFLYLASHYEKLKGSPEDNEQKQLFVEQHKHYLDEIIEQISEFSKRVILADANLDKVLSAYNKHRDKPIREQAENIIHLFTLTNLGAPAAFKYFDTTIDRKRYTSTKEVLDATLIHQSITGLYETRIDLSQLGGDGGGGSPAPEAAAKGGVPWILKKPLELTIKLDLEEQQGTLLNNSILSKKGKEELKQLFEKYSALWQSWENQVGHRRIRPHKIATGTVKPTPQKQYHINPKAKPDIQIVINDLLKQGVLIQKESTMNTPVYPVPKPNGRWRMVLDYRAVNKVTPLIAVQNQHSYGILGSLFKGRYKTTIDLSNGFWAHPIVPEDYWITAFTWQGKQYCWTVLPQGFLNSPGLFNGDVVDLLQGIPNVEVYVDDVYISHDSEKEHLEYLDILFNRLKEAGYIISLKKSNIANSIVDFLGFQITNEGRGLTDTFKEKLENITAPTTLKQLQSILGLLNFARNFIPDFTELIAPLYALIPKSPKNYVPWQIEHSTTLETLITKLNGAEYLQGRKGDKTLIMKVNASYTTGYIRYYNEGEKKPISYVSIVFSKTELKFTELEKLLTTVHKGLLKALDLSMGQNIHVYSPIVSMQNIQKTPQTAKKALASRWLSWLSYLEDPRIRFFYDPQMPALKDLPAVDTGKDNKKHPSNFQHIFYTDGSAITSPTKEGHLNAGMGIVYFINKDGNLQKQQEWSISLGNHTAQFAEIAAFEFALKKCLPLGGNILVVTDSNYVAKAYNEELDVWASNGFVNNRKKPLKHISKWKSVADLKRLRPDVVVTHEPGHQKLDSSPHAYGNNLADQLATQASFKVHAGKRTADGSEFEKRTADGSEFESPKKKAKVE

SEQ ID NO: 1100 - protein, 2087 aa, synthetic construct
MPAAKRVKLDGGDKKYSIGLDIGTNSVGWAVITDEYKVPSKKFKVLGNTDRHSIKKNLIGALLFDSGETAEATRLKRTARRRYTRRKNRICYLQEIFSNEMAKVDDSFFHRLEESFLVEEDKKHERHPIFGNIVDEVAYHEKYPTIYHLRKKLVDSTDKADLRLIYLALAHMIKFRGHFLIEGDLNPDNSDVDKLFIQLVQTYNQLFEENPINASGVDAKAILSARLSKSRRLENLIAQLPGEKKNGLFGNLIALSLGLTPNFKSNFDLAEDAKLQLSKDTYDDDLDNLLAQIGDQYADLFLAAKNLSDAILLSDILRVNTEITKAPLSASMIKRYDEHHQDLTLLKALVRQQLPEKYKEIFFDQSKNGYAGYIDGGASQEEFYKFIKPILEKMDGTEELLVKLNREDLLRKQRTFDNGSIPHQIHLGELHAILRRQEDFYPFLKDNREKIEKILTFRIPYYVGPLARGNSRFAWMTRKSEETITPWNFEEVVDKGASAQSFIERMTNFDKNLPNEKVLPKHSLLYEYFTVYNELTKVKYVTEGMRKPAFLSGEQKKAIVDLLFKTNRKVTVKQLKEDYFKKIECFDSVEISGVEDRFNASLGTYHDLLKIIKDKDFLDNEENEDILEDIVLTLTLFEDREMIEERLKTYAHLFDDKVMKQLKRRRYTGWGRLSRKLINGIRDKQSGKTILDFLKSDGFANRNFMQLIHDDSLTFKEDIQKAQVSGQGDSLHEHIANLAGSPAIKKGILQTVKVVDELVKVMGRHKPENIVIEMARENQTTQKGQKNSRERMKRIEEGIKELGSQILKEHPVENTQLQNEKLYLYYLQNGRDMYVDQELDINRLSDYDVDHIVPQSFLKDDSIDNKVLTRSDKARGKSDNVPSEEVVKKMKNYWRQLLNAKLITQRKFDNLTKAERGGLSELDKAGFIKRQLVETRQITKHVAQILDSRMNTKYDENDKLIREVKVITLKSKLVSDFRKDFQFYKVREINNYHHAHDAYLNAVVGTALIKKYPKLESEFVYGDYKVYDVRKMIAKSEQEIGKATAKYFFYSNIMNFFKTEITLANGEIRKRPLIETNGETGEIVWDKGRDFATVRKVLSMPQVNIVKKTEVQTGGFSKESILPKRNSDKLIARKKDWDPKKYGGFDSPTVAYSVLVVAKVEKGKSKKLKSVKELLGITIMERSSFEKNPIDFLEAKGYKEVKKDLIIKLPKYSLFELENGRKRMLASAGELQKGNELALPSKYVNFLYLASHYEKLKGSPEDNEQKQLFVEQHKHYLDEIIEQISEFSKRVILADANLDKVLSAYNKHRDKPIREQAENIIHLFTLTNLGAPAAFKYFDTTIDRKRYTSTKEVLDATLIHQSITGLYETRIDLSQLGGDGGGSSEAAAKGGGGGVPWILKKPLELTIKLDLEEQQGTLLNNSILSKKGKEELKQLFEKYSALWQSWENQVGHRRIRPHKIATGTVKPTPQKQYHINPKAKPDIQIVINDLLKQGVLIQKESTMNTPVYPVPKPNGRWRMVLDYRAVNKVTPLIAVQNQHSYGILGSLFKGRYKTTIDLSNGFWAHPIVPEDYWITAFTWQGKQYCWTVLPQGFLNSPGLFNGDVVDLLQGIPNVEVYVDDVYISHDSEKEHLEYLDILFNRLKEAGYIISLKKSNIANSIVDFLGFQITNEGRGLTDTFKEKLENITAPTTLKQLQSILGLLNFARNFIPDFTELIAPLYALIPKSPKNYVPWQIEHSTTLETLITKLNGAEYLQGRKGDKTLIMKVNASYTTGYIRYYNEGEKKPISYVSIVFSKTELKFTELEKLLTTVHKGLLKALDLSMGQNIHVYSPIVSMQNIQKTPQTAKKALASRWLSWLSYLEDPRIRFFYDPQMPALKDLPAVDTGKDNKKHPSNFQHIFYTDGSAITSPTKEGHLNAGMGIVYFINKDGNLQKQQEWSISLGNHTAQFAEIAAFEFALKKCLPLGGNILVVTDSNYVAKAYNEELDVWASNGFVNNRKKPLKHISKWKSVADLKRLRPDVVVTHEPGHQKLDSSPHAYGNNLADQLATQASFKVHAGKRTADGSEFEKRTADGSEFESPKKKAKVE

SEQ ID NO: 1101 - protein, 2091 aa, synthetic construct
MPAAKRVKLDGGDKKYSIGLDIGTNSVGWAVITDEYKVPSKKFKVLGNTDRHSIKKNLIGALLFDSGETAEATRLKRTARRRYTRRKNRICYLQEIFSNEMAKVDDSFFHRLEESFLVEEDKKHERHPIFGNIVDEVAYHEKYPTIYHLRKKLVDSTDKADLRLIYLALAHMIKFRGHFLIEGDLNPDNSDVDKLFIQLVQTYNQLFEENPINASGVDAKAILSARLSKSRRLENLIAQLPGEKKNGLFGNLIALSLGLTPNFKSNFDLAEDAKLQLSKDTYDDDLDNLLAQIGDQYADLFLAAKNLSDAILLSDILRVNTEITKAPLSASMIKRYDEHHQDLTLLKALVRQQLPEKYKEIFFDQSKNGYAGYIDGGASQEEFYKFIKPILEKMDGTEELLVKLNREDLLRKQRTFDNGSIPHQIHLGELHAILRRQEDFYPFLKDNREKIEKILTFRIPYYVGPLARGNSRFAWMTRKSEETITPWNFEEVVDKGASAQSFIERMTNFDKNLPNEKVLPKHSLLYEYFTVYNELTKVKYVTEGMRKPAFLSGEQKKAIVDLLFKTNRKVTVKQLKEDYFKKIECFDSVEISGVEDRFNASLGTYHDLLKIIKDKDFLDNEENEDILEDIVLTLTLFEDREMIEERLKTYAHLFDDKVMKQLKRRRYTGWGRLSRKLINGIRDKQSGKTILDFLKSDGFANRNFMQLIHDDSLTFKEDIQKAQVSGQGDSLHEHIANLAGSPAIKKGILQTVKVVDELVKVMGRHKPENIVIEMARENQTTQKGQKNSRERMKRIEEGIKELGSQILKEHPVENTQLQNEKLYLYYLQNGRDMYVDQELDINRLSDYDVDHIVPQSFLKDDSIDNKVLTRSDKARGKSDNVPSEEVVKKMKNYWRQLLNAKLITQRKFDNLTKAERGGLSELDKAGFIKRQLVETRQITKHVAQILDSRMNTKYDENDKLIREVKVITLKSKLVSDFRKDFQFYKVREINNYHHAHDAYLNAVVGTALIKKYPKLESEFVYGDYKVYDVRKMIAKSEQEIGKATAKYFFYSNIMNFFKTEITLANGEIRKRPLIETNGETGEIVWDKGRDFATVRKVLSMPQVNIVKKTEVQTGGFSKESILPKRNSDKLIARKKDWDPKKYGGFDSPTVAYSVLVVAKVEKGKSKKLKSVKELLGITIMERSSFEKNPIDFLEAKGYKEVKKDLIIKLPKYSLFELENGRKRMLASAGELQKGNELALPSKYVNFLYLASHYEKLKGSPEDNEQKQLFVEQHKHYLDEIIEQISEFSKRVILADANLDKVLSAYNKHRDKPIREQAENIIHLFTLTNLGAPAAFKYFDTTIDRKRYTSTKEVLDATLIHQSITGLYETRIDLSQLGGDGGGSSGSSGSSGSSGSSGGVPWILKKPLELTIKLDLEEQQGTLLNNSILSKKGKEELKQLFEKYSALWQSWENQVGHRRIRPHKIATGTVKPTPQKQYHINPKAKPDIQIVINDLLKQGVLIQKESTMNTPVYPVPKPNGRWRMVLDYRAVNKVTPLIAVQNQHSYGILGSLFKGRYKTTIDLSNGFWAHPIVPEDYWITAFTWQGKQYCWTVLPQGFLNSPGLFNGDVVDLLQGIPNVEVYVDDVYISHDSEKEHLEYLDILFNRLKEAGYIISLKKSNIANSIVDFLGFQITNEGRGLTDTFKEKLENITAPTTLKQLQSILGLLNFARNFIPDFTELIAPLYALIPKSPKNYVPWQIEHSTTLETLITKLNGAEYLQGRKGDKTLIMKVNASYTTGYIRYYNEGEKKPISYVSIVFSKTELKFTELEKLLTTVHKGLLKALDLSMGQNIHVYSPIVSMQNIQKTPQTAKKALASRWLSWLSYLEDPRIRFFYDPQMPALKDLPAVDTGKDNKKHPSNFQHIFYTDGSAITSPTKEGHLNAGMGIVYFINKDGNLQKQQEWSISLGNHTAQFAEIAAFEFALKKCLPLGGNILVVTDSNYVAKAYNEELDVWASNGFVNNRKKPLKHISKWKSVADLKRLRPDVVVTHEPGHQKLDSSPHAYGNNLADQLATQASFKVHAGKRTADGSEFEKRTADGSEFESPKKKAKVE

SEQ ID NO: 1102 - protein, 2081 aa, synthetic construct
MPAAKRVKLDGGDKKYSIGLDIGTNSVGWAVITDEYKVPSKKFKVLGNTDRHSIKKNLIGALLFDSGETAEATRLKRTARRRYTRRKNRICYLQEIFSNEMAKVDDSFFHRLEESFLVEEDKKHERHPIFGNIVDEVAYHEKYPTIYHLRKKLVDSTDKADLRLIYLALAHMIKFRGHFLIEGDLNPDNSDVDKLFIQLVQTYNQLFEENPINASGVDAKAILSARLSKSRRLENLIAQLPGEKKNGLFGNLIALSLGLTPNFKSNFDLAEDAKLQLSKDTYDDDLDNLLAQIGDQYADLFLAAKNLSDAILLSDILRVNTEITKAPLSASMIKRYDEHHQDLTLLKALVRQQLPEKYKEIFFDQSKNGYAGYIDGGASQEEFYKFIKPILEKMDGTEELLVKLNREDLLRKQRTFDNGSIPHQIHLGELHAILRRQEDFYPFLKDNREKIEKILTFRIPYYVGPLARGNSRFAWMTRKSEETITPWNFEEVVDKGASAQSFIERMTNFDKNLPNEKVLPKHSLLYEYFTVYNELTKVKYVTEGMRKPAFLSGEQKKAIVDLLFKTNRKVTVKQLKEDYFKKIECFDSVEISGVEDRFNASLGTYHDLLKIIKDKDFLDNEENEDILEDIVLTLTLFEDREMIEERLKTYAHLFDDKVMKQLKRRRYTGWGRLSRKLINGIRDKQSGKTILDFLKSDGFANRNFMQLIHDDSLTFKEDIQKAQVSGQGDSLHEHIANLAGSPAIKKGILQTVKVVDELVKVMGRHKPENIVIEMARENQTTQKGQKNSRERMKRIEEGIKELGSQILKEHPVENTQLQNEKLYLYYLQNGRDMYVDQELDINRLSDYDVDHIVPQSFLKDDSIDNKVLTRSDKARGKSDNVPSEEVVKKMKNYWRQLLNAKLITQRKFDNLTKAERGGLSELDKAGFIKRQLVETRQITKHVAQILDSRMNTKYDENDKLIREVKVITLKSKLVSDFRKDFQFYKVREINNYHHAHDAYLNAVVGTALIKKYPKLESEFVYGDYKVYDVRKMIAKSEQEIGKATAKYFFYSNIMNFFKTEITLANGEIRKRPLIETNGETGEIVWDKGRDFATVRKVLSMPQVNIVKKTEVQTGGFSKESILPKRNSDKLIARKKDWDPKKYGGFDSPTVAYSVLVVAKVEKGKSKKLKSVKELLGITIMERSSFEKNPIDFLEAKGYKEVKKDLIIKLPKYSLFELENGRKRMLASAGELQKGNELALPSKYVNFLYLASHYEKLKGSPEDNEQKQLFVEQHKHYLDEIIEQISEFSKRVILADANLDKVLSAYNKHRDKPIREQAENIIHLFTLTNLGAPAAFKYFDTTIDRKRYTSTKEVLDATLIHQSITGLYETRIDLSQLGGDGGPAPAPGGVPWILKKPLELTIKLDLEEQQGTLLNNSILSKKGKEELKQLFEKYSALWQSWENQVGHRRIRPHKIATGTVKPTPQKQYHINPKAKPDIQIVINDLLKQGVLIQKESTMNTPVYPVPKPNGRWRMVLDYRAVNKVTPLIAVQNQHSYGILGSLFKGRYKTTIDLSNGFWAHPIVPEDYWITAFTWQGKQYCWTVLPQGFLNSPGLFNGDVVDLLQGIPNVEVYVDDVYISHDSEKEHLEYLDILFNRLKEAGYIISLKKSNIANSIVDFLGFQITNEGRGLTDTFKEKLENITAPTTLKQLQSILGLLNFARNFIPDFTELIAPLYALIPKSPKNYVPWQIEHSTTLETLITKLNGAEYLQGRKGDKTLIMKVNASYTTGYIRYYNEGEKKPISYVSIVFSKTELKFTELEKLLTTVHKGLLKALDLSMGQNIHVYSPIVSMQNIQKTPQTAKKALASRWLSWLSYLEDPRIRFFYDPQMPALKDLPAVDTGKDNKKHPSNFQHIFYTDGSAITSPTKEGHLNAGMGIVYFINKDGNLQKQQEWSISLGNHTAQFAEIAAFEFALKKCLPLGGNILVVTDSNYVAKAYNEELDVWASNGFVNNRKKPLKHISKWKSVADLKRLRPDVVVTHEPGHQKLDSSPHAYGNNLADQLATQASFKVHAGKRTADGSEFEKRTADGSEFESPKKKAKVE

SEQ ID NO: 1103 - protein, 2085 aa, synthetic construct
MPAAKRVKLDGGDKKYSIGLDIGTNSVGWAVITDEYKVPSKKFKVLGNTDRHSIKKNLIGALLFDSGETAEATRLKRTARRRYTRRKNRICYLQEIFSNEMAKVDDSFFHRLEESFLVEEDKKHERHPIFGNIVDEVAYHEKYPTIYHLRKKLVDSTDKADLRLIYLALAHMIKFRGHFLIEGDLNPDNSDVDKLFIQLVQTYNQLFEENPINASGVDAKAILSARLSKSRRLENLIAQLPGEKKNGLFGNLIALSLGLTPNFKSNFDLAEDAKLQLSKDTYDDDLDNLLAQIGDQYADLFLAAKNLSDAILLSDILRVNTEITKAPLSASMIKRYDEHHQDLTLLKALVRQQLPEKYKEIFFDQSKNGYAGYIDGGASQEEFYKFIKPILEKMDGTEELLVKLNREDLLRKQRTFDNGSIPHQIHLGELHAILRRQEDFYPFLKDNREKIEKILTFRIPYYVGPLARGNSRFAWMTRKSEETITPWNFEEVVDKGASAQSFIERMTNFDKNLPNEKVLPKHSLLYEYFTVYNELTKVKYVTEGMRKPAFLSGEQKKAIVDLLFKTNRKVTVKQLKEDYFKKIECFDSVEISGVEDRFNASLGTYHDLLKIIKDKDFLDNEENEDILEDIVLTLTLFEDREMIEERLKTYAHLFDDKVMKQLKRRRYTGWGRLSRKLINGIRDKQSGKTILDFLKSDGFANRNFMQLIHDDSLTFKEDIQKAQVSGQGDSLHEHIANLAGSPAIKKGILQTVKVVDELVKVMGRHKPENIVIEMARENQTTQKGQKNSRERMKRIEEGIKELGSQILKEHPVENTQLQNEKLYLYYLQNGRDMYVDQELDINRLSDYDVDHIVPQSFLKDDSIDNKVLTRSDKARGKSDNVPSEEVVKKMKNYWRQLLNAKLITQRKFDNLTKAERGGLSELDKAGFIKRQLVETRQITKHVAQILDSRMNTKYDENDKLIREVKVITLKSKLVSDFRKDFQFYKVREINNYHHAHDAYLNAVVGTALIKKYPKLESEFVYGDYKVYDVRKMIAKSEQEIGKATAKYFFYSNIMNFFKTEITLANGEIRKRPLIETNGETGEIVWDKGRDFATVRKVLSMPQVNIVKKTEVQTGGFSKESILPKRNSDKLIARKKDWDPKKYGGFDSPTVAYSVLVVAKVEKGKSKKLKSVKELLGITIMERSSFEKNPIDFLEAKGYKEVKKDLIIKLPKYSLFELENGRKRMLASAGELQKGNELALPSKYVNFLYLASHYEKLKGSPEDNEQKQLFVEQHKHYLDEIIEQISEFSKRVILADANLDKVLSAYNKHRDKPIREQAENIIHLFTLTNLGAPAAFKYFDTTIDRKRYTSTKEVLDATLIHQSITGLYETRIDLSQLGGDGGGSSGSSGSSGGVPWILKKPLELTIKLDLEEQQGTLLNNSILSKKGKEELKQLFEKYSALWQSWENQVGHRRIRPHKIATGTVKPTPQKQYHINPKAKPDIQIVINDLLKQGVLIQKESTMNTPVYPVPKPNGRWRMVLDYRAVNKVTPLIAVQNQHSYGILGSLFKGRYKTTIDLSNGFWAHPIVPEDYWITAFTWQGKQYCWTVLPQGFLNSPGLFNGDVVDLLQGIPNVEVYVDDVYISHDSEKEHLEYLDILFNRLKEAGYIISLKKSNIANSIVDFLGFQITNEGRGLTDTFKEKLENITAPTTLKQLQSILGLLNFARNFIPDFTELIAPLYALIPKSPKNYVPWQIEHSTTLETLITKLNGAEYLQGRKGDKTLIMKVNASYTTGYIRYYNEGEKKPISYVSIVFSKTELKFTELEKLLTTVHKGLLKALDLSMGQNIHVYSPIVSMQNIQKTPQTAKKALASRWLSWLSYLEDPRIRFFYDPQMPALKDLPAVDTGKDNKKHPSNFQHIFYTDGSAITSPTKEGHLNAGMGIVYFINKDGNLQKQQEWSISLGNHTAQFAEIAAFEFALKKCLPLGGNILVVTDSNYVAKAYNEELDVWASNGFVNNRKKPLKHISKWKSVADLKRLRPDVVVTHEPGHQKLDSSPHAYGNNLADQLATQASFKVHAGKRTADGSEFEKRTADGSEFESPKKKAKVE

SEQ ID NO: 1104 - protein, 2087 aa, synthetic construct
MPAAKRVKLDGGDKKYSIGLDIGTNSVGWAVITDEYKVPSKKFKVLGNTDRHSIKKNLIGALLFDSGETAEATRLKRTARRRYTRRKNRICYLQEIFSNEMAKVDDSFFHRLEESFLVEEDKKHERHPIFGNIVDEVAYHEKYPTIYHLRKKLVDSTDKADLRLIYLALAHMIKFRGHFLIEGDLNPDNSDVDKLFIQLVQTYNQLFEENPINASGVDAKAILSARLSKSRRLENLIAQLPGEKKNGLFGNLIALSLGLTPNFKSNFDLAEDAKLQLSKDTYDDDLDNLLAQIGDQYADLFLAAKNLSDAILLSDILRVNTEITKAPLSASMIKRYDEHHQDLTLLKALVRQQLPEKYKEIFFDQSKNGYAGYIDGGASQEEFYKFIKPILEKMDGTEELLVKLNREDLLRKQRTFDNGSIPHQIHLGELHAILRRQEDFYPFLKDNREKIEKILTFRIPYYVGPLARGNSRFAWMTRKSEETITPWNFEEVVDKGASAQSFIERMTNFDKNLPNEKVLPKHSLLYEYFTVYNELTKVKYVTEGMRKPAFLSGEQKKAIVDLLFKTNRKVTVKQLKEDYFKKIECFDSVEISGVEDRFNASLGTYHDLLKIIKDKDFLDNEENEDILEDIVLTLTLFEDREMIEERLKTYAHLFDDKVMKQLKRRRYTGWGRLSRKLINGIRDKQSGKTILDFLKSDGFANRNFMQLIHDDSLTFKEDIQKAQVSGQGDSLHEHIANLAGSPAIKKGILQTVKVVDELVKVMGRHKPENIVIEMARENQTTQKGQKNSRERMKRIEEGIKELGSQILKEHPVENTQLQNEKLYLYYLQNGRDMYVDQELDINRLSDYDVDHIVPQSFLKDDSIDNKVLTRSDKARGKSDNVPSEEVVKKMKNYWRQLLNAKLITQRKFDNLTKAERGGLSELDKAGFIKRQLVETRQITKHVAQILDSRMNTKYDENDKLIREVKVITLKSKLVSDFRKDFQFYKVREINNYHHAHDAYLNAVVGTALIKKYPKLESEFVYGDYKVYDVRKMIAKSEQEIGKATAKYFFYSNIMNFFKTEITLANGEIRKRPLIETNGETGEIVWDKGRDFATVRKVLSMPQVNIVKKTEVQTGGFSKESILPKRNSDKLIARKKDWDPKKYGGFDSPTVAYSVLVVAKVEKGKSKKLKSVKELLGITIMERSSFEKNPIDFLEAKGYKEVKKDLIIKLPKYSLFELENGRKRMLASAGELQKGNELALPSKYVNFLYLASHYEKLKGSPEDNEQKQLFVEQHKHYLDEIIEQISEFSKRVILADANLDKVLSAYNKHRDKPIREQAENIIHLFTLTNLGAPAAFKYFDTTIDRKRYTSTKEVLDATLIHQSITGLYETRIDLSQLGGDGGPAPGSSEAAAKGGVPWILKKPLELTIKLDLEEQQGTLLNNSILSKKGKEELKQLFEKYSALWQSWENQVGHRRIRPHKIATGTVKPTPQKQYHINPKAKPDIQIVINDLLKQGVLIQKESTMNTPVYPVPKPNGRWRMVLDYRAVNKVTPLIAVQNQHSYGILGSLFKGRYKTTIDLSNGFWAHPIVPEDYWITAFTWQGKQYCWTVLPQGFLNSPGLFNGDVVDLLQGIPNVEVYVDDVYISHDSEKEHLEYLDILFNRLKEAGYIISLKKSNIANSIVDFLGFQITNEGRGLTDTFKEKLENITAPTTLKQLQSILGLLNFARNFIPDFTELIAPLYALIPKSPKNYVPWQIEHSTTLETLITKLNGAEYLQGRKGDKTLIMKVNASYTTGYIRYYNEGEKKPISYVSIVFSKTELKFTELEKLLTTVHKGLLKALDLSMGQNIHVYSPIVSMQNIQKTPQTAKKALASRWLSWLSYLEDPRIRFFYDPQMPALKDLPAVDTGKDNKKHPSNFQHIFYTDGSAITSPTKEGHLNAGMGIVYFINKDGNLQKQQEWSISLGNHTAQFAEIAAFEFALKKCLPLGGNILVVTDSNYVAKAYNEELDVWASNGFVNNRKKPLKHISKWKSVADLKRLRPDVVVTHEPGHQKLDSSPHAYGNNLADQLATQASFKVHAGKRTADGSEFEKRTADGSEFESPKKKAKVE

SEQ ID NO: 1105 - protein, 2087 aa, synthetic construct
MPAAKRVKLDGGDKKYSIGLDIGTNSVGWAVITDEYKVPSKKFKVLGNTDRHSIKKNLIGALLFDSGETAEATRLKRTARRRYTRRKNRICYLQEIFSNEMAKVDDSFFHRLEESFLVEEDKKHERHPIFGNIVDEVAYHEKYPTIYHLRKKLVDSTDKADLRLIYLALAHMIKFRGHFLIEGDLNPDNSDVDKLFIQLVQTYNQLFEENPINASGVDAKAILSARLSKSRRLENLIAQLPGEKKNGLFGNLIALSLGLTPNFKSNFDLAEDAKLQLSKDTYDDDLDNLLAQIGDQYADLFLAAKNLSDAILLSDILRVNTEITKAPLSASMIKRYDEHHQDLTLLKALVRQQLPEKYKEIFFDQSKNGYAGYIDGGASQEEFYKFIKPILEKMDGTEELLVKLNREDLLRKQRTFDNGSIPHQIHLGELHAILRRQEDFYPFLKDNREKIEKILTFRIPYYVGPLARGNSRFAWMTRKSEETITPWNFEEVVDKGASAQSFIERMTNFDKNLPNEKVLPKHSLLYEYFTVYNELTKVKYVTEGMRKPAFLSGEQKKAIVDLLFKTNRKVTVKQLKEDYFKKIECFDSVEISGVEDRFNASLGTYHDLLKIIKDKDFLDNEENEDILEDIVLTLTLFEDREMIEERLKTYAHLFDDKVMKQLKRRRYTGWGRLSRKLINGIRDKQSGKTILDFLKSDGFANRNFMQLIHDDSLTFKEDIQKAQVSGQGDSLHEHIANLAGSPAIKKGILQTVKVVDELVKVMGRHKPENIVIEMARENQTTQKGQKNSRERMKRIEEGIKELGSQILKEHPVENTQLQNEKLYLYYLQNGRDMYVDQELDINRLSDYDVDHIVPQSFLKDDSIDNKVLTRSDKARGKSDNVPSEEVVKKMKNYWRQLLNAKLITQRKFDNLTKAERGGLSELDKAGFIKRQLVETRQITKHVAQILDSRMNTKYDENDKLIREVKVITLKSKLVSDFRKDFQFYKVREINNYHHAHDAYLNAVVGTALIKKYPKLESEFVYGDYKVYDVRKMIAKSEQEIGKATAKYFFYSNIMNFFKTEITLANGEIRKRPLIETNGETGEIVWDKGRDFATVRKVLSMPQVNIVKKTEVQTGGFSKESILPKRNSDKLIARKKDWDPKKYGGFDSPTVAYSVLVVAKVEKGKSKKLKSVKELLGITIMERSSFEKNPIDFLEAKGYKEVKKDLIIKLPKYSLFELENGRKRMLASAGELQKGNELALPSKYVNFLYLASHYEKLKGSPEDNEQKQLFVEQHKHYLDEIIEQISEFSKRVILADANLDKVLSAYNKHRDKPIREQAENIIHLFTLTNLGAPAAFKYFDTTIDRKRYTSTKEVLDATLIHQSITGLYETRIDLSQLGGDGGEAAAKPAPGGGGGVPWILKKPLELTIKLDLEEQQGTLLNNSILSKKGKEELKQLFEKYSALWQSWENQVGHRRIRPHKIATGTVKPTPQKQYHINPKAKPDIQIVINDLLKQGVLIQKESTMNTPVYPVPKPNGRWRMVLDYRAVNKVTPLIAVQNQHSYGILGSLFKGRYKTTIDLSNGFWAHPIVPEDYWITAFTWQGKQYCWTVLPQGFLNSPGLFNGDVVDLLQGIPNVEVYVDDVYISHDSEKEHLEYLDILFNRLKEAGYIISLKKSNIANSIVDFLGFQITNEGRGLTDTFKEKLENITAPTTLKQLQSILGLLNFARNFIPDFTELIAPLYALIPKSPKNYVPWQIEHSTTLETLITKLNGAEYLQGRKGDKTLIMKVNASYTTGYIRYYNEGEKKPISYVSIVFSKTELKFTELEKLLTTVHKGLLKALDLSMGQNIHVYSPIVSMQNIQKTPQTAKKALASRWLSWLSYLEDPRIRFFYDPQMPALKDLPAVDTGKDNKKHPSNFQHIFYTDGSAITSPTKEGHLNAGMGIVYFINKDGNLQKQQEWSISLGNHTAQFAEIAAFEFALKKCLPLGGNILVVTDSNYVAKAYNEELDVWASNGFVNNRKKPLKHISKWKSVADLKRLRPDVVVTHEPGHQKLDSSPHAYGNNLADQLATQASFKVHAGKRTADGSEFEKRTADGSEFESPKKKAKVE

SEQ ID NO: 1106 - protein, 2087 aa, synthetic construct
MPAAKRVKLDGGDKKYSIGLDIGTNSVGWAVITDEYKVPSKKFKVLGNTDRHSIKKNLIGALLFDSGETAEATRLKRTARRRYTRRKNRICYLQEIFSNEMAKVDDSFFHRLEESFLVEEDKKHERHPIFGNIVDEVAYHEKYPTIYHLRKKLVDSTDKADLRLIYLALAHMIKFRGHFLIEGDLNPDNSDVDKLFIQLVQTYNQLFEENPINASGVDAKAILSARLSKSRRLENLIAQLPGEKKNGLFGNLIALSLGLTPNFKSNFDLAEDAKLQLSKDTYDDDLDNLLAQIGDQYADLFLAAKNLSDAILLSDILRVNTEITKAPLSASMIKRYDEHHQDLTLLKALVRQQLPEKYKEIFFDQSKNGYAGYIDGGASQEEFYKFIKPILEKMDGTEELLVKLNREDLLRKQRTFDNGSIPHQIHLGELHAILRRQEDFYPFLKDNREKIEKILTFRIPYYVGPLARGNSRFAWMTRKSEETITPWNFEEVVDKGASAQSFIERMTNFDKNLPNEKVLPKHSLLYEYFTVYNELTKVKYVTEGMRKPAFLSGEQKKAIVDLLFKTNRKVTVKQLKEDYFKKIECFDSVEISGVEDRFNASLGTYHDLLKIIKDKDFLDNEENEDILEDIVLTLTLFEDREMIEERLKTYAHLFDDKVMKQLKRRRYTGWGRLSRKLINGIRDKQSGKTILDFLKSDGFANRNFMQLIHDDSLTFKEDIQKAQVSGQGDSLHEHIANLAGSPAIKKGILQTVKVVDELVKVMGRHKPENIVIEMARENQTTQKGQKNSRERMKRIEEGIKELGSQILKEHPVENTQLQNEKLYLYYLQNGRDMYVDQELDINRLSDYDVDHIVPQSFLKDDSIDNKVLTRSDKARGKSDNVPSEEVVKKMKNYWRQLLNAKLITQRKFDNLTKAERGGLSELDKAGFIKRQLVETRQITKHVAQILDSRMNTKYDENDKLIREVKVITLKSKLVSDFRKDFQFYKVREINNYHHAHDAYLNAVVGTALIKKYPKLESEFVYGDYKVYDVRKMIAKSEQEIGKATAKYFFYSNIMNFFKTEITLANGEIRKRPLIETNGETGEIVWDKGRDFATVRKVLSMPQVNIVKKTEVQTGGFSKESILPKRNSDKLIARKKDWDPKKYGGFDSPTVAYSVLVVAKVEKGKSKKLKSVKELLGITIMERSSFEKNPIDFLEAKGYKEVKKDLIIKLPKYSLFELENGRKRMLASAGELQKGNELALPSKYVNFLYLASHYEKLKGSPEDNEQKQLFVEQHKHYLDEIIEQISEFSKRVILADANLDKVLSAYNKHRDKPIREQAENIIHLFTLTNLGAPAAFKYFDTTIDRKRYTSTKEVLDATLIHQSITGLYETRIDLSQLGGDGGGGSGGGEAAAKGGVPWILKKPLELTIKLDLEEQQGTLLNNSILSKKGKEELKQLFEKYSALWQSWENQVGHRRIRPHKIATGTVKPTPQKQYHINPKAKPDIQIVINDLLKQGVLIQKESTMNTPVYPVPKPNGRWRMVLDYRAVNKVTPLIAVQNQHSYGILGSLFKGRYKTTIDLSNGFWAHPIVPEDYWITAFTWQGKQYCWTVLPQGFLNSPGLFNGDVVDLLQGIPNVEVYVDDVYISHDSEKEHLEYLDILFNRLKEAGYIISLKKSNIANSIVDFLGFQITNEGRGLTDTFKEKLENITAPTTLKQLQSILGLLNFARNFIPDFTELIAPLYALIPKSPKNYVPWQIEHSTTLETLITKLNGAEYLQGRKGDKTLIMKVNASYTTGYIRYYNEGEKKPISYVSIVFSKTELKFTELEKLLTTVHKGLLKALDLSMGQNIHVYSPIVSMQNIQKTPQTAKKALASRWLSWLSYLEDPRIRFFYDPQMPALKDLPAVDTGKDNKKHPSNFQHIFYTDGSAITSPTKEGHLNAGMGIVYFINKDGNLQKQQEWSISLGNHTAQFAEIAAFEFALKKCLPLGGNILVVTDSNYVAKAYNEELDVWASNGFVNNRKKPLKHISKWKSVADLKRLRPDVVVTHEPGHQKLDSSPHAYGNNLADQLATQASFKVHAGKRTADGSEFEKRTADGSEFESPKKKAKVE

SEQ ID NO: 1107 - protein, 2082 aa, synthetic construct
MPAAKRVKLDGGDKKYSIGLDIGTNSVGWAVITDEYKVPSKKFKVLGNTDRHSIKKNLIGALLFDSGETAEATRLKRTARRRYTRRKNRICYLQEIFSNEMAKVDDSFFHRLEESFLVEEDKKHERHPIFGNIVDEVAYHEKYPTIYHLRKKLVDSTDKADLRLIYLALAHMIKFRGHFLIEGDLNPDNSDVDKLFIQLVQTYNQLFEENPINASGVDAKAILSARLSKSRRLENLIAQLPGEKKNGLFGNLIALSLGLTPNFKSNFDLAEDAKLQLSKDTYDDDLDNLLAQIGDQYADLFLAAKNLSDAILLSDILRVNTEITKAPLSASMIKRYDEHHQDLTLLKALVRQQLPEKYKEIFFDQSKNGYAGYIDGGASQEEFYKFIKPILEKMDGTEELLVKLNREDLLRKQRTFDNGSIPHQIHLGELHAILRRQEDFYPFLKDNREKIEKILTFRIPYYVGPLARGNSRFAWMTRKSEETITPWNFEEVVDKGASAQSFIERMTNFDKNLPNEKVLPKHSLLYEYFTVYNELTKVKYVTEGMRKPAFLSGEQKKAIVDLLFKTNRKVTVKQLKEDYFKKIECFDSVEISGVEDRFNASLGTYHDLLKIIKDKDFLDNEENEDILEDIVLTLTLFEDREMIEERLKTYAHLFDDKVMKQLKRRRYTGWGRLSRKLINGIRDKQSGKTILDFLKSDGFANRNFMQLIHDDSLTFKEDIQKAQVSGQGDSLHEHIANLAGSPAIKKGILQTVKVVDELVKVMGRHKPENIVIEMARENQTTQKGQKNSRERMKRIEEGIKELGSQILKEHPVENTQLQNEKLYLYYLQNGRDMYVDQELDINRLSDYDVDHIVPQSFLKDDSIDNKVLTRSDKARGKSDNVPSEEVVKKMKNYWRQLLNAKLITQRKFDNLTKAERGGLSELDKAGFIKRQLVETRQITKHVAQILDSRMNTKYDENDKLIREVKVITLKSKLVSDFRKDFQFYKVREINNYHHAHDAYLNAVVGTALIKKYPKLESEFVYGDYKVYDVRKMIAKSEQEIGKATAKYFFYSNIMNFFKTEITLANGEIRKRPLIETNGETGEIVWDKGRDFATVRKVLSMPQVNIVKKTEVQTGGFSKESILPKRNSDKLIARKKDWDPKKYGGFDSPTVAYSVLVVAKVEKGKSKKLKSVKELLGITIMERSSFEKNPIDFLEAKGYKEVKKDLIIKLPKYSLFELENGRKRMLASAGELQKGNELALPSKYVNFLYLASHYEKLKGSPEDNEQKQLFVEQHKHYLDEIIEQISEFSKRVILADANLDKVLSAYNKHRDKPIREQAENIIHLFTLTNLGAPAAFKYFDTTIDRKRYTSTKEVLDATLIHQSITGLYETRIDLSQLGGDGGPAPGGSGGVPWILKKPLELTIKLDLEEQQGTLLNNSILSKKGKEELKQLFEKYSALWQSWENQVGHRRIRPHKIATGTVKPTPQKQYHINPKAKPDIQIVINDLLKQGVLIQKESTMNTPVYPVPKPNGRWRMVLDYRAVNKVTPLIAVQNQHSYGILGSLFKGRYKTTIDLSNGFWAHPIVPEDYWITAFTWQGKQYCWTVLPQGFLNSPGLFNGDVVDLLQGIPNVEVYVDDVYISHDSEKEHLEYLDILFNRLKEAGYIISLKKSNIANSIVDFLGFQITNEGRGLTDTFKEKLENITAPTTLKQLQSILGLLNFARNFIPDFTELIAPLYALIPKSPKNYVPWQIEHSTTLETLITKLNGAEYLQGRKGDKTLIMKVNASYTTGYIRYYNEGEKKPISYVSIVFSKTELKFTELEKLLTTVHKGLLKALDLSMGQNIHVYSPIVSMQNIQKTPQTAKKALASRWLSWLSYLEDPRIRFFYDPQMPALKDLPAVDTGKDNKKHPSNFQHIFYTDGSAITSPTKEGHLNAGMGIVYFINKDGNLQKQQEWSISLGNHTAQFAEIAAFEFALKKCLPLGGNILVVTDSNYVAKAYNEELDVWASNGFVNNRKKPLKHISKWKSVADLKRLRPDVVVTHEPGHQKLDSSPHAYGNNLADQLATQASFKVHAGKRTADGSEFEKRTADGSEFESPKKKAKVE

SEQ ID NO: 1108 - protein, 2084 aa, synthetic construct
MPAAKRVKLDGGDKKYSIGLDIGTNSVGWAVITDEYKVPSKKFKVLGNTDRHSIKKNLIGALLFDSGETAEATRLKRTARRRYTRRKNRICYLQEIFSNEMAKVDDSFFHRLEESFLVEEDKKHERHPIFGNIVDEVAYHEKYPTIYHLRKKLVDSTDKADLRLIYLALAHMIKFRGHFLIEGDLNPDNSDVDKLFIQLVQTYNQLFEENPINASGVDAKAILSARLSKSRRLENLIAQLPGEKKNGLFGNLIALSLGLTPNFKSNFDLAEDAKLQLSKDTYDDDLDNLLAQIGDQYADLFLAAKNLSDAILLSDILRVNTEITKAPLSASMIKRYDEHHQDLTLLKALVRQQLPEKYKEIFFDQSKNGYAGYIDGGASQEEFYKFIKPILEKMDGTEELLVKLNREDLLRKQRTFDNGSIPHQIHLGELHAILRRQEDFYPFLKDNREKIEKILTFRIPYYVGPLARGNSRFAWMTRKSEETITPWNFEEVVDKGASAQSFIERMTNFDKNLPNEKVLPKHSLLYEYFTVYNELTKVKYVTEGMRKPAFLSGEQKKAIVDLLFKTNRKVTVKQLKEDYFKKIECFDSVEISGVEDRFNASLGTYHDLLKIIKDKDFLDNEENEDILEDIVLTLTLFEDREMIEERLKTYAHLFDDKVMKQLKRRRYTGWGRLSRKLINGIRDKQSGKTILDFLKSDGFANRNFMQLIHDDSLTFKEDIQKAQVSGQGDSLHEHIANLAGSPAIKKGILQTVKVVDELVKVMGRHKPENIVIEMARENQTTQKGQKNSRERMKRIEEGIKELGSQILKEHPVENTQLQNEKLYLYYLQNGRDMYVDQELDINRLSDYDVDHIVPQSFLKDDSIDNKVLTRSDKARGKSDNVPSEEVVKKMKNYWRQLLNAKLITQRKFDNLTKAERGGLSELDKAGFIKRQLVETRQITKHVAQILDSRMNTKYDENDKLIREVKVITLKSKLVSDFRKDFQFYKVREINNYHHAHDAYLNAVVGTALIKKYPKLESEFVYGDYKVYDVRKMIAKSEQEIGKATAKYFFYSNIMNFFKTEITLANGEIRKRPLIETNGETGEIVWDKGRDFATVRKVLSMPQVNIVKKTEVQTGGFSKESILPKRNSDKLIARKKDWDPKKYGGFDSPTVAYSVLVVAKVEKGKSKKLKSVKELLGITIMERSSFEKNPIDFLEAKGYKEVKKDLIIKLPKYSLFELENGRKRMLASAGELQKGNELALPSKYVNFLYLASHYEKLKGSPEDNEQKQLFVEQHKHYLDEIIEQISEFSKRVILADANLDKVLSAYNKHRDKPIREQAENIIHLFTLTNLGAPAAFKYFDTTIDRKRYTSTKEVLDATLIHQSITGLYETRIDLSQLGGDGGGGGEAAAKGGVPWILKKPLELTIKLDLEEQQGTLLNNSILSKKGKEELKQLFEKYSALWQSWENQVGHRRIRPHKIATGTVKPTPQKQYHINPKAKPDIQIVINDLLKQGVLIQKESTMNTPVYPVPKPNGRWRMVLDYRAVNKVTPLIAVQNQHSYGILGSLFKGRYKTTIDLSNGFWAHPIVPEDYWITAFTWQGKQYCWTVLPQGFLNSPGLFNGDVVDLLQGIPNVEVYVDDVYISHDSEKEHLEYLDILFNRLKEAGYIISLKKSNIANSIVDFLGFQITNEGRGLTDTFKEKLENITAPTTLKQLQSILGLLNFARNFIPDFTELIAPLYALIPKSPKNYVPWQIEHSTTLETLITKLNGAEYLQGRKGDKTLIMKVNASYTTGYIRYYNEGEKKPISYVSIVFSKTELKFTELEKLLTTVHKGLLKALDLSMGQNIHVYSPIVSMQNIQKTPQTAKKALASRWLSWLSYLEDPRIRFFYDPQMPALKDLPAVDTGKDNKKHPSNFQHIFYTDGSAITSPTKEGHLNAGMGIVYFINKDGNLQKQQEWSISLGNHTAQFAEIAAFEFALKKCLPLGGNILVVTDSNYVAKAYNEELDVWASNGFVNNRKKPLKHISKWKSVADLKRLRPDVVVTHEPGHQKLDSSPHAYGNNLADQLATQASFKVHAGKRTADGSEFEKRTADGSEFESPKKKAKVE

SEQ ID NO: 1109 - protein, 2085 aa, synthetic construct
MPAAKRVKLDGGDKKYSIGLDIGTNSVGWAVITDEYKVPSKKFKVLGNTDRHSIKKNLIGALLFDSGETAEATRLKRTARRRYTRRKNRICYLQEIFSNEMAKVDDSFFHRLEESFLVEEDKKHERHPIFGNIVDEVAYHEKYPTIYHLRKKLVDSTDKADLRLIYLALAHMIKFRGHFLIEGDLNPDNSDVDKLFIQLVQTYNQLFEENPINASGVDAKAILSARLSKSRRLENLIAQLPGEKKNGLFGNLIALSLGLTPNFKSNFDLAEDAKLQLSKDTYDDDLDNLLAQIGDQYADLFLAAKNLSDAILLSDILRVNTEITKAPLSASMIKRYDEHHQDLTLLKALVRQQLPEKYKEIFFDQSKNGYAGYIDGGASQEEFYKFIKPILEKMDGTEELLVKLNREDLLRKQRTFDNGSIPHQIHLGELHAILRRQEDFYPFLKDNREKIEKILTFRIPYYVGPLARGNSRFAWMTRKSEETITPWNFEEVVDKGASAQSFIERMTNFDKNLPNEKVLPKHSLLYEYFTVYNELTKVKYVTEGMRKPAFLSGEQKKAIVDLLFKTNRKVTVKQLKEDYFKKIECFDSVEISGVEDRFNASLGTYHDLLKIIKDKDFLDNEENEDILEDIVLTLTLFEDREMIEERLKTYAHLFDDKVMKQLKRRRYTGWGRLSRKLINGIRDKQSGKTILDFLKSDGFANRNFMQLIHDDSLTFKEDIQKAQVSGQGDSLHEHIANLAGSPAIKKGILQTVKVVDELVKVMGRHKPENIVIEMARENQTTQKGQKNSRERMKRIEEGIKELGSQILKEHPVENTQLQNEKLYLYYLQNGRDMYVDQELDINRLSDYDVDHIVPQSFLKDDSIDNKVLTRSDKARGKSDNVPSEEVVKKMKNYWRQLLNAKLITQRKFDNLTKAERGGLSELDKAGFIKRQLVETRQITKHVAQILDSRMNTKYDENDKLIREVKVITLKSKLVSDFRKDFQFYKVREINNYHHAHDAYLNAVVGTALIKKYPKLESEFVYGDYKVYDVRKMIAKSEQEIGKATAKYFFYSNIMNFFKTEITLANGEIRKRPLIETNGETGEIVWDKGRDFATVRKVLSMPQVNIVKKTEVQTGGFSKESILPKRNSDKLIARKKDWDPKKYGGFDSPTVAYSVLVVAKVEKGKSKKLKSVKELLGITIMERSSFEKNPIDFLEAKGYKEVKKDLIIKLPKYSLFELENGRKRMLASAGELQKGNELALPSKYVNFLYLASHYEKLKGSPEDNEQKQLFVEQHKHYLDEIIEQISEFSKRVILADANLDKVLSAYNKHRDKPIREQAENIIHLFTLTNLGAPAAFKYFDTTIDRKRYTSTKEVLDATLIHQSITGLYETRIDLSQLGGDGGGGGGSSPAPGGVPWILKKPLELTIKLDLEEQQGTLLNNSILSKKGKEELKQLFEKYSALWQSWENQVGHRRIRPHKIATGTVKPTPQKQYHINPKAKPDIQIVINDLLKQGVLIQKESTMNTPVYPVPKPNGRWRMVLDYRAVNKVTPLIAVQNQHSYGILGSLFKGRYKTTIDLSNGFWAHPIVPEDYWITAFTWQGKQYCWTVLPQGFLNSPGLFNGDVVDLLQGIPNVEVYVDDVYISHDSEKEHLEYLDILFNRLKEAGYIISLKKSNIANSIVDFLGFQITNEGRGLTDTFKEKLENITAPTTLKQLQSILGLLNFARNFIPDFTELIAPLYALIPKSPKNYVPWQIEHSTTLETLITKLNGAEYLQGRKGDKTLIMKVNASYTTGYIRYYNEGEKKPISYVSIVFSKTELKFTELEKLLTTVHKGLLKALDLSMGQNIHVYSPIVSMQNIQKTPQTAKKALASRWLSWLSYLEDPRIRFFYDPQMPALKDLPAVDTGKDNKKHPSNFQHIFYTDGSAITSPTKEGHLNAGMGIVYFINKDGNLQKQQEWSISLGNHTAQFAEIAAFEFALKKCLPLGGNILVVTDSNYVAKAYNEELDVWASNGFVNNRKKPLKHISKWKSVADLKRLRPDVVVTHEPGHQKLDSSPHAYGNNLADQLATQASFKVHAGKRTADGSEFEKRTADGSEFESPKKKAKVE

SEQ ID NO: 1110 - protein, 2085 aa, synthetic construct
MPAAKRVKLDGGDKKYSIGLDIGTNSVGWAVITDEYKVPSKKFKVLGNTDRHSIKKNLIGALLFDSGETAEATRLKRTARRRYTRRKNRICYLQEIFSNEMAKVDDSFFHRLEESFLVEEDKKHERHPIFGNIVDEVAYHEKYPTIYHLRKKLVDSTDKADLRLIYLALAHMIKFRGHFLIEGDLNPDNSDVDKLFIQLVQTYNQLFEENPINASGVDAKAILSARLSKSRRLENLIAQLPGEKKNGLFGNLIALSLGLTPNFKSNFDLAEDAKLQLSKDTYDDDLDNLLAQIGDQYADLFLAAKNLSDAILLSDILRVNTEITKAPLSASMIKRYDEHHQDLTLLKALVRQQLPEKYKEIFFDQSKNGYAGYIDGGASQEEFYKFIKPILEKMDGTEELLVKLNREDLLRKQRTFDNGSIPHQIHLGELHAILRRQEDFYPFLKDNREKIEKILTFRIPYYVGPLARGNSRFAWMTRKSEETITPWNFEEVVDKGASAQSFIERMTNFDKNLPNEKVLPKHSLLYEYFTVYNELTKVKYVTEGMRKPAFLSGEQKKAIVDLLFKTNRKVTVKQLKEDYFKKIECFDSVEISGVEDRFNASLGTYHDLLKIIKDKDFLDNEENEDILEDIVLTLTLFEDREMIEERLKTYAHLFDDKVMKQLKRRRYTGWGRLSRKLINGIRDKQSGKTILDFLKSDGFANRNFMQLIHDDSLTFKEDIQKAQVSGQGDSLHEHIANLAGSPAIKKGILQTVKVVDELVKVMGRHKPENIVIEMARENQTTQKGQKNSRERMKRIEEGIKELGSQILKEHPVENTQLQNEKLYLYYLQNGRDMYVDQELDINRLSDYDVDHIVPQSFLKDDSIDNKVLTRSDKARGKSDNVPSEEVVKKMKNYWRQLLNAKLITQRKFDNLTKAERGGLSELDKAGFIKRQLVETRQITKHVAQILDSRMNTKYDENDKLIREVKVITLKSKLVSDFRKDFQFYKVREINNYHHAHDAYLNAVVGTALIKKYPKLESEFVYGDYKVYDVRKMIAKSEQEIGKATAKYFFYSNIMNFFKTEITLANGEIRKRPLIETNGETGEIVWDKGRDFATVRKVLSMPQVNIVKKTEVQTGGFSKESILPKRNSDKLIARKKDWDPKKYGGFDSPTVAYSVLVVAKVEKGKSKKLKSVKELLGITIMERSSFEKNPIDFLEAKGYKEVKKDLIIKLPKYSLFELENGRKRMLASAGELQKGNELALPSKYVNFLYLASHYEKLKGSPEDNEQKQLFVEQHKHYLDEIIEQISEFSKRVILADANLDKVLSAYNKHRDKPIREQAENIIHLFTLTNLGAPAAFKYFDTTIDRKRYTSTKEVLDATLIHQSITGLYETRIDLSQLGGDGGPAPGGSGSSGGVPWILKKPLELTIKLDLEEQQGTLLNNSILSKKGKEELKQLFEKYSALWQSWENQVGHRRIRPHKIATGTVKPTPQKQYHINPKAKPDIQIVINDLLKQGVLIQKESTMNTPVYPVPKPNGRWRMVLDYRAVNKVTPLIAVQNQHSYGILGSLFKGRYKTTIDLSNGFWAHPIVPEDYWITAFTWQGKQYCWTVLPQGFLNSPGLFNGDVVDLLQGIPNVEVYVDDVYISHDSEKEHLEYLDILFNRLKEAGYIISLKKSNIANSIVDFLGFQITNEGRGLTDTFKEKLENITAPTTLKQLQSILGKLNFARNFIPDFTELIAPLYALIPKSPKNYVPWQIEHSTTLETLITKLNGAEYLQGRKGDKTLIMKVNASYTTGYIRYYNEGEKKPISYVSIVFSKTELKFTELEKLLTTVHKGLLKALDLSMGQNIHVYSPIVSMQNIQKTPQTAKKALASRWLSWLSYLEDPRIRFFYDPQMPALKDLPAVDTGKDNKKHPSNFQHIFYTDGSAITSPTKEGHLNAGMGIVYFINKDGNLQKQQEWSISLGNHTAQFAEIAAFEFALKKCLPLGGNILVVTDSNYVAKAYNEELDVWASNGFVNNRKKPLKHISKWKSVADLKRLRPDVVVTHEPGHQKLDSSPHAYGNNLADQLATQASFKVHAGKRTADGSEFEKRTADGSEFESPKKKAKVE

SEQ ID NO: 1111 - protein, 2087 aa, synthetic construct
MPAAKRVKLDGGDKKYSIGLDIGTNSVGWAVITDEYKVPSKKFKVLGNTDRHSIKKNLIGALLFDSGETAEATRLKRTARRRYTRRKNRICYLQEIFSNEMAKVDDSFFHRLEESFLVEEDKKHERHPIFGNIVDEVAYHEKYPTIYHLRKKLVDSTDKADLRLIYLALAHMIKFRGHFLIEGDLNPDNSDVDKLFIQLVQTYNQLFEENPINASGVDAKAILSARLSKSRRLENLIAQLPGEKKNGLFGNLIALSLGLTPNFKSNFDLAEDAKLQLSKDTYDDDLDNLLAQIGDQYADLFLAAKNLSDAILLSDILRVNTEITKAPLSASMIKRYDEHHQDLTLLKALVRQQLPEKYKEIFFDQSKNGYAGYIDGGASQEEFYKFIKPILEKMDGTEELLVKLNREDLLRKQRTFDNGSIPHQIHLGELHAILRRQEDFYPFLKDNREKIEKILTFRIPYYVGPLARGNSRFAWMTRKSEETITPWNFEEVVDKGASAQSFIERMTNFDKNLPNEKVLPKHSLLYEYFTVYNELTKVKYVTEGMRKPAFLSGEQKKAIVDLLFKTNRKVTVKQLKEDYFKKIECFDSVEISGVEDRFNASLGTYHDLLKIIKDKDFLDNEENEDILEDIVLTLTLFEDREMIEERLKTYAHLFDDKVMKQLKRRRYTGWGRLSRKLINGIRDKQSGKTILDFLKSDGFANRNFMQLIHDDSLTFKEDIQKAQVSGQGDSLHEHIANLAGSPAIKKGILQTVKVVDELVKVMGRHKPENIVIEMARENQTTQKGQKNSRERMKRIEEGIKELGSQILKEHPVENTQLQNEKLYLYYLQNGRDMYVDQELDINRLSDYDVDHIVPQSFLKDDSIDNKVLTRSDKARGKSDNVPSEEVVKKMKNYWRQLLNAKLITQRKFDNLTKAERGGLSELDKAGFIKRQLVETRQITKHVAQILDSRMNTKYDENDKLIREVKVITLKSKLVSDFRKDFQFYKVREINNYHHAHDAYLNAVVGTALIKKYPKLESEFVYGDYKVYDVRKMIAKSEQEIGKATAKYFFYSNIMNFFKTEITLANGEIRKRPLIETNGETGEIVWDKGRDFATVRKVLSMPQVNIVKKTEVQTGGFSKESILPKRNSDKLIARKKDWDPKKYGGFDSPTVAYSVLVVAKVEKGKSKKLKSVKELLGITIMERSSFEKNPIDFLEAKGYKEVKKDLIIKLPKYSLFELENGRKRMLASAGELQKGNELALPSKYVNFLYLASHYEKLKGSPEDNEQKQLFVEQHKHYLDEIIEQISEFSKRVILADANLDKVLSAYNKHRDKPIREQAENIIHLFTLTNLGAPAAFKYFDTTIDRKRYTSTKEVLDATLIHQSITGLYETRIDLSQLGGDGGGSSEAAAKGGGGGVPWILKKPLELTIKLDLEEQQGTLLNNSILSKKGKEELKQLFEKYSALWQSWENQVGHRRIRPHKIATGTVKPTPQKQYHINPKAKPDIQIVINDLLKQGVLIQKESTMNTPVYPVPKPNGRWRMVLDYRAVNKVTPLIAVQNQHSYGILGSLFKGRYKTTIDLSNGFWAHPIVPEDYWITAFTWQGKQYCWTVLPQGFLNSPGLFNGDVVDLLQGIPNVEVYVDDVYISHDSEKEHLEYLDILFNRLKEAGYIISLKKSNIANSIVDFLGFQITNEGRGLTDTFKEKLENITAPTTLKQLQSILGKLNFARNFIPDFTELIAPLYALIPKSPKNYVPWQIEHSTTLETLITKLNGAEYLQGRKGDKTLIMKVNASYTTGYIRYYNEGEKKPISYVSIVFSKTELKFTELEKLLTTVHKGLLKALDLSMGQNIHVYSPIVSMQNIQKTPQTAKKALASRWLSWLSYLEDPRIRFFYDPQMPALKDLPAVDTGKDNKKHPSNFQHIFYTDGSAITSPTKEGHLNAGMGIVYFINKDGNLQKQQEWSISLGNHTAQFAEIAAFEFALKKCLPLGGNILVVTDSNYVAKAYNEELDVWASNGFVNNRKKPLKHISKWKSVADLKRLRPDVVVTHEPGHQKLDSSPHAYGNNLADQLATQASFKVHAGKRTADGSEFEKRTADGSEFESPKKKAKVE

SEQ ID NO: 1112 - protein, 2091 aa, synthetic construct
MPAAKRVKLDGGDKKYSIGLDIGTNSVGWAVITDEYKVPSKKFKVLGNTDRHSIKKNLIGALLFDSGETAEATRLKRTARRRYTRRKNRICYLQEIFSNEMAKVDDSFFHRLEESFLVEEDKKHERHPIFGNIVDEVAYHEKYPTIYHLRKKLVDSTDKADLRLIYLALAHMIKFRGHFLIEGDLNPDNSDVDKLFIQLVQTYNQLFEENPINASGVDAKAILSARLSKSRRLENLIAQLPGEKKNGLFGNLIALSLGLTPNFKSNFDLAEDAKLQLSKDTYDDDLDNLLAQIGDQYADLFLAAKNLSDAILLSDILRVNTEITKAPLSASMIKRYDEHHQDLTLLKALVRQQLPEKYKEIFFDQSKNGYAGYIDGGASQEEFYKFIKPILEKMDGTEELLVKLNREDLLRKQRTFDNGSIPHQIHLGELHAILRRQEDFYPFLKDNREKIEKILTFRIPYYVGPLARGNSRFAWMTRKSEETITPWNFEEVVDKGASAQSFIERMTNFDKNLPNEKVLPKHSLLYEYFTVYNELTKVKYVTEGMRKPAFLSGEQKKAIVDLLFKTNRKVTVKQLKEDYFKKIECFDSVEISGVEDRFNASLGTYHDLLKIIKDKDFLDNEENEDILEDIVLTLTLFEDREMIEERLKTYAHLFDDKVMKQLKRRRYTGWGRLSRKLINGIRDKQSGKTILDFLKSDGFANRNFMQLIHDDSLTFKEDIQKAQVSGQGDSLHEHIANLAGSPAIKKGILQTVKVVDELVKVMGRHKPENIVIEMARENQTTQKGQKNSRERMKRIEEGIKELGSQILKEHPVENTQLQNEKLYLYYLQNGRDMYVDQELDINRLSDYDVDHIVPQSFLKDDSIDNKVLTRSDKARGKSDNVPSEEVVKKMKNYWRQLLNAKLITQRKFDNLTKAERGGLSELDKAGFIKRQLVETRQITKHVAQILDSRMNTKYDENDKLIREVKVITLKSKLVSDFRKDFQFYKVREINNYHHAHDAYLNAVVGTALIKKYPKLESEFVYGDYKVYDVRKMIAKSEQEIGKATAKYFFYSNIMNFFKTEITLANGEIRKRPLIETNGETGEIVWDKGRDFATVRKVLSMPQVNIVKKTEVQTGGFSKESILPKRNSDKLIARKKDWDPKKYGGFDSPTVAYSVLVVAKVEKGKSKKLKSVKELLGITIMERSSFEKNPIDFLEAKGYKEVKKDLIIKLPKYSLFELENGRKRMLASAGELQKGNELALPSKYVNFLYLASHYEKLKGSPEDNEQKQLFVEQHKHYLDEIIEQISEFSKRVILADANLDKVLSAYNKHRDKPIREQAENIIHLFTLTNLGAPAAFKYFDTTIDRKRYTSTKEVLDATLIHQSITGLYETRIDLSQLGGDGGGSSGSSGSSGSSGSSGGVPWILKKPLELTIKLDLEEQQGTLLNNSILSKKGKEELKQLFEKYSALWQSWENQVGHRRIRPHKIATGTVKPTPQKQYHINPKAKPDIQIVINDLLKQGVLIQKESTMNTPVYPVPKPNGRWRMVLDYRAVNKVTPLIAVQNQHSYGILGSLFKGRYKTTIDLSNGFWAHPIVPEDYWITAFTWQGKQYCWTVLPQGFLNSPGLFNGDVVDLLQGIPNVEVYVDDVYISHDSEKEHLEYLDILFNRLKEAGYIISLKKSNIANSIVDFLGFQITNEGRGLTDTFKEKLENITAPTTLKQLQSILGKLNFARNFIPDFTELIAPLYALIPKSPKNYVPWQIEHSTTLETLITKLNGAEYLQGRKGDKTLIMKVNASYTTGYIRYYNEGEKKPISYVSIVFSKTELKFTELEKLLTTVHKGLLKALDLSMGQNIHVYSPIVSMQNIQKTPQTAKKALASRWLSWLSYLEDPRIRFFYDPQMPALKDLPAVDTGKDNKKHPSNFQHIFYTDGSAITSPTKEGHLNAGMGIVYFINKDGNLQKQQEWSISLGNHTAQFAEIAAFEFALKKCLPLGGNILVVTDSNYVAKAYNEELDVWASNGFVNNRKKPLKHISKWKSVADLKRLRPDVVVTHEPGHQKLDSSPHAYGNNLADQLATQASFKVHAGKRTADGSEFEKRTADGSEFESPKKKAKVE

SEQ ID NO: 1113 - protein, 2087 aa, synthetic construct
MPAAKRVKLDGGDKKYSIGLDIGTNSVGWAVITDEYKVPSKKFKVLGNTDRHSIKKNLIGALLFDSGETAEATRLKRTARRRYTRRKNRICYLQEIFSNEMAKVDDSFFHRLEESFLVEEDKKHERHPIFGNIVDEVAYHEKYPTIYHLRKKLVDSTDKADLRLIYLALAHMIKFRGHFLIEGDLNPDNSDVDKLFIQLVQTYNQLFEENPINASGVDAKAILSARLSKSRRLENLIAQLPGEKKNGLFGNLIALSLGLTPNFKSNFDLAEDAKLQLSKDTYDDDLDNLLAQIGDQYADLFLAAKNLSDAILLSDILRVNTEITKAPLSASMIKRYDEHHQDLTLLKALVRQQLPEKYKEIFFDQSKNGYAGYIDGGASQEEFYKFIKPILEKMDGTEELLVKLNREDLLRKQRTFDNGSIPHQIHLGELHAILRRQEDFYPFLKDNREKIEKILTFRIPYYVGPLARGNSRFAWMTRKSEETITPWNFEEVVDKGASAQSFIERMTNFDKNLPNEKVLPKHSLLYEYFTVYNELTKVKYVTEGMRKPAFLSGEQKKAIVDLLFKTNRKVTVKQLKEDYFKKIECFDSVEISGVEDRFNASLGTYHDLLKIIKDKDFLDNEENEDILEDIVLTLTLFEDREMIEERLKTYAHLFDDKVMKQLKRRRYTGWGRLSRKLINGIRDKQSGKTILDFLKSDGFANRNFMQLIHDDSLTFKEDIQKAQVSGQGDSLHEHIANLAGSPAIKKGILQTVKVVDELVKVMGRHKPENIVIEMARENQTTQKGQKNSRERMKRIEEGIKELGSQILKEHPVENTQLQNEKLYLYYLQNGRDMYVDQELDINRLSDYDVDHIVPQSFLKDDSIDNKVLTRSDKARGKSDNVPSEEVVKKMKNYWRQLLNAKLITQRKFDNLTKAERGGLSELDKAGFIKRQLVETRQITKHVAQILDSRMNTKYDENDKLIREVKVITLKSKLVSDFRKDFQFYKVREINNYHHAHDAYLNAVVGTALIKKYPKLESEFVYGDYKVYDVRKMIAKSEQEIGKATAKYFFYSNIMNFFKTEITLANGEIRKRPLIETNGETGEIVWDKGRDFATVRKVLSMPQVNIVKKTEVQTGGFSKESILPKRNSDKLIARKKDWDPKKYGGFDSPTVAYSVLVVAKVEKGKSKKLKSVKELLGITIMERSSFEKNPIDFLEAKGYKEVKKDLIIKLPKYSLFELENGRKRMLASAGELQKGNELALPSKYVNFLYLASHYEKLKGSPEDNEQKQLFVEQHKHYLDEIIEQISEFSKRVILADANLDKVLSAYNKHRDKPIREQAENIIHLFTLTNLGAPAAFKYFDTTIDRKRYTSTKEVLDATLIHQSITGLYETRIDLSQLGGDGGGGSEAAAKGGGGGVPWILKKPLELTIKLDLEEQQGTLLNNSILSKKGKEELKQLFEKYSALWQSWENQVGHRRIRPHKIATGTVKPTPQKQYHINPKAKPDIQIVINDLLKQGVLIQKESTMNTPVYPVPKPNGRWRMVLDYRAVNKVTPLIAVQNQHSYGILGSLFKGRYKTTIDLSNGFWAHPIVPEDYWITAFTWQGKQYCWTVLPQGFLNSPGLFNGDVVDLLQGIPNVEVYVDDVYISHDSEKEHLEYLDILFNRLKEAGYIISLKKSNIANSIVDFLGFQITNEGRGLTDTFKEKLENITAPTTLKQLQSILGKLNFARNFIPDFTELIAPLYALIPKSPKNYVPWQIEHSTTLETLITKLNGAEYLQGRKGDKTLIMKVNASYTTGYIRYYNEGEKKPISYVSIVFSKTELKFTELEKLLTTVHKGLLKALDLSMGQNIHVYSPIVSMQNIQKTPQTAKKALASRWLSWLSYLEDPRIRFFYDPQMPALKDLPAVDTGKDNKKHPSNFQHIFYTDGSAITSPTKEGHLNAGMGIVYFINKDGNLQKQQEWSISLGNHTAQFAEIAAFEFALKKCLPLGGNILVVTDSNYVAKAYNEELDVWASNGFVNNRKKPLKHISKWKSVADLKRLRPDVVVTHEPGHQKLDSSPHAYGNNLADQLATQASFKVHAGKRTADGSEFEKRTADGSEFESPKKKAKVE

SEQ ID NO: 1114 - protein, 2087 aa, synthetic construct
MPAAKRVKLDGGDKKYSIGLDIGTNSVGWAVITDEYKVPSKKFKVLGNTDRHSIKKNLIGALLFDSGETAEATRLKRTARRRYTRRKNRICYLQEIFSNEMAKVDDSFFHRLEESFLVEEDKKHERHPIFGNIVDEVAYHEKYPTIYHLRKKLVDSTDKADLRLIYLALAHMIKFRGHFLIEGDLNPDNSDVDKLFIQLVQTYNQLFEENPINASGVDAKAILSARLSKSRRLENLIAQLPGEKKNGLFGNLIALSLGLTPNFKSNFDLAEDAKLQLSKDTYDDDLDNLLAQIGDQYADLFLAAKNLSDAILLSDILRVNTEITKAPLSASMIKRYDEHHQDLTLLKALVRQQLPEKYKEIFFDQSKNGYAGYIDGGASQEEFYKFIKPILEKMDGTEELLVKLNREDLLRKQRTFDNGSIPHQIHLGELHAILRRQEDFYPFLKDNREKIEKILTFRIPYYVGPLARGNSRFAWMTRKSEETITPWNFEEVVDKGASAQSFIERMTNFDKNLPNEKVLPKHSLLYEYFTVYNELTKVKYVTEGMRKPAFLSGEQKKAIVDLLFKTNRKVTVKQLKEDYFKKIECFDSVEISGVEDRFNASLGTYHDLLKIIKDKDFLDNEENEDILEDIVLTLTLFEDREMIEERLKTYAHLFDDKVMKQLKRRRYTGWGRLSRKLINGIRDKQSGKTILDFLKSDGFANRNFMQLIHDDSLTFKEDIQKAQVSGQGDSLHEHIANLAGSPAIKKGILQTVKVVDELVKVMGRHKPENIVIEMARENQTTQKGQKNSRERMKRIEEGIKELGSQILKEHPVENTQLQNEKLYLYYLQNGRDMYVDQELDINRLSDYDVDHIVPQSFLKDDSIDNKVLTRSDKARGKSDNVPSEEVVKKMKNYWRQLLNAKLITQRKFDNLTKAERGGLSELDKAGFIKRQLVETRQITKHVAQILDSRMNTKYDENDKLIREVKVITLKSKLVSDFRKDFQFYKVREINNYHHAHDAYLNAVVGTALIKKYPKLESEFVYGDYKVYDVRKMIAKSEQEIGKATAKYFFYSNIMNFFKTEITLANGEIRKRPLIETNGETGEIVWDKGRDFATVRKVLSMPQVNIVKKTEVQTGGFSKESILPKRNSDKLIARKKDWDPKKYGGFDSPTVAYSVLVVAKVEKGKSKKLKSVKELLGITIMERSSFEKNPIDFLEAKGYKEVKKDLIIKLPKYSLFELENGRKRMLASAGELQKGNELALPSKYVNFLYLASHYEKLKGSPEDNEQKQLFVEQHKHYLDEIIEQISEFSKRVILADANLDKVLSAYNKHRDKPIREQAENIIHLFTLTNLGAPAAFKYFDTTIDRKRYTSTKEVLDATLIHQSITGLYETRIDLSQLGGDGGGGGEAAAKGGSGGVPWILKKPLELTIKLDLEEQQGTLLNNSILSKKGKEELKQLFEKYSALWQSWENQVGHRRIRPHKIATGTVKPTPQKQYHINPKAKPDIQIVINDLLKQGVLIQKESTMNTPVYPVPKPNGRWRMVLDYRAVNKVTPLIAVQNQHSYGILGSLFKGRYKTTIDLSNGFWAHPIVPEDYWITAFTWQGKQYCWTVLPQGFLNSPGLFNGDVVDLLQGIPNVEVYVDDVYISHDSEKEHLEYLDILFNRLKEAGYIISLKKSNIANSIVDFLGFQITNEGRGLTDTFKEKLENITAPTTLKQLQSILGKLNFARNFIPDFTELIAPLYALIPKSPKNYVPWQIEHSTTLETLITKLNGAEYLQGRKGDKTLIMKVNASYTTGYIRYYNEGEKKPISYVSIVFSKTELKFTELEKLLTTVHKGLLKALDLSMGQNIHVYSPIVSMQNIQKTPQTAKKALASRWLSWLSYLEDPRIRFFYDPQMPALKDLPAVDTGKDNKKHPSNFQHIFYTDGSAITSPTKEGHLNAGMGIVYFINKDGNLQKQQEWSISLGNHTAQFAEIAAFEFALKKCLPLGGNILVVTDSNYVAKAYNEELDVWASNGFVNNRKKPLKHISKWKSVADLKRLRPDVVVTHEPGHQKLDSSPHAYGNNLADQLATQASFKVHAGKRTADGSEFEKRTADGSEFESPKKKAKVE

SEQ ID NO: 1115 - protein, 2208 aa, synthetic construct
MPAAKRVKLDGGDKKYSIGLDIGTNSVGWAVITDEYKVPSKKFKVLGNTDRHSIKKNLIGALLFDSGETAEATRLKRTARRRYTRRKNRICYLQEIFSNEMAKVDDSFFHRLEESFLVEEDKKHERHPIFGNIVDEVAYHEKYPTIYHLRKKLVDSTDKADLRLIYLALAHMIKFRGHFLIEGDLNPDNSDVDKLFIQLVQTYNQLFEENPINASGVDAKAILSARLSKSRRLENLIAQLPGEKKNGLFGNLIALSLGLTPNFKSNFDLAEDAKLQLSKDTYDDDLDNLLAQIGDQYADLFLAAKNLSDAILLSDILRVNTEITKAPLSASMIKRYDEHHQDLTLLKALVRQQLPEKYKEIFFDQSKNGYAGYIDGGASQEEFYKFIKPILEKMDGTEELLVKLNREDLLRKQRTFDNGSIPHQIHLGELHAILRRQEDFYPFLKDNREKIEKILTFRIPYYVGPLARGNSRFAWMTRKSEETITPWNFEEVVDKGASAQSFIERMTNFDKNLPNEKVLPKHSLLYEYFTVYNELTKVKYVTEGMRKPAFLSGEQKKAIVDLLFKTNRKVTVKQLKEDYFKKIECFDSVEISGVEDRFNASLGTYHDLLKIIKDKDFLDNEENEDILEDIVLTLTLFEDREMIEERLKTYAHLFDDKVMKQLKRRRYTGWGRLSRKLINGIRDKQSGKTILDFLKSDGFANRNFMQLIHDDSLTFKEDIQKAQVSGQGDSLHEHIANLAGSPAIKKGILQTVKVVDELVKVMGRHKPENIVIEMARENQTTQKGQKNSRERMKRIEEGIKELGSQILKEHPVENTQLQNEKLYLYYLQNGRDMYVDQELDINRLSDYDVDHIVPQSFLKDDSIDNKVLTRSDKARGKSDNVPSEEVVKKMKNYWRQLLNAKLITQRKFDNLTKAERGGLSELDKAGFIKRQLVETRQITKHVAQILDSRMNTKYDENDKLIREVKVITLKSKLVSDFRKDFQFYKVREINNYHHAHDAYLNAVVGTALIKKYPKLESEFVYGDYKVYDVRKMIAKSEQEIGKATAKYFFYSNIMNFFKTEITLANGEIRKRPLIETNGETGEIVWDKGRDFATVRKVLSMPQVNIVKKTEVQTGGFSKESILPKRNSDKLIARKKDWDPKKYGGFDSPTVAYSVLVVAKVEKGKSKKLKSVKELLGITIMERSSFEKNPIDFLEAKGYKEVKKDLIIKLPKYSLFELENGRKRMLASAGELQKGNELALPSKYVNFLYLASHYEKLKGSPEDNEQKQLFVEQHKHYLDEIIEQISEFSKRVILADANLDKVLSAYNKHRDKPIREQAENIIHLFTLTNLGAPAAFKYFDTTIDRKRYTSTKEVLDATLIHQSITGLYETRIDLSQLGGDGGAEAAAKEAAAKEAAAKEAAAKALEAEAAAKEAAAKEAAAKEAAAKAGGMDLLKPLTVERKGVKIKGYWNSQADITCVPKDLLQGEEPVRQQNVTTIHGTQEGDVYYVNLKIDGRRINTEVIGTTLDYAIITPGDVPWILKKPLELTIKLDLEEQQGTLLNNSILSKKGKEELKQLFEKYSALWQSWENQVGHRRIRPHKIATGTVKPTPQKQYHINPKAKPDIQIVINDLLKQGVLIQKESTMNTPVYPVPKPNGRWRMVLDYRAVNKVTPLIAVQNQHSYGILGSLFKGRYKTTIDLSNGFWAHPIVPEDYWITAFTWQGKQYCWTVLPQGFLNSPGLFNGDVVDLLQGIPNVEVYVDDVYISHDSEKEHLEYLDILFNRLKEAGYIISLKKSNIANSIVDFLGFQITNEGRGLTDTFKEKLENITAPTTLKQLQSILGLLNFARNFIPDFTELIAPLYALIPKSPKNYVPWQIEHSTTLETLITKLNGAEYLQGRKGDKTLIMKVNASYTTGYIRYYNEGEKKPISYVSIVFSKTELKFTELEKLLTTVHKGLLKALDLSMGQNIHVYSPIVSMQNIQKTPQTAKKALASRWLSWLSYLEDPRIRFFYDPQMPALKDLPAVDTGKDNKKHPSNFQHIFYTDGSAITSPTKEGHLNAGMGIVYFINKDGNLQKQQEWSISLGNHTAQFAEIAAFEFALKKCLPLGGNILVVTDSNYVAKAYNEELDVWASNGFVNNRKKPLKHISKWKSVADLKRLRPDVVVTHEPGHQKLDSSPHAYGNNLADQLATQASFKVHAGKRTADGSEFEKRTADGSEFESPKKKAKVE

SEQ ID NO: 1116 - protein, 2182 aa, synthetic construct
MPAAKRVKLDGGDKKYSIGLDIGTNSVGWAVITDEYKVPSKKFKVLGNTDRHSIKKNLIGALLFDSGETAEATRLKRTARRRYTRRKNRICYLQEIFSNEMAKVDDSFFHRLEESFLVEEDKKHERHPIFGNIVDEVAYHEKYPTIYHLRKKLVDSTDKADLRLIYLALAHMIKFRGHFLIEGDLNPDNSDVDKLFIQLVQTYNQLFEENPINASGVDAKAILSARLSKSRRLENLIAQLPGEKKNGLFGNLIALSLGLTPNFKSNFDLAEDAKLQLSKDTYDDDLDNLLAQIGDQYADLFLAAKNLSDAILLSDILRVNTEITKAPLSASMIKRYDEHHQDLTLLKALVRQQLPEKYKEIFFDQSKNGYAGYIDGGASQEEFYKFIKPILEKMDGTEELLVKLNREDLLRKQRTFDNGSIPHQIHLGELHAILRRQEDFYPFLKDNREKIEKILTFRIPYYVGPLARGNSRFAWMTRKSEETITPWNFEEVVDKGASAQSFIERMTNFDKNLPNEKVLPKHSLLYEYFTVYNELTKVKYVTEGMRKPAFLSGEQKKAIVDLLFKTNRKVTVKQLKEDYFKKIECFDSVEISGVEDRFNASLGTYHDLLKIIKDKDFLDNEENEDILEDIVLTLTLFEDREMIEERLKTYAHLFDDKVMKQLKRRRYTGWGRLSRKLINGIRDKQSGKTILDFLKSDGFANRNFMQLIHDDSLTFKEDIQKAQVSGQGDSLHEHIANLAGSPAIKKGILQTVKVVDELVKVMGRHKPENIVIEMARENQTTQKGQKNSRERMKRIEEGIKELGSQILKEHPVENTQLQNEKLYLYYLQNGRDMYVDQELDINRLSDYDVDHIVPQSFLKDDSIDNKVLTRSDKARGKSDNVPSEEVVKKMKNYWRQLLNAKLITQRKFDNLTKAERGGLSELDKAGFIKRQLVETRQITKHVAQILDSRMNTKYDENDKLIREVKVITLKSKLVSDFRKDFQFYKVREINNYHHAHDAYLNAVVGTALIKKYPKLESEFVYGDYKVYDVRKMIAKSEQEIGKATAKYFFYSNIMNFFKTEITLANGEIRKRPLIETNGETGEIVWDKGRDFATVRKVLSMPQVNIVKKTEVQTGGFSKESILPKRNSDKLIARKKDWDPKKYGGFDSPTVAYSVLVVAKVEKGKSKKLKSVKELLGITIMERSSFEKNPIDFLEAKGYKEVKKDLIIKLPKYSLFELENGRKRMLASAGELQKGNELALPSKYVNFLYLASHYEKLKGSPEDNEQKQLFVEQHKHYLDEIIEQISEFSKRVILADANLDKVLSAYNKHRDKPIREQAENIIHLFTLTNLGAPAAFKYFDTTIDRKRYTSTKEVLDATLIHQSITGLYETRIDLSQLGGDGGEAAAKEAAAKEAAAKEAAAKGGMDLLKPLTVERKGVKIKGYWNSQADITCVPKDLLQGEEPVRQQNVTTIHGTQEGDVYYVNLKIDGRRINTEVIGTTLDYAIITPGDVPWILKKPLELTIKLDLEEQQGTLLNNSILSKKGKEELKQLFEKYSALWQSWENQVGHRRIRPHKIATGTVKPTPQKQYHINPKAKPDIQIVINDLLKQGVLIQKESTMNTPVYPVPKPNGRWRMVLDYRAVNKVTPLIAVQNQHSYGILGSLFKGRYKTTIDLSNGFWAHPIVPEDYWITAFTWQGKQYCWTVLPQGFLNSPGLFNGDVVDLLQGIPNVEVYVDDVYISHDSEKEHLEYLDILFNRLKEAGYIISLKKSNIANSIVDFLGFQITNEGRGLTDTFKEKLENITAPTTLKQLQSILGLLNFARNFIPDFTELIAPLYALIPKSPKNYVPWQIEHSTTLETLITKLNGAEYLQGRKGDKTLIMKVNASYTTGYIRYYNEGEKKPISYVSIVFSKTELKFTELEKLLTTVHKGLLKALDLSMGQNIHVYSPIVSMQNIQKTPQTAKKALASRWLSWLSYLEDPRIRFFYDPQMPALKDLPAVDTGKDNKKHPSNFQHIFYTDGSAITSPTKEGHLNAGMGIVYFINKDGNLQKQQEWSISLGNHTAQFAEIAAFEFALKKCLPLGGNILVVTDSNYVAKAYNEELDVWASNGFVNNRKKPLKHISKWKSVADLKRLRPDVVVTHEPGHQKLDSSPHAYGNNLADQLATQASFKVHAGKRTADGSEFEKRTADGSEFESPKKKAKVE

SEQ ID NO: 1117 - protein, 2171 aa, synthetic construct
MPAAKRVKLDGGDKKYSIGLDIGTNSVGWAVITDEYKVPSKKFKVLGNTDRHSIKKNLIGALLFDSGETAEATRLKRTARRRYTRRKNRICYLQEIFSNEMAKVDDSFFHRLEESFLVEEDKKHERHPIFGNIVDEVAYHEKYPTIYHLRKKLVDSTDKADLRLIYLALAHMIKFRGHFLIEGDLNPDNSDVDKLFIQLVQTYNQLFEENPINASGVDAKAILSARLSKSRRLENLIAQLPGEKKNGLFGNLIALSLGLTPNFKSNFDLAEDAKLQLSKDTYDDDLDNLLAQIGDQYADLFLAAKNLSDAILLSDILRVNTEITKAPLSASMIKRYDEHHQDLTLLKALVRQQLPEKYKEIFFDQSKNGYAGYIDGGASQEEFYKFIKPILEKMDGTEELLVKLNREDLLRKQRTFDNGSIPHQIHLGELHAILRRQEDFYPFLKDNREKIEKILTFRIPYYVGPLARGNSRFAWMTRKSEETITPWNFEEVVDKGASAQSFIERMTNFDKNLPNEKVLPKHSLLYEYFTVYNELTKVKYVTEGMRKPAFLSGEQKKAIVDLLFKTNRKVTVKQLKEDYFKKIECFDSVEISGVEDRFNASLGTYHDLLKIIKDKDFLDNEENEDILEDIVLTLTLFEDREMIEERLKTYAHLFDDKVMKQLKRRRYTGWGRLSRKLINGIRDKQSGKTILDFLKSDGFANRNFMQLIHDDSLTFKEDIQKAQVSGQGDSLHEHIANLAGSPAIKKGILQTVKVVDELVKVMGRHKPENIVIEMARENQTTQKGQKNSRERMKRIEEGIKELGSQILKEHPVENTQLQNEKLYLYYLQNGRDMYVDQELDINRLSDYDVDHIVPQSFLKDDSIDNKVLTRSDKARGKSDNVPSEEVVKKMKNYWRQLLNAKLITQRKFDNLTKAERGGLSELDKAGFIKRQLVETRQITKHVAQILDSRMNTKYDENDKLIREVKVITLKSKLVSDFRKDFQFYKVREINNYHHAHDAYLNAVVGTALIKKYPKLESEFVYGDYKVYDVRKMIAKSEQEIGKATAKYFFYSNIMNFFKTEITLANGEIRKRPLIETNGETGEIVWDKGRDFATVRKVLSMPQVNIVKKTEVQTGGFSKESILPKRNSDKLIARKKDWDPKKYGGFDSPTVAYSVLVVAKVEKGKSKKLKSVKELLGITIMERSSFEKNPIDFLEAKGYKEVKKDLIIKLPKYSLFELENGRKRMLASAGELQKGNELALPSKYVNFLYLASHYEKLKGSPEDNEQKQLFVEQHKHYLDEIIEQISEFSKRVILADANLDKVLSAYNKHRDKPIREQAENIIHLFTLTNLGAPAAFKYFDTTIDRKRYTSTKEVLDATLIHQSITGLYETRIDLSQLGGDGGGSSPAPGGGGGMDLLKPLTVERKGVKIKGYWNSQADITCVPKDLLQGEEPVRQQNVTTIHGTQEGDVYYVNLKIDGRRINTEVIGTTLDYAIITPGDVPWILKKPLELTIKLDLEEQQGTLLNNSILSKKGKEELKQLFEKYSALWQSWENQVGHRRIRPHKIATGTVKPTPQKQYHINPKAKPDIQIVINDLLKQGVLIQKESTMNTPVYPVPKPNGRWRMVLDYRAVNKVTPLIAVQNQHSYGILGSLFKGRYKTTIDLSNGFWAHPIVPEDYWITAFTWQGKQYCWTVLPQGFLNSPGLFNGDVVDLLQGIPNVEVYVDDVYISHDSEKEHLEYLDILFNRLKEAGYIISLKKSNIANSIVDFLGFQITNEGRGLTDTFKEKLENITAPTTLKQLQSILGLLNFARNFIPDFTELIAPLYALIPKSPKNYVPWQIEHSTTLETLITKLNGAEYLQGRKGDKTLIMKVNASYTTGYIRYYNEGEKKPISYVSIVFSKTELKFTELEKLLTTVHKGLLKALDLSMGQNIHVYSPIVSMQNIQKTPQTAKKALASRWLSWLSYLEDPRIRFFYDPQMPALKDLPAVDTGKDNKKHPSNFQHIFYTDGSAITSPTKEGHLNAGMGIVYFINKDGNLQKQQEWSISLGNHTAQFAEIAAFEFALKKCLPLGGNILVVTDSNYVAKAYNEELDVWASNGFVNNRKKPLKHISKWKSVADLKRLRPDVVVTHEPGHQKLDSSPHAYGNNLADQLATQASFKVHAGKRTADGSEFEKRTADGSEFESPKKKAKVE

SEQ ID NO: 1118 - protein, 2173 aa, synthetic construct
MPAAKRVKLDGGDKKYSIGLDIGTNSVGWAVITDEYKVPSKKFKVLGNTDRHSIKKNLIGALLFDSGETAEATRLKRTARRRYTRRKNRICYLQEIFSNEMAKVDDSFFHRLEESFLVEEDKKHERHPIFGNIVDEVAYHEKYPTIYHLRKKLVDSTDKADLRLIYLALAHMIKFRGHFLIEGDLNPDNSDVDKLFIQLVQTYNQLFEENPINASGVDAKAILSARLSKSRRLENLIAQLPGEKKNGLFGNLIALSLGLTPNFKSNFDLAEDAKLQLSKDTYDDDLDNLLAQIGDQYADLFLAAKNLSDAILLSDILRVNTEITKAPLSASMIKRYDEHHQDLTLLKALVRQQLPEKYKEIFFDQSKNGYAGYIDGGASQEEFYKFIKPILEKMDGTEELLVKLNREDLLRKQRTFDNGSIPHQIHLGELHAILRRQEDFYPFLKDNREKIEKILTFRIPYYVGPLARGNSRFAWMTRKSEETITPWNFEEVVDKGASAQSFIERMTNFDKNLPNEKVLPKHSLLYEYFTVYNELTKVKYVTEGMRKPAFLSGEQKKAIVDLLFKTNRKVTVKQLKEDYFKKIECFDSVEISGVEDRFNASLGTYHDLLKIIKDKDFLDNEENEDILEDIVLTLTLFEDREMIEERLKTYAHLFDDKVMKQLKRRRYTGWGRLSRKLINGIRDKQSGKTILDFLKSDGFANRNFMQLIHDDSLTFKEDIQKAQVSGQGDSLHEHIANLAGSPAIKKGILQTVKVVDELVKVMGRHKPENIVIEMARENQTTQKGQKNSRERMKRIEEGIKELGSQILKEHPVENTQLQNEKLYLYYLQNGRDMYVDQELDINRLSDYDVDHIVPQSFLKDDSIDNKVLTRSDKARGKSDNVPSEEVVKKMKNYWRQLLNAKLITQRKFDNLTKAERGGLSELDKAGFIKRQLVETRQITKHVAQILDSRMNTKYDENDKLIREVKVITLKSKLVSDFRKDFQFYKVREINNYHHAHDAYLNAVVGTALIKKYPKLESEFVYGDYKVYDVRKMIAKSEQEIGKATAKYFFYSNIMNFFKTEITLANGEIRKRPLIETNGETGEIVWDKGRDFATVRKVLSMPQVNIVKKTEVQTGGFSKESILPKRNSDKLIARKKDWDPKKYGGFDSPTVAYSVLVVAKVEKGKSKKLKSVKELLGITIMERSSFEKNPIDFLEAKGYKEVKKDLIIKLPKYSLFELENGRKRMLASAGELQKGNELALPSKYVNFLYLASHYEKLKGSPEDNEQKQLFVEQHKHYLDEIIEQISEFSKRVILADANLDKVLSAYNKHRDKPIREQAENIIHLFTLTNLGAPAAFKYFDTTIDRKRYTSTKEVLDATLIHQSITGLYETRIDLSQLGGDGGPAPEAAAKGGGGGMDLLKPLTVERKGVKIKGYWNSQADITCVPKDLLQGEEPVRQQNVTTIHGTQEGDVYYVNLKIDGRRINTEVIGTTLDYAIITPGDVPWILKKPLELTIKLDLEEQQGTLLNNSILSKKGKEELKQLFEKYSALWQSWENQVGHRRIRPHKIATGTVKPTPQKQYHINPKAKPDIQIVINDLLKQGVLIQKESTMNTPVYPVPKPNGRWRMVLDYRAVNKVTPLIAVQNQHSYGILGSLFKGRYKTTIDLSNGFWAHPIVPEDYWITAFTWQGKQYCWTVLPQGFLNSPGLFNGDVVDLLQGIPNVEVYVDDVYISHDSEKEHLEYLDILFNRLKEAGYIISLKKSNIANSIVDFLGFQITNEGRGLTDTFKEKLENITAPTTLKQLQSILGLLNFARNFIPDFTELIAPLYALIPKSPKNYVPWQIEHSTTLETLITKLNGAEYLQGRKGDKTLIMKVNASYTTGYIRYYNEGEKKPISYVSIVFSKTELKFTELEKLLTTVHKGLLKALDLSMGQNIHVYSPIVSMQNIQKTPQTAKKALASRWLSWLSYLEDPRIRFFYDPQMPALKDLPAVDTGKDNKKHPSNFQHIFYTDGSAITSPTKEGHLNAGMGIVYFINKDGNLQKQQEWSISLGNHTAQFAEIAAFEFALKKCLPLGGNILVVTDSNYVAKAYNEELDVWASNGFVNNRKKPLKHISKWKSVADLKRLRPDVVVTHEPGHQKLDSSPHAYGNNLADQLATQASFKVHAGKRTADGSEFEKRTADGSEFESPKKKAKVE

SEQ ID NO: 1119 - protein, 2182 aa, synthetic construct
MPAAKRVKLDGGDKKYSIGLDIGTNSVGWAVITDEYKVPSKKFKVLGNTDRHSIKKNLIGALLFDSGETAEATRLKRTARRRYTRRKNRICYLQEIFSNEMAKVDDSFFHRLEESFLVEEDKKHERHPIFGNIVDEVAYHEKYPTIYHLRKKLVDSTDKADLRLIYLALAHMIKFRGHFLIEGDLNPDNSDVDKLFIQLVQTYNQLFEENPINASGVDAKAILSARLSKSRRLENLIAQLPGEKKNGLFGNLIALSLGLTPNFKSNFDLAEDAKLQLSKDTYDDDLDNLLAQIGDQYADLFLAAKNLSDAILLSDILRVNTEITKAPLSASMIKRYDEHHQDLTLLKALVRQQLPEKYKEIFFDQSKNGYAGYIDGGASQEEFYKFIKPILEKMDGTEELLVKLNREDLLRKQRTFDNGSIPHQIHLGELHAILRRQEDFYPFLKDNREKIEKILTFRIPYYVGPLARGNSRFAWMTRKSEETITPWNFEEVVDKGASAQSFIERMTNFDKNLPNEKVLPKHSLLYEYFTVYNELTKVKYVTEGMRKPAFLSGEQKKAIVDLLFKTNRKVTVKQLKEDYFKKIECFDSVEISGVEDRFNASLGTYHDLLKIIKDKDFLDNEENEDILEDIVLTLTLFEDREMIEERLKTYAHLFDDKVMKQLKRRRYTGWGRLSRKLINGIRDKQSGKTILDFLKSDGFANRNFMQLIHDDSLTFKEDIQKAQVSGQGDSLHEHIANLAGSPAIKKGILQTVKVVDELVKVMGRHKPENIVIEMARENQTTQKGQKNSRERMKRIEEGIKELGSQILKEHPVENTQLQNEKLYLYYLQNGRDMYVDQELDINRLSDYDVDHIVPQSFLKDDSIDNKVLTRSDKARGKSDNVPSEEVVKKMKNYWRQLLNAKLITQRKFDNLTKAERGGLSELDKAGFIKRQLVETRQITKHVAQILDSRMNTKYDENDKLIREVKVITLKSKLVSDFRKDFQFYKVREINNYHHAHDAYLNAVVGTALIKKYPKLESEFVYGDYKVYDVRKMIAKSEQEIGKATAKYFFYSNIMNFFKTEITLANGEIRKRPLIETNGETGEIVWDKGRDFATVRKVLSMPQVNIVKKTEVQTGGFSKESILPKRNSDKLIARKKDWDPKKYGGFDSPTVAYSVLVVAKVEKGKSKKLKSVKELLGITIMERSSFEKNPIDFLEAKGYKEVKKDLIIKLPKYSLFELENGRKRMLASAGELQKGNELALPSKYVNFLYLASHYEKLKGSPEDNEQKQLFVEQHKHYLDEIIEQISEFSKRVILADANLDKVLSAYNKHRDKPIREQAENIIHLFTLTNLGAPAAFKYFDTTIDRKRYTSTKEVLDATLIHQSITGLYETRIDLSQLGGDGGGGGGSGGGGSGGGGSGGGGSGGMDLLKPLTVERKGVKIKGYWNSQADITCVPKDLLQGEEPVRQQNVTTIHGTQEGDVYYVNLKIDGRRINTEVIGTTLDYAIITPGDVPWILKKPLELTIKLDLEEQQGTLLNNSILSKKGKEELKQLFEKYSALWQSWENQVGHRRIRPHKIATGTVKPTPQKQYHINPKAKPDIQIVINDLLKQGVLIQKESTMNTPVYPVPKPNGRWRMVLDYRAVNKVTPLIAVQNQHSYGILGSLFKGRYKTTIDLSNGFWAHPIVPEDYWITAFTWQGKQYCWTVLPQGFLNSPGLFNGDVVDLLQGIPNVEVYVDDVYISHDSEKEHLEYLDILFNRLKEAGYIISLKKSNIANSIVDFLGFQITNEGRGLTDTFKEKLENITAPTTLKQLQSILGLLNFARNFIPDFTELIAPLYALIPKSPKNYVPWQIEHSTTLETLITKLNGAEYLQGRKGDKTLIMKVNASYTTGYIRYYNEGEKKPISYVSIVFSKTELKFTELEKLLTTVHKGLLKALDLSMGQNIHVYSPIVSMQNIQKTPQTAKKALASRWLSWLSYLEDPRIRFFYDPQMPALKDLPAVDTGKDNKKHPSNFQHIFYTDGSAITSPTKEGHLNAGMGIVYFINKDGNLQKQQEWSISLGNHTAQFAEIAAFEFALKKCLPLGGNILVVTDSNYVAKAYNEELDVWASNGFVNNRKKPLKHISKWKSVADLKRLRPDVVVTHEPGHQKLDSSPHAYGNNLADQLATQASFKVHAGKRTADGSEFEKRTADGSEFESPKKKAKVE

SEQ ID NO: 1120 - protein, 2171 aa, synthetic construct
MPAAKRVKLDGGDKKYSIGLDIGTNSVGWAVITDEYKVPSKKFKVLGNTDRHSIKKNLIGALLFDSGETAEATRLKRTARRRYTRRKNRICYLQEIFSNEMAKVDDSFFHRLEESFLVEEDKKHERHPIFGNIVDEVAYHEKYPTIYHLRKKLVDSTDKADLRLIYLALAHMIKFRGHFLIEGDLNPDNSDVDKLFIQLVQTYNQLFEENPINASGVDAKAILSARLSKSRRLENLIAQLPGEKKNGLFGNLIALSLGLTPNFKSNFDLAEDAKLQLSKDTYDDDLDNLLAQIGDQYADLFLAAKNLSDAILLSDILRVNTEITKAPLSASMIKRYDEHHQDLTLLKALVRQQLPEKYKEIFFDQSKNGYAGYIDGGASQEEFYKFIKPILEKMDGTEELLVKLNREDLLRKQRTFDNGSIPHQIHLGELHAILRRQEDFYPFLKDNREKIEKILTFRIPYYVGPLARGNSRFAWMTRKSEETITPWNFEEVVDKGASAQSFIERMTNFDKNLPNEKVLPKHSLLYEYFTVYNELTKVKYVTEGMRKPAFLSGEQKKAIVDLLFKTNRKVTVKQLKEDYFKKIECFDSVEISGVEDRFNASLGTYHDLLKIIKDKDFLDNEENEDILEDIVLTLTLFEDREMIEERLKTYAHLFDDKVMKQLKRRRYTGWGRLSRKLINGIRDKQSGKTILDFLKSDGFANRNFMQLIHDDSLTFKEDIQKAQVSGQGDSLHEHIANLAGSPAIKKGILQTVKVVDELVKVMGRHKPENIVIEMARENQTTQKGQKNSRERMKRIEEGIKELGSQILKEHPVENTQLQNEKLYLYYLQNGRDMYVDQELDINRLSDYDVDHIVPQSFLKDDSIDNKVLTRSDKARGKSDNVPSEEVVKKMKNYWRQLLNAKLITQRKFDNLTKAERGGLSELDKAGFIKRQLVETRQITKHVAQILDSRMNTKYDENDKLIREVKVITLKSKLVSDFRKDFQFYKVREINNYHHAHDAYLNAVVGTALIKKYPKLESEFVYGDYKVYDVRKMIAKSEQEIGKATAKYFFYSNIMNFFKTEITLANGEIRKRPLIETNGETGEIVWDKGRDFATVRKVLSMPQVNIVKKTEVQTGGFSKESILPKRNSDKLIARKKDWDPKKYGGFDSPTVAYSVLVVAKVEKGKSKKLKSVKELLGITIMERSSFEKNPIDFLEAKGYKEVKKDLIIKLPKYSLFELENGRKRMLASAGELQKGNELALPSKYVNFLYLASHYEKLKGSPEDNEQKQLFVEQHKHYLDEIIEQISEFSKRVILADANLDKVLSAYNKHRDKPIREQAENIIHLFTLTNLGAPAAFKYFDTTIDRKRYTSTKEVLDATLIHQSITGLYETRIDLSQLGGDGGPAPGGSGSSGGMDLLKPLTVERKGVKIKGYWNSQADITCVPKDLLQGEEPVRQQNVTTIHGTQEGDVYYVNLKIDGRRINTEVIGTTLDYAIITPGDVPWILKKPLELTIKLDLEEQQGTLLNNSILSKKGKEELKQLFEKYSALWQSWENQVGHRRIRPHKIATGTVKPTPQKQYHINPKAKPDIQIVINDLLKQGVLIQKESTMNTPVYPVPKPNGRWRMVLDYRAVNKVTPLIAVQNQHSYGILGSLFKGRYKTTIDLSNGFWAHPIVPEDYWITAFTWQGKQYCWTVLPQGFLNSPGLFNGDVVDLLQGIPNVEVYVDDVYISHDSEKEHLEYLDILFNRLKEAGYIISLKKSNIANSIVDFLGFQITNEGRGLTDTFKEKLENITAPTTLKQLQSILGLLNFARNFIPDFTELIAPLYALIPKSPKNYVPWQIEHSTTLETLITKLNGAEYLQGRKGDKTLIMKVNASYTTGYIRYYNEGEKKPISYVSIVFSKTELKFTELEKLLTTVHKGLLKALDLSMGQNIHVYSPIVSMQNIQKTPQTAKKALASRWLSWLSYLEDPRIRFFYDPQMPALKDLPAVDTGKDNKKHPSNFQHIFYTDGSAITSPTKEGHLNAGMGIVYFINKDGNLQKQQEWSISLGNHTAQFAEIAAFEFALKKCLPLGGNILVVTDSNYVAKAYNEELDVWASNGFVNNRKKPLKHISKWKSVADLKRLRPDVVVTHEPGHQKLDSSPHAYGNNLADQLATQASFKVHAGKRTADGSEFEKRTADGSEFESPKKKAKVE

SEQ ID NO: 1121 - protein, 2173 aa, synthetic construct
MPAAKRVKLDGGDKKYSIGLDIGTNSVGWAVITDEYKVPSKKFKVLGNTDRHSIKKNLIGALLFDSGETAEATRLKRTARRRYTRRKNRICYLQEIFSNEMAKVDDSFFHRLEESFLVEEDKKHERHPIFGNIVDEVAYHEKYPTIYHLRKKLVDSTDKADLRLIYLALAHMIKFRGHFLIEGDLNPDNSDVDKLFIQLVQTYNQLFEENPINASGVDAKAILSARLSKSRRLENLIAQLPGEKKNGLFGNLIALSLGLTPNFKSNFDLAEDAKLQLSKDTYDDDLDNLLAQIGDQYADLFLAAKNLSDAILLSDILRVNTEITKAPLSASMIKRYDEHHQDLTLLKALVRQQLPEKYKEIFFDQSKNGYAGYIDGGASQEEFYKFIKPILEKMDGTEELLVKLNREDLLRKQRTFDNGSIPHQIHLGELHAILRRQEDFYPFLKDNREKIEKILTFRIPYYVGPLARGNSRFAWMTRKSEETITPWNFEEVVDKGASAQSFIERMTNFDKNLPNEKVLPKHSLLYEYFTVYNELTKVKYVTEGMRKPAFLSGEQKKAIVDLLFKTNRKVTVKQLKEDYFKKIECFDSVEISGVEDRFNASLGTYHDLLKIIKDKDFLDNEENEDILEDIVLTLTLFEDREMIEERLKTYAHLFDDKVMKQLKRRRYTGWGRLSRKLINGIRDKQSGKTILDFLKSDGFANRNFMQLIHDDSLTFKEDIQKAQVSGQGDSLHEHIANLAGSPAIKKGILQTVKVVDELVKVMGRHKPENIVIEMARENQTTQKGQKNSRERMKRIEEGIKELGSQILKEHPVENTQLQNEKLYLYYLQNGRDMYVDQELDINRLSDYDVDHIVPQSFLKDDSIDNKVLTRSDKARGKSDNVPSEEVVKKMKNYWRQLLNAKLITQRKFDNLTKAERGGLSELDKAGFIKRQLVETRQITKHVAQILDSRMNTKYDENDKLIREVKVITLKSKLVSDFRKDFQFYKVREINNYHHAHDAYLNAVVGTALIKKYPKLESEFVYGDYKVYDVRKMIAKSEQEIGKATAKYFFYSNIMNFFKTEITLANGEIRKRPLIETNGETGEIVWDKGRDFATVRKVLSMPQVNIVKKTEVQTGGFSKESILPKRNSDKLIARKKDWDPKKYGGFDSPTVAYSVLVVAKVEKGKSKKLKSVKELLGITIMERSSFEKNPIDFLEAKGYKEVKKDLIIKLPKYSLFELENGRKRMLASAGELQKGNELALPSKYVNFLYLASHYEKLKGSPEDNEQKQLFVEQHKHYLDEIIEQISEFSKRVILADANLDKVLSAYNKHRDKPIREQAENIIHLFTLTNLGAPAAFKYFDTTIDRKRYTSTKEVLDATLIHQSITGLYETRIDLSQLGGDGGEAAAKPAPGSSGGMDLLKPLTVERKGVKIKGYWNSQADITCVPKDLLQGEEPVRQQNVTTIHGTQEGDVYYVNLKIDGRRINTEVIGTTLDYAIITPGDVPWILKKPLELTIKLDLEEQQGTLLNNSILSKKGKEELKQLFEKYSALWQSWENQVGHRRIRPHKIATGTVKPTPQKQYHINPKAKPDIQIVINDLLKQGVLIQKESTMNTPVYPVPKPNGRWRMVLDYRAVNKVTPLIAVQNQHSYGILGSLFKGRYKTTIDLSNGFWAHPIVPEDYWITAFTWQGKQYCWTVLPQGFLNSPGLFNGDVVDLLQGIPNVEVYVDDVYISHDSEKEHLEYLDILFNRLKEAGYIISLKKSNIANSIVDFLGFQITNEGRGLTDTFKEKLENITAPTTLKQLQSILGLLNFARNFIPDFTELIAPLYALIPKSPKNYVPWQIEHSTTLETLITKLNGAEYLQGRKGDKTLIMKVNASYTTGYIRYYNEGEKKPISYVSIVFSKTELKFTELEKLLTTVHKGLLKALDLSMGQNIHVYSPIVSMQNIQKTPQTAKKALASRWLSWLSYLEDPRIRFFYDPQMPALKDLPAVDTGKDNKKHPSNFQHIFYTDGSAITSPTKEGHLNAGMGIVYFINKDGNLQKQQEWSISLGNHTAQFAEIAAFEFALKKCLPLGGNILVVTDSNYVAKAYNEELDVWASNGFVNNRKKPLKHISKWKSVADLKRLRPDVVVTHEPGHQKLDSSPHAYGNNLADQLATQASFKVHAGKRTADGSEFEKRTADGSEFESPKKKAKVE

SEQ ID NO: 1122 - protein, 2172 aa, synthetic construct
MPAAKRVKLDGGDKKYSIGLDIGTNSVGWAVITDEYKVPSKKFKVLGNTDRHSIKKNLIGALLFDSGETAEATRLKRTARRRYTRRKNRICYLQEIFSNEMAKVDDSFFHRLEESFLVEEDKKHERHPIFGNIVDEVAYHEKYPTIYHLRKKLVDSTDKADLRLIYLALAHMIKFRGHFLIEGDLNPDNSDVDKLFIQLVQTYNQLFEENPINASGVDAKAILSARLSKSRRLENLIAQLPGEKKNGLFGNLIALSLGLTPNFKSNFDLAEDAKLQLSKDTYDDDLDNLLAQIGDQYADLFLAAKNLSDAILLSDILRVNTEITKAPLSASMIKRYDEHHQDLTLLKALVRQQLPEKYKEIFFDQSKNGYAGYIDGGASQEEFYKFIKPILEKMDGTEELLVKLNREDLLRKQRTFDNGSIPHQIHLGELHAILRRQEDFYPFLKDNREKIEKILTFRIPYYVGPLARGNSRFAWMTRKSEETITPWNFEEVVDKGASAQSFIERMTNFDKNLPNEKVLPKHSLLYEYFTVYNELTKVKYVTEGMRKPAFLSGEQKKAIVDLLFKTNRKVTVKQLKEDYFKKIECFDSVEISGVEDRFNASLGTYHDLLKIIKDKDFLDNEENEDILEDIVLTLTLFEDREMIEERLKTYAHLFDDKVMKQLKRRRYTGWGRLSRKLINGIRDKQSGKTILDFLKSDGFANRNFMQLIHDDSLTFKEDIQKAQVSGQGDSLHEHIANLAGSPAIKKGILQTVKVVDELVKVMGRHKPENIVIEMARENQTTQKGQKNSRERMKRIEEGIKELGSQILKEHPVENTQLQNEKLYLYYLQNGRDMYVDQELDINRLSDYDVDHIVPQSFLKDDSIDNKVLTRSDKARGKSDNVPSEEVVKKMKNYWRQLLNAKLITQRKFDNLTKAERGGLSELDKAGFIKRQLVETRQITKHVAQILDSRMNTKYDENDKLIREVKVITLKSKLVSDFRKDFQFYKVREINNYHHAHDAYLNAVVGTALIKKYPKLESEFVYGDYKVYDVRKMIAKSEQEIGKATAKYFFYSNIMNFFKTEITLANGEIRKRPLIETNGETGEIVWDKGRDFATVRKVLSMPQVNIVKKTEVQTGGFSKESILPKRNSDKLIARKKDWDPKKYGGFDSPTVAYSVLVVAKVEKGKSKKLKSVKELLGITIMERSSFEKNPIDFLEAKGYKEVKKDLIIKLPKYSLFELENGRKRMLASAGELQKGNELALPSKYVNFLYLASHYEKLKGSPEDNEQKQLFVEQHKHYLDEIIEQISEFSKRVILADANLDKVLSAYNKHRDKPIREQAENIIHLFTLTNLGAPAAFKYFDTTIDRKRYTSTKEVLDATLIHQSITGLYETRIDLSQLGGDGGGGGGSGGGGSGGMDLLKPLTVERKGVKIKGYWNSQADITCVPKDLLQGEEPVRQQNVTTIHGTQEGDVYYVNLKIDGRRINTEVIGTTLDYAIITPGDVPWILKKPLELTIKLDLEEQQGTLLNNSILSKKGKEELKQLFEKYSALWQSWENQVGHRRIRPHKIATGTVKPTPQKQYHINPKAKPDIQIVINDLLKQGVLIQKESTMNTPVYPVPKPNGRWRMVLDYRAVNKVTPLIAVQNQHSYGILGSLFKGRYKTTIDLSNGFWAHPIVPEDYWITAFTWQGKQYCWTVLPQGFLNSPGLFNGDVVDLLQGIPNVEVYVDDVYISHDSEKEHLEYLDILFNRLKEAGYIISLKKSNIANSIVDFLGFQITNEGRGLTDTFKEKLENITAPTTLKQLQSILGLLNFARNFIPDFTELIAPLYALIPKSPKNYVPWQIEHSTTLETLITKLNGAEYLQGRKGDKTLIMKVNASYTTGYIRYYNEGEKKPISYVSIVFSKTELKFTELEKLLTTVHKGLLKALDLSMGQNIHVYSPIVSMQNIQKTPQTAKKALASRWLSWLSYLEDPRIRFFYDPQMPALKDLPAVDTGKDNKKHPSNFQHIFYTDGSAITSPTKEGHLNAGMGIVYFINKDGNLQKQQEWSISLGNHTAQFAEIAAFEFALKKCLPLGGNILVVTDSNYVAKAYNEELDVWASNGFVNNRKKPLKHISKWKSVADLKRLRPDVVVTHEPGHQKLDSSPHAYGNNLADQLATQASFKVHAGKRTADGSEFEKRTADGSEFESPKKKAKVE

SEQ ID NO: 1123 - protein, 2173 aa, synthetic construct
MPAAKRVKLDGGDKKYSIGLDIGTNSVGWAVITDEYKVPSKKFKVLGNTDRHSIKKNLIGALLFDSGETAEATRLKRTARRRYTRRKNRICYLQEIFSNEMAKVDDSFFHRLEESFLVEEDKKHERHPIFGNIVDEVAYHEKYPTIYHLRKKLVDSTDKADLRLIYLALAHMIKFRGHFLIEGDLNPDNSDVDKLFIQLVQTYNQLFEENPINASGVDAKAILSARLSKSRRLENLIAQLPGEKKNGLFGNLIALSLGLTPNFKSNFDLAEDAKLQLSKDTYDDDLDNLLAQIGDQYADLFLAAKNLSDAILLSDILRVNTEITKAPLSASMIKRYDEHHQDLTLLKALVRQQLPEKYKEIFFDQSKNGYAGYIDGGASQEEFYKFIKPILEKMDGTEELLVKLNREDLLRKQRTFDNGSIPHQIHLGELHAILRRQEDFYPFLKDNREKIEKILTFRIPYYVGPLARGNSRFAWMTRKSEETITPWNFEEVVDKGASAQSFIERMTNFDKNLPNEKVLPKHSLLYEYFTVYNELTKVKYVTEGMRKPAFLSGEQKKAIVDLLFKTNRKVTVKQLKEDYFKKIECFDSVEISGVEDRFNASLGTYHDLLKIIKDKDFLDNEENEDILEDIVLTLTLFEDREMIEERLKTYAHLFDDKVMKQLKRRRYTGWGRLSRKLINGIRDKQSGKTILDFLKSDGFANRNFMQLIHDDSLTFKEDIQKAQVSGQGDSLHEHIANLAGSPAIKKGILQTVKVVDELVKVMGRHKPENIVIEMARENQTTQKGQKNSRERMKRIEEGIKELGSQILKEHPVENTQLQNEKLYLYYLQNGRDMYVDQELDINRLSDYDVDHIVPQSFLKDDSIDNKVLTRSDKARGKSDNVPSEEVVKKMKNYWRQLLNAKLITQRKFDNLTKAERGGLSELDKAGFIKRQLVETRQITKHVAQILDSRMNTKYDENDKLIREVKVITLKSKLVSDFRKDFQFYKVREINNYHHAHDAYLNAVVGTALIKKYPKLESEFVYGDYKVYDVRKMIAKSEQEIGKATAKYFFYSNIMNFFKTEITLANGEIRKRPLIETNGETGEIVWDKGRDFATVRKVLSMPQVNIVKKTEVQTGGFSKESILPKRNSDKLIARKKDWDPKKYGGFDSPTVAYSVLVVAKVEKGKSKKLKSVKELLGITIMERSSFEKNPIDFLEAKGYKEVKKDLIIKLPKYSLFELENGRKRMLASAGELQKGNELALPSKYVNFLYLASHYEKLKGSPEDNEQKQLFVEQHKHYLDEIIEQISEFSKRVILADANLDKVLSAYNKHRDKPIREQAENIIHLFTLTNLGAPAAFKYFDTTIDRKRYTSTKEVLDATLIHQSITGLYETRIDLSQLGGDGGGGSEAAAKPAPGGMDLLKPLTVERKGVKIKGYWNSQADITCVPKDLLQGEEPVRQQNVTTIHGTQEGDVYYVNLKIDGRRINTEVIGTTLDYAIITPGDVPWILKKPLELTIKLDLEEQQGTLLNNSILSKKGKEELKQLFEKYSALWQSWENQVGHRRIRPHKIATGTVKPTPQKQYHINPKAKPDIQIVINDLLKQGVLIQKESTMNTPVYPVPKPNGRWRMVLDYRAVNKVTPLIAVQNQHSYGILGSLFKGRYKTTIDLSNGFWAHPIVPEDYWITAFTWQGKQYCWTVLPQGFLNSPGLFNGDVVDLLQGIPNVEVYVDDVYISHDSEKEHLEYLDILFNRLKEAGYIISLKKSNIANSIVDFLGFQITNEGRGLTDTFKEKLENITAPTTLKQLQSILGLLNFARNFIPDFTELIAPLYALIPKSPKNYVPWQIEHSTTLETLITKLNGAEYLQGRKGDKTLIMKVNASYTTGYIRYYNEGEKKPISYVSIVFSKTELKFTELEKLLTTVHKGLLKALDLSMGQNIHVYSPIVSMQNIQKTPQTAKKALASRWLSWLSYLEDPRIRFFYDPQMPALKDLPAVDTGKDNKKHPSNFQHIFYTDGSAITSPTKEGHLNAGMGIVYFINKDGNLQKQQEWSISLGNHTAQFAEIAAFEFALKKCLPLGGNILVVTDSNYVAKAYNEELDVWASNGFVNNRKKPLKHISKWKSVADLKRLRPDVVVTHEPGHQKLDSSPHAYGNNLADQLATQASFKVHAGKRTADGSEFEKRTADGSEFESPKKKAKVE

SEQ ID NO: 1124 - protein, 2171 aa, synthetic construct
MPAAKRVKLDGGDKKYSIGLDIGTNSVGWAVITDEYKVPSKKFKVLGNTDRHSIKKNLIGALLFDSGETAEATRLKRTARRRYTRRKNRICYLQEIFSNEMAKVDDSFFHRLEESFLVEEDKKHERHPIFGNIVDEVAYHEKYPTIYHLRKKLVDSTDKADLRLIYLALAHMIKFRGHFLIEGDLNPDNSDVDKLFIQLVQTYNQLFEENPINASGVDAKAILSARLSKSRRLENLIAQLPGEKKNGLFGNLIALSLGLTPNFKSNFDLAEDAKLQLSKDTYDDDLDNLLAQIGDQYADLFLAAKNLSDAILLSDILRVNTEITKAPLSASMIKRYDEHHQDLTLLKALVRQQLPEKYKEIFFDQSKNGYAGYIDGGASQEEFYKFIKPILEKMDGTEELLVKLNREDLLRKQRTFDNGSIPHQIHLGELHAILRRQEDFYPFLKDNREKIEKILTFRIPYYVGPLARGNSRFAWMTRKSEETITPWNFEEVVDKGASAQSFIERMTNFDKNLPNEKVLPKHSLLYEYFTVYNELTKVKYVTEGMRKPAFLSGEQKKAIVDLLFKTNRKVTVKQLKEDYFKKIECFDSVEISGVEDRFNASLGTYHDLLKIIKDKDFLDNEENEDILEDIVLTLTLFEDREMIEERLKTYAHLFDDKVMKQLKRRRYTGWGRLSRKLINGIRDKQSGKTILDFLKSDGFANRNFMQLIHDDSLTFKEDIQKAQVSGQGDSLHEHIANLAGSPAIKKGILQTVKVVDELVKVMGRHKPENIVIEMARENQTTQKGQKNSRERMKRIEEGIKELGSQILKEHPVENTQLQNEKLYLYYLQNGRDMYVDQELDINRLSDYDVDHIVPQSFLKDDSIDNKVLTRSDKARGKSDNVPSEEVVKKMKNYWRQLLNAKLITQRKFDNLTKAERGGLSELDKAGFIKRQLVETRQITKHVAQILDSRMNTKYDENDKLIREVKVITLKSKLVSDFRKDFQFYKVREINNYHHAHDAYLNAVVGTALIKKYPKLESEFVYGDYKVYDVRKMIAKSEQEIGKATAKYFFYSNIMNFFKTEITLANGEIRKRPLIETNGETGEIVWDKGRDFATVRKVLSMPQVNIVKKTEVQTGGFSKESILPKRNSDKLIARKKDWDPKKYGGFDSPTVAYSVLVVAKVEKGKSKKLKSVKELLGITIMERSSFEKNPIDFLEAKGYKEVKKDLIIKLPKYSLFELENGRKRMLASAGELQKGNELALPSKYVNFLYLASHYEKLKGSPEDNEQKQLFVEQHKHYLDEIIEQISEFSKRVILADANLDKVLSAYNKHRDKPIREQAENIIHLFTLTNLGAPAAFKYFDTTIDRKRYTSTKEVLDATLIHQSITGLYETRIDLSQLGGDGGGGGGSSPAPGGMDLLKPLTVERKGVKIKGYWNSQADITCVPKDLLQGEEPVRQQNVTTIHGTQEGDVYYVNLKIDGRRINTEVIGTTLDYAIITPGDVPWILKKPLELTIKLDLEEQQGTLLNNSILSKKGKEELKQLFEKYSALWQSWENQVGHRRIRPHKIATGTVKPTPQKQYHINPKAKPDIQIVINDLLKQGVLIQKESTMNTPVYPVPKPNGRWRMVLDYRAVNKVTPLIAVQNQHSYGILGSLFKGRYKTTIDLSNGFWAHPIVPEDYWITAFTWQGKQYCWTVLPQGFLNSPGLFNGDVVDLLQGIPNVEVYVDDVYISHDSEKEHLEYLDILFNRLKEAGYIISLKKSNIANSIVDFLGFQITNEGRGLTDTFKEKLENITAPTTLKQLQSILGLLNFARNFIPDFTELIAPLYALIPKSPKNYVPWQIEHSTTLETLITKLNGAEYLQGRKGDKTLIMKVNASYTTGYIRYYNEGEKKPISYVSIVFSKTELKFTELEKLLTTVHKGLLKALDLSMGQNIHVYSPIVSMQNIQKTPQTAKKALASRWLSWLSYLEDPRIRFFYDPQMPALKDLPAVDTGKDNKKHPSNFQHIFYTDGSAITSPTKEGHLNAGMGIVYFINKDGNLQKQQEWSISLGNHTAQFAEIAAFEFALKKCLPLGGNILVVTDSNYVAKAYNEELDVWASNGFVNNRKKPLKHISKWKSVADLKRLRPDVVVTHEPGHQKLDSSPHAYGNNLADQLATQASFKVHAGKRTADGSEFEKRTADGSEFESPKKKAKVE

SEQ ID NO: 1125 - protein, 2177 aa, synthetic construct
MPAAKRVKLDGGDKKYSIGLDIGTNSVGWAVITDEYKVPSKKFKVLGNTDRHSIKKNLIGALLFDSGETAEATRLKRTARRRYTRRKNRICYLQEIFSNEMAKVDDSFFHRLEESFLVEEDKKHERHPIFGNIVDEVAYHEKYPTIYHLRKKLVDSTDKADLRLIYLALAHMIKFRGHFLIEGDLNPDNSDVDKLFIQLVQTYNQLFEENPINASGVDAKAILSARLSKSRRLENLIAQLPGEKKNGLFGNLIALSLGLTPNFKSNFDLAEDAKLQLSKDTYDDDLDNLLAQIGDQYADLFLAAKNLSDAILLSDILRVNTEITKAPLSASMIKRYDEHHQDLTLLKALVRQQLPEKYKEIFFDQSKNGYAGYIDGGASQEEFYKFIKPILEKMDGTEELLVKLNREDLLRKQRTFDNGSIPHQIHLGELHAILRRQEDFYPFLKDNREKIEKILTFRIPYYVGPLARGNSRFAWMTRKSEETITPWNFEEVVDKGASAQSFIERMTNFDKNLPNEKVLPKHSLLYEYFTVYNELTKVKYVTEGMRKPAFLSGEQKKAIVDLLFKTNRKVTVKQLKEDYFKKIECFDSVEISGVEDRFNASLGTYHDLLKIIKDKDFLDNEENEDILEDIVLTLTLFEDREMIEERLKTYAHLFDDKVMKQLKRRRYTGWGRLSRKLINGIRDKQSGKTILDFLKSDGFANRNFMQLIHDDSLTFKEDIQKAQVSGQGDSLHEHIANLAGSPAIKKGILQTVKVVDELVKVMGRHKPENIVIEMARENQTTQKGQKNSRERMKRIEEGIKELGSQILKEHPVENTQLQNEKLYLYYLQNGRDMYVDQELDINRLSDYDVDHIVPQSFLKDDSIDNKVLTRSDKARGKSDNVPSEEVVKKMKNYWRQLLNAKLITQRKFDNLTKAERGGLSELDKAGFIKRQLVETRQITKHVAQILDSRMNTKYDENDKLIREVKVITLKSKLVSDFRKDFQFYKVREINNYHHAHDAYLNAVVGTALIKKYPKLESEFVYGDYKVYDVRKMIAKSEQEIGKATAKYFFYSNIMNFFKTEITLANGEIRKRPLIETNGETGEIVWDKGRDFATVRKVLSMPQVNIVKKTEVQTGGFSKESILPKRNSDKLIARKKDWDPKKYGGFDSPTVAYSVLVVAKVEKGKSKKLKSVKELLGITIMERSSFEKNPIDFLEAKGYKEVKKDLIIKLPKYSLFELENGRKRMLASAGELQKGNELALPSKYVNFLYLASHYEKLKGSPEDNEQKQLFVEQHKHYLDEIIEQISEFSKRVILADANLDKVLSAYNKHRDKPIREQAENIIHLFTLTNLGAPAAFKYFDTTIDRKRYTSTKEVLDATLIHQSITGLYETRIDLSQLGGDGGGGGGSGGGGSGGGGSGGMDLLKPLTVERKGVKIKGYWNSQADITCVPKDLLQGEEPVRQQNVTTIHGTQEGDVYYVNLKIDGRRINTEVIGTTLDYAIITPGDVPWILKKPLELTIKLDLEEQQGTLLNNSILSKKGKEELKQLFEKYSALWQSWENQVGHRRIRPHKIATGTVKPTPQKQYHINPKAKPDIQIVINDLLKQGVLIQKESTMNTPVYPVPKPNGRWRMVLDYRAVNKVTPLIAVQNQHSYGILGSLFKGRYKTTIDLSNGFWAHPIVPEDYWITAFTWQGKQYCWTVLPQGFLNSPGLFNGDVVDLLQGIPNVEVYVDDVYISHDSEKEHLEYLDILFNRLKEAGYIISLKKSNIANSIVDFLGFQITNEGRGLTDTFKEKLENITAPTTLKQLQSILGLLNFARNFIPDFTELIAPLYALIPKSPKNYVPWQIEHSTTLETLITKLNGAEYLQGRKGDKTLIMKVNASYTTGYIRYYNEGEKKPISYVSIVFSKTELKFTELEKLLTTVHKGLLKALDLSMGQNIHVYSPIVSMQNIQKTPQTAKKALASRWLSWLSYLEDPRIRFFYDPQMPALKDLPAVDTGKDNKKHPSNFQHIFYTDGSAITSPTKEGHLNAGMGIVYFINKDGNLQKQQEWSISLGNHTAQFAEIAAFEFALKKCLPLGGNILVVTDSNYVAKAYNEELDVWASNGFVNNRKKPLKHISKWKSVADLKRLRPDVVVTHEPGHQKLDSSPHAYGNNLADQLATQASFKVHAGKRTADGSEFEKRTADGSEFESPKKKAKVE

SEQ ID NO: 1126 - protein, 2177 aa, synthetic construct
MPAAKRVKLDGGDKKYSIGLDIGTNSVGWAVITDEYKVPSKKFKVLGNTDRHSIKKNLIGALLFDSGETAEATRLKRTARRRYTRRKNRICYLQEIFSNEMAKVDDSFFHRLEESFLVEEDKKHERHPIFGNIVDEVAYHEKYPTIYHLRKKLVDSTDKADLRLIYLALAHMIKFRGHFLIEGDLNPDNSDVDKLFIQLVQTYNQLFEENPINASGVDAKAILSARLSKSRRLENLIAQLPGEKKNGLFGNLIALSLGLTPNFKSNFDLAEDAKLQLSKDTYDDDLDNLLAQIGDQYADLFLAAKNLSDAILLSDILRVNTEITKAPLSASMIKRYDEHHQDLTLLKALVRQQLPEKYKEIFFDQSKNGYAGYIDGGASQEEFYKFIKPILEKMDGTEELLVKLNREDLLRKQRTFDNGSIPHQIHLGELHAILRRQEDFYPFLKDNREKIEKILTFRIPYYVGPLARGNSRFAWMTRKSEETITPWNFEEVVDKGASAQSFIERMTNFDKNLPNEKVLPKHSLLYEYFTVYNELTKVKYVTEGMRKPAFLSGEQKKAIVDLLFKTNRKVTVKQLKEDYFKKIECFDSVEISGVEDRFNASLGTYHDLLKIIKDKDFLDNEENEDILEDIVLTLTLFEDREMIEERLKTYAHLFDDKVMKQLKRRRYTGWGRLSRKLINGIRDKQSGKTILDFLKSDGFANRNFMQLIHDDSLTFKEDIQKAQVSGQGDSLHEHIANLAGSPAIKKGILQTVKVVDELVKVMGRHKPENIVIEMARENQTTQKGQKNSRERMKRIEEGIKELGSQILKEHPVENTQLQNEKLYLYYLQNGRDMYVDQELDINRLSDYDVDHIVPQSFLKDDSIDNKVLTRSDKARGKSDNVPSEEVVKKMKNYWRQLLNAKLITQRKFDNLTKAERGGLSELDKAGFIKRQLVETRQITKHVAQILDSRMNTKYDENDKLIREVKVITLKSKLVSDFRKDFQFYKVREINNYHHAHDAYLNAVVGTALIKKYPKLESEFVYGDYKVYDVRKMIAKSEQEIGKATAKYFFYSNIMNFFKTEITLANGEIRKRPLIETNGETGEIVWDKGRDFATVRKVLSMPQVNIVKKTEVQTGGFSKESILPKRNSDKLIARKKDWDPKKYGGFDSPTVAYSVLVVAKVEKGKSKKLKSVKELLGITIMERSSFEKNPIDFLEAKGYKEVKKDLIIKLPKYSLFELENGRKRMLASAGELQKGNELALPSKYVNFLYLASHYEKLKGSPEDNEQKQLFVEQHKHYLDEIIEQISEFSKRVILADANLDKVLSAYNKHRDKPIREQAENIIHLFTLTNLGAPAAFKYFDTTIDRKRYTSTKEVLDATLIHQSITGLYETRIDLSQLGGDGGEAAAKEAAAKEAAAKGGMDLLKPLTVERKGVKIKGYWNSQADITCVPKDLLQGEEPVRQQNVTTIHGTQEGDVYYVNLKIDGRRINTEVIGTTLDYAIITPGDVPWILKKPLELTIKLDLEEQQGTLLNNSILSKKGKEELKQLFEKYSALWQSWENQVGHRRIRPHKIATGTVKPTPQKQYHINPKAKPDIQIVINDLLKQGVLIQKESTMNTPVYPVPKPNGRWRMVLDYRAVNKVTPLIAVQNQHSYGILGSLFKGRYKTTIDLSNGFWAHPIVPEDYWITAFTWQGKQYCWTVLPQGFLNSPGLFNGDVVDLLQGIPNVEVYVDDVYISHDSEKEHLEYLDILFNRLKEAGYIISLKKSNIANSIVDFLGFQITNEGRGLTDTFKEKLENITAPTTLKQLQSILGLLNFARNFIPDFTELIAPLYALIPKSPKNYVPWQIEHSTTLETLITKLNGAEYLQGRKGDKTLIMKVNASYTTGYIRYYNEGEKKPISYVSIVFSKTELKFTELEKLLTTVHKGLLKALDLSMGQNIHVYSPIVSMQNIQKTPQTAKKALASRWLSWLSYLEDPRIRFFYDPQMPALKDLPAVDTGKDNKKHPSNFQHIFYTDGSAITSPTKEGHLNAGMGIVYFINKDGNLQKQQEWSISLGNHTAQFAEIAAFEFALKKCLPLGGNILVVTDSNYVAKAYNEELDVWASNGFVNNRKKPLKHISKWKSVADLKRLRPDVVVTHEPGHQKLDSSPHAYGNNLADQLATQASFKVHAGKRTADGSEFEKRTADGSEFESPKKKAKVE

SEQ ID NO: 1127 - protein, 2173 aa, synthetic construct
MPAAKRVKLDGGDKKYSIGLDIGTNSVGWAVITDEYKVPSKKFKVLGNTDRHSIKKNLIGALLFDSGETAEATRLKRTARRRYTRRKNRICYLQEIFSNEMAKVDDSFFHRLEESFLVEEDKKHERHPIFGNIVDEVAYHEKYPTIYHLRKKLVDSTDKADLRLIYLALAHMIKFRGHFLIEGDLNPDNSDVDKLFIQLVQTYNQLFEENPINASGVDAKAILSARLSKSRRLENLIAQLPGEKKNGLFGNLIALSLGLTPNFKSNFDLAEDAKLQLSKDTYDDDLDNLLAQIGDQYADLFLAAKNLSDAILLSDILRVNTEITKAPLSASMIKRYDEHHQDLTLLKALVRQQLPEKYKEIFFDQSKNGYAGYIDGGASQEEFYKFIKPILEKMDGTEELLVKLNREDLLRKQRTFDNGSIPHQIHLGELHAILRRQEDFYPFLKDNREKIEKILTFRIPYYVGPLARGNSRFAWMTRKSEETITPWNFEEVVDKGASAQSFIERMTNFDKNLPNEKVLPKHSLLYEYFTVYNELTKVKYVTEGMRKPAFLSGEQKKAIVDLLFKTNRKVTVKQLKEDYFKKIECFDSVEISGVEDRFNASLGTYHDLLKIIKDKDFLDNEENEDILEDIVLTLTLFEDREMIEERLKTYAHLFDDKVMKQLKRRRYTGWGRLSRKLINGIRDKQSGKTILDFLKSDGFANRNFMQLIHDDSLTFKEDIQKAQVSGQGDSLHEHIANLAGSPAIKKGILQTVKVVDELVKVMGRHKPENIVIEMARENQTTQKGQKNSRERMKRIEEGIKELGSQILKEHPVENTQLQNEKLYLYYLQNGRDMYVDQELDINRLSDYDVDHIVPQSFLKDDSIDNKVLTRSDKARGKSDNVPSEEVVKKMKNYWRQLLNAKLITQRKFDNLTKAERGGLSELDKAGFIKRQLVETRQITKHVAQILDSRMNTKYDENDKLIREVKVITLKSKLVSDFRKDFQFYKVREINNYHHAHDAYLNAVVGTALIKKYPKLESEFVYGDYKVYDVRKMIAKSEQEIGKATAKYFFYSNIMNFFKTEITLANGEIRKRPLIETNGETGEIVWDKGRDFATVRKVLSMPQVNIVKKTEVQTGGFSKESILPKRNSDKLIARKKDWDPKKYGGFDSPTVAYSVLVVAKVEKGKSKKLKSVKELLGITIMERSSFEKNPIDFLEAKGYKEVKKDLIIKLPKYSLFELENGRKRMLASAGELQKGNELALPSKYVNFLYLASHYEKLKGSPEDNEQKQLFVEQHKHYLDEIIEQISEFSKRVILADANLDKVLSAYNKHRDKPIREQAENIIHLFTLTNLGAPAAFKYFDTTIDRKRYTSTKEVLDATLIHQSITGLYETRIDLSQLGGDGGEAAAKGSSGGSGGMDLLKPLTVERKGVKIKGYWNSQADITCVPKDLLQGEEPVRQQNVTTIHGTQEGDVYYVNLKIDGRRINTEVIGTTLDYAIITPGDVPWILKKPLELTIKLDLEEQQGTLLNNSILSKKGKEELKQLFEKYSALWQSWENQVGHRRIRPHKIATGTVKPTPQKQYHINPKAKPDIQIVINDLLKQGVLIQKESTMNTPVYPVPKPNGRWRMVLDYRAVNKVTPLIAVQNQHSYGILGSLFKGRYKTTIDLSNGFWAHPIVPEDYWITAFTWQGKQYCWTVLPQGFLNSPGLFNGDVVDLLQGIPNVEVYVDDVYISHDSEKEHLEYLDILFNRLKEAGYIISLKKSNIANSIVDFLGFQITNEGRGLTDTFKEKLENITAPTTLKQLQSILGLLNFARNFIPDFTELIAPLYALIPKSPKNYVPWQIEHSTTLETLITKLNGAEYLQGRKGDKTLIMKVNASYTTGYIRYYNEGEKKPISYVSIVFSKTELKFTELEKLLTTVHKGLLKALDLSMGQNIHVYSPIVSMQNIQKTPQTAKKALASRWLSWLSYLEDPRIRFFYDPQMPALKDLPAVDTGKDNKKHPSNFQHIFYTDGSAITSPTKEGHLNAGMGIVYFINKDGNLQKQQEWSISLGNHTAQFAEIAAFEFALKKCLPLGGNILVVTDSNYVAKAYNEELDVWASNGFVNNRKKPLKHISKWKSVADLKRLRPDVVVTHEPGHQKLDSSPHAYGNNLADQLATQASFKVHAGKRTADGSEFEKRTADGSEFESPKKKAKVE

SEQ ID NO: 1128 - protein, 2171 aa, synthetic construct
MPAAKRVKLDGGDKKYSIGLDIGTNSVGWAVITDEYKVPSKKFKVLGNTDRHSIKKNLIGALLFDSGETAEATRLKRTARRRYTRRKNRICYLQEIFSNEMAKVDDSFFHRLEESFLVEEDKKHERHPIFGNIVDEVAYHEKYPTIYHLRKKLVDSTDKADLRLIYLALAHMIKFRGHFLIEGDLNPDNSDVDKLFIQLVQTYNQLFEENPINASGVDAKAILSARLSKSRRLENLIAQLPGEKKNGLFGNLIALSLGLTPNFKSNFDLAEDAKLQLSKDTYDDDLDNLLAQIGDQYADLFLAAKNLSDAILLSDILRVNTEITKAPLSASMIKRYDEHHQDLTLLKALVRQQLPEKYKEIFFDQSKNGYAGYIDGGASQEEFYKFIKPILEKMDGTEELLVKLNREDLLRKQRTFDNGSIPHQIHLGELHAILRRQEDFYPFLKDNREKIEKILTFRIPYYVGPLARGNSRFAWMTRKSEETITPWNFEEVVDKGASAQSFIERMTNFDKNLPNEKVLPKHSLLYEYFTVYNELTKVKYVTEGMRKPAFLSGEQKKAIVDLLFKTNRKVTVKQLKEDYFKKIECFDSVEISGVEDRFNASLGTYHDLLKIIKDKDFLDNEENEDILEDIVLTLTLFEDREMIEERLKTYAHLFDDKVMKQLKRRRYTGWGRLSRKLINGIRDKQSGKTILDFLKSDGFANRNFMQLIHDDSLTFKEDIQKAQVSGQGDSLHEHIANLAGSPAIKKGILQTVKVVDELVKVMGRHKPENIVIEMARENQTTQKGQKNSRERMKRIEEGIKELGSQILKEHPVENTQLQNEKLYLYYLQNGRDMYVDQELDINRLSDYDVDHIVPQSFLKDDSIDNKVLTRSDKARGKSDNVPSEEVVKKMKNYWRQLLNAKLITQRKFDNLTKAERGGLSELDKAGFIKRQLVETRQITKHVAQILDSRMNTKYDENDKLIREVKVITLKSKLVSDFRKDFQFYKVREINNYHHAHDAYLNAVVGTALIKKYPKLESEFVYGDYKVYDVRKMIAKSEQEIGKATAKYFFYSNIMNFFKTEITLANGEIRKRPLIETNGETGEIVWDKGRDFATVRKVLSMPQVNIVKKTEVQTGGFSKESILPKRNSDKLIARKKDWDPKKYGGFDSPTVAYSVLVVAKVEKGKSKKLKSVKELLGITIMERSSFEKNPIDFLEAKGYKEVKKDLIIKLPKYSLFELENGRKRMLASAGELQKGNELALPSKYVNFLYLASHYEKLKGSPEDNEQKQLFVEQHKHYLDEIIEQISEFSKRVILADANLDKVLSAYNKHRDKPIREQAENIIHLFTLTNLGAPAAFKYFDTTIDRKRYTSTKEVLDATLIHQSITGLYETRIDLSQLGGDGGGGSGGGPAPGGMDLLKPLTVERKGVKIKGYWNSQADITCVPKDLLQGEEPVRQQNVTTIHGTQEGDVYYVNLKIDGRRINTEVIGTTLDYAIITPGDVPWILKKPLELTIKLDLEEQQGTLLNNSILSKKGKEELKQLFEKYSALWQSWENQVGHRRIRPHKIATGTVKPTPQKQYHINPKAKPDIQIVINDLLKQGVLIQKESTMNTPVYPVPKPNGRWRMVLDYRAVNKVTPLIAVQNQHSYGILGSLFKGRYKTTIDLSNGFWAHPIVPEDYWITAFTWQGKQYCWTVLPQGFLNSPGLFNGDVVDLLQGIPNVEVYVDDVYISHDSEKEHLEYLDILFNRLKEAGYIISLKKSNIANSIVDFLGFQITNEGRGLTDTFKEKLENITAPTTLKQLQSILGLLNFARNFIPDFTELIAPLYALIPKSPKNYVPWQIEHSTTLETLITKLNGAEYLQGRKGDKTLIMKVNASYTTGYIRYYNEGEKKPISYVSIVFSKTELKFTELEKLLTTVHKGLLKALDLSMGQNIHVYSPIVSMQNIQKTPQTAKKALASRWLSWLSYLEDPRIRFFYDPQMPALKDLPAVDTGKDNKKHPSNFQHIFYTDGSAITSPTKEGHLNAGMGIVYFINKDGNLQKQQEWSISLGNHTAQFAEIAAFEFALKKCLPLGGNILVVTDSNYVAKAYNEELDVWASNGFVNNRKKPLKHISKWKSVADLKRLRPDVVVTHEPGHQKLDSSPHAYGNNLADQLATQASFKVHAGKRTADGSEFEKRTADGSEFESPKKKAKVE

SEQ ID NO: 1129 - protein, 2208 aa, synthetic construct
MPAAKRVKLDGGDKKYSIGLDIGTNSVGWAVITDEYKVPSKKFKVLGNTDRHSIKKNLIGALLFDSGETAEATRLKRTARRRYTRRKNRICYLQEIFSNEMAKVDDSFFHRLEESFLVEEDKKHERHPIFGNIVDEVAYHEKYPTIYHLRKKLVDSTDKADLRLIYLALAHMIKFRGHFLIEGDLNPDNSDVDKLFIQLVQTYNQLFEENPINASGVDAKAILSARLSKSRRLENLIAQLPGEKKNGLFGNLIALSLGLTPNFKSNFDLAEDAKLQLSKDTYDDDLDNLLAQIGDQYADLFLAAKNLSDAILLSDILRVNTEITKAPLSASMIKRYDEHHQDLTLLKALVRQQLPEKYKEIFFDQSKNGYAGYIDGGASQEEFYKFIKPILEKMDGTEELLVKLNREDLLRKQRTFDNGSIPHQIHLGELHAILRRQEDFYPFLKDNREKIEKILTFRIPYYVGPLARGNSRFAWMTRKSEETITPWNFEEVVDKGASAQSFIERMTNFDKNLPNEKVLPKHSLLYEYFTVYNELTKVKYVTEGMRKPAFLSGEQKKAIVDLLFKTNRKVTVKQLKEDYFKKIECFDSVEISGVEDRFNASLGTYHDLLKIIKDKDFLDNEENEDILEDIVLTLTLFEDREMIEERLKTYAHLFDDKVMKQLKRRRYTGWGRLSRKLINGIRDKQSGKTILDFLKSDGFANRNFMQLIHDDSLTFKEDIQKAQVSGQGDSLHEHIANLAGSPAIKKGILQTVKVVDELVKVMGRHKPENIVIEMARENQTTQKGQKNSRERMKRIEEGIKELGSQILKEHPVENTQLQNEKLYLYYLQNGRDMYVDQELDINRLSDYDVDHIVPQSFLKDDSIDNKVLTRSDKARGKSDNVPSEEVVKKMKNYWRQLLNAKLITQRKFDNLTKAERGGLSELDKAGFIKRQLVETRQITKHVAQILDSRMNTKYDENDKLIREVKVITLKSKLVSDFRKDFQFYKVREINNYHHAHDAYLNAVVGTALIKKYPKLESEFVYGDYKVYDVRKMIAKSEQEIGKATAKYFFYSNIMNFFKTEITLANGEIRKRPLIETNGETGEIVWDKGRDFATVRKVLSMPQVNIVKKTEVQTGGFSKESILPKRNSDKLIARKKDWDPKKYGGFDSPTVAYSVLVVAKVEKGKSKKLKSVKELLGITIMERSSFEKNPIDFLEAKGYKEVKKDLIIKLPKYSLFELENGRKRMLASAGELQKGNELALPSKYVNFLYLASHYEKLKGSPEDNEQKQLFVEQHKHYLDEIIEQISEFSKRVILADANLDKVLSAYNKHRDKPIREQAENIIHLFTLTNLGAPAAFKYFDTTIDRKRYTSTKEVLDATLIHQSITGLYETRIDLSQLGGDGGAEAAAKEAAAKEAAAKEAAAKALEAEAAAKEAAAKEAAAKEAAAKAGGMDLLKPLTVERKGVKIKGYWNSQADITCVPKDLLQGEEPVRQQNVTTIHGTQEGDVYYVNLKIDGRRINTEVIGTTLDYAIITPGDVPWILKKPLELTIKLDLEEQQGTLLNNSILSKKGKEELKQLFEKYSALWQSWENQVGHRRIRPHKIATGTVKPTPQKQYHINPKAKPDIQIVINDLLKQGVLIQKESTMNTPVYPVPKPNGRWRMVLDYRAVNKVTPLIAVQNQHSYGILGSLFKGRYKTTIDLSNGFWAHPIVPEDYWITAFTWQGKQYCWTVLPQGFLNSPGLFNGDVVDLLQGIPNVEVYVDDVYISHDSEKEHLEYLDILFNRLKEAGYIISLKKSNIANSIVDFLGFQITNEGRGLTDTFKEKLENITAPTTLKQLQSILGKLNFARNFIPDFTELIAPLYALIPKSPKNYVPWQIEHSTTLETLITKLNGAEYLQGRKGDKTLIMKVNASYTTGYIRYYNEGEKKPISYVSIVFSKTELKFTELEKLLTTVHKGLLKALDLSMGQNIHVYSPIVSMQNIQKTPQTAKKALASRWLSWLSYLEDPRIRFFYDPQMPALKDLPAVDTGKDNKKHPSNFQHIFYTDGSAITSPTKEGHLNAGMGIVYFINKDGNLQKQQEWSISLGNHTAQFAEIAAFEFALKKCLPLGGNILVVTDSNYVAKAYNEELDVWASNGFVNNRKKPLKHISKWKSVADLKRLRPDVVVTHEPGHQKLDSSPHAYGNNLADQLATQASFKVHAGKRTADGSEFEKRTADGSEFESPKKKAKVE

SEQ ID NO: 1130 - protein, 2171 aa, synthetic construct
MPAAKRVKLDGGDKKYSIGLDIGTNSVGWAVITDEYKVPSKKFKVLGNTDRHSIKKNLIGALLFDSGETAEATRLKRTARRRYTRRKNRICYLQEIFSNEMAKVDDSFFHRLEESFLVEEDKKHERHPIFGNIVDEVAYHEKYPTIYHLRKKLVDSTDKADLRLIYLALAHMIKFRGHFLIEGDLNPDNSDVDKLFIQLVQTYNQLFEENPINASGVDAKAILSARLSKSRRLENLIAQLPGEKKNGLFGNLIALSLGLTPNFKSNFDLAEDAKLQLSKDTYDDDLDNLLAQIGDQYADLFLAAKNLSDAILLSDILRVNTEITKAPLSASMIKRYDEHHQDLTLLKALVRQQLPEKYKEIFFDQSKNGYAGYIDGGASQEEFYKFIKPILEKMDGTEELLVKLNREDLLRKQRTFDNGSIPHQIHLGELHAILRRQEDFYPFLKDNREKIEKILTFRIPYYVGPLARGNSRFAWMTRKSEETITPWNFEEVVDKGASAQSFIERMTNFDKNLPNEKVLPKHSLLYEYFTVYNELTKVKYVTEGMRKPAFLSGEQKKAIVDLLFKTNRKVTVKQLKEDYFKKIECFDSVEISGVEDRFNASLGTYHDLLKIIKDKDFLDNEENEDILEDIVLTLTLFEDREMIEERLKTYAHLFDDKVMKQLKRRRYTGWGRLSRKLINGIRDKQSGKTILDFLKSDGFANRNFMQLIHDDSLTFKEDIQKAQVSGQGDSLHEHIANLAGSPAIKKGILQTVKVVDELVKVMGRHKPENIVIEMARENQTTQKGQKNSRERMKRIEEGIKELGSQILKEHPVENTQLQNEKLYLYYLQNGRDMYVDQELDINRLSDYDVDHIVPQSFLKDDSIDNKVLTRSDKARGKSDNVPSEEVVKKMKNYWRQLLNAKLITQRKFDNLTKAERGGLSELDKAGFIKRQLVETRQITKHVAQILDSRMNTKYDENDKLIREVKVITLKSKLVSDFRKDFQFYKVREINNYHHAHDAYLNAVVGTALIKKYPKLESEFVYGDYKVYDVRKMIAKSEQEIGKATAKYFFYSNIMNFFKTEITLANGEIRKRPLIETNGETGEIVWDKGRDFATVRKVLSMPQVNIVKKTEVQTGGFSKESILPKRNSDKLIARKKDWDPKKYGGFDSPTVAYSVLVVAKVEKGKSKKLKSVKELLGITIMERSSFEKNPIDFLEAKGYKEVKKDLIIKLPKYSLFELENGRKRMLASAGELQKGNELALPSKYVNFLYLASHYEKLKGSPEDNEQKQLFVEQHKHYLDEIIEQISEFSKRVILADANLDKVLSAYNKHRDKPIREQAENIIHLFTLTNLGAPAAFKYFDTTIDRKRYTSTKEVLDATLIHQSITGLYETRIDLSQLGGDGGGSSPAPGGSGGMDLLKPLTVERKGVKIKGYWNSQADITCVPKDLLQGEEPVRQQNVTTIHGTQEGDVYYVNLKIDGRRINTEVIGTTLDYAIITPGDVPWILKKPLELTIKLDLEEQQGTLLNNSILSKKGKEELKQLFEKYSALWQSWENQVGHRRIRPHKIATGTVKPTPQKQYHINPKAKPDIQIVINDLLKQGVLIQKESTMNTPVYPVPKPNGRWRMVLDYRAVNKVTPLIAVQNQHSYGILGSLFKGRYKTTIDLSNGFWAHPIVPEDYWITAFTWQGKQYCWTVLPQGFLNSPGLFNGDVVDLLQGIPNVEVYVDDVYISHDSEKEHLEYLDILFNRLKEAGYIISLKKSNIANSIVDFLGFQITNEGRGLTDTFKEKLENITAPTTLKQLQSILGKLNFARNFIPDFTELIAPLYALIPKSPKNYVPWQIEHSTTLETLITKLNGAEYLQGRKGDKTLIMKVNASYTTGYIRYYNEGEKKPISYVSIVFSKTELKFTELEKLLTTVHKGLLKALDLSMGQNIHVYSPIVSMQNIQKTPQTAKKALASRWLSWLSYLEDPRIRFFYDPQMPALKDLPAVDTGKDNKKHPSNFQHIFYTDGSAITSPTKEGHLNAGMGIVYFINKDGNLQKQQEWSISLGNHTAQFAEIAAFEFALKKCLPLGGNILVVTDSNYVAKAYNEELDVWASNGFVNNRKKPLKHISKWKSVADLKRLRPDVVVTHEPGHQKLDSSPHAYGNNLADQLATQASFKVHAGKRTADGSEFEKRTADGSEFESPKKKAKVE

SEQ ID NO: 1131 - protein, 2182 aa, synthetic construct
MPAAKRVKLDGGDKKYSIGLDIGTNSVGWAVITDEYKVPSKKFKVLGNTDRHSIKKNLIGALLFDSGETAEATRLKRTARRRYTRRKNRICYLQEIFSNEMAKVDDSFFHRLEESFLVEEDKKHERHPIFGNIVDEVAYHEKYPTIYHLRKKLVDSTDKADLRLIYLALAHMIKFRGHFLIEGDLNPDNSDVDKLFIQLVQTYNQLFEENPINASGVDAKAILSARLSKSRRLENLIAQLPGEKKNGLFGNLIALSLGLTPNFKSNFDLAEDAKLQLSKDTYDDDLDNLLAQIGDQYADLFLAAKNLSDAILLSDILRVNTEITKAPLSASMIKRYDEHHQDLTLLKALVRQQLPEKYKEIFFDQSKNGYAGYIDGGASQEEFYKFIKPILEKMDGTEELLVKLNREDLLRKQRTFDNGSIPHQIHLGELHAILRRQEDFYPFLKDNREKIEKILTFRIPYYVGPLARGNSRFAWMTRKSEETITPWNFEEVVDKGASAQSFIERMTNFDKNLPNEKVLPKHSLLYEYFTVYNELTKVKYVTEGMRKPAFLSGEQKKAIVDLLFKTNRKVTVKQLKEDYFKKIECFDSVEISGVEDRFNASLGTYHDLLKIIKDKDFLDNEENEDILEDIVLTLTLFEDREMIEERLKTYAHLFDDKVMKQLKRRRYTGWGRLSRKLINGIRDKQSGKTILDFLKSDGFANRNFMQLIHDDSLTFKEDIQKAQVSGQGDSLHEHIANLAGSPAIKKGILQTVKVVDELVKVMGRHKPENIVIEMARENQTTQKGQKNSRERMKRIEEGIKELGSQILKEHPVENTQLQNEKLYLYYLQNGRDMYVDQELDINRLSDYDVDHIVPQSFLKDDSIDNKVLTRSDKARGKSDNVPSEEVVKKMKNYWRQLLNAKLITQRKFDNLTKAERGGLSELDKAGFIKRQLVETRQITKHVAQILDSRMNTKYDENDKLIREVKVITLKSKLVSDFRKDFQFYKVREINNYHHAHDAYLNAVVGTALIKKYPKLESEFVYGDYKVYDVRKMIAKSEQEIGKATAKYFFYSNIMNFFKTEITLANGEIRKRPLIETNGETGEIVWDKGRDFATVRKVLSMPQVNIVKKTEVQTGGFSKESILPKRNSDKLIARKKDWDPKKYGGFDSPTVAYSVLVVAKVEKGKSKKLKSVKELLGITIMERSSFEKNPIDFLEAKGYKEVKKDLIIKLPKYSLFELENGRKRMLASAGELQKGNELALPSKYVNFLYLASHYEKLKGSPEDNEQKQLFVEQHKHYLDEIIEQISEFSKRVILADANLDKVLSAYNKHRDKPIREQAENIIHLFTLTNLGAPAAFKYFDTTIDRKRYTSTKEVLDATLIHQSITGLYETRIDLSQLGGDGGGGGGSGGGGSGGGGSGGGGSGGMDLLKPLTVERKGVKIKGYWNSQADITCVPKDLLQGEEPVRQQNVTTIHGTQEGDVYYVNLKIDGRRINTEVIGTTLDYAIITPGDVPWILKKPLELTIKLDLEEQQGTLLNNSILSKKGKEELKQLFEKYSALWQSWENQVGHRRIRPHKIATGTVKPTPQKQYHINPKAKPDIQIVINDLLKQGVLIQKESTMNTPVYPVPKPNGRWRMVLDYRAVNKVTPLIAVQNQHSYGILGSLFKGRYKTTIDLSNGFWAHPIVPEDYWITAFTWQGKQYCWTVLPQGFLNSPGLFNGDVVDLLQGIPNVEVYVDDVYISHDSEKEHLEYLDILFNRLKEAGYIISLKKSNIANSIVDFLGFQITNEGRGLTDTFKEKLENITAPTTLKQLQSILGKLNFARNFIPDFTELIAPLYALIPKSPKNYVPWQIEHSTTLETLITKLNGAEYLQGRKGDKTLIMKVNASYTTGYIRYYNEGEKKPISYVSIVFSKTELKFTELEKLLTTVHKGLLKALDLSMGQNIHVYSPIVSMQNIQKTPQTAKKALASRWLSWLSYLEDPRIRFFYDPQMPALKDLPAVDTGKDNKKHPSNFQHIFYTDGSAITSPTKEGHLNAGMGIVYFINKDGNLQKQQEWSISLGNHTAQFAEIAAFEFALKKCLPLGGNILVVTDSNYVAKAYNEELDVWASNGFVNNRKKPLKHISKWKSVADLKRLRPDVVVTHEPGHQKLDSSPHAYGNNLADQLATQASFKVHAGKRTADGSEFEKRTADGSEFESPKKKAKVE

SEQ ID NO: 1132 - protein, 2167 aa, synthetic construct
MPAAKRVKLDGGDKKYSIGLDIGTNSVGWAVITDEYKVPSKKFKVLGNTDRHSIKKNLIGALLFDSGETAEATRLKRTARRRYTRRKNRICYLQEIFSNEMAKVDDSFFHRLEESFLVEEDKKHERHPIFGNIVDEVAYHEKYPTIYHLRKKLVDSTDKADLRLIYLALAHMIKFRGHFLIEGDLNPDNSDVDKLFIQLVQTYNQLFEENPINASGVDAKAILSARLSKSRRLENLIAQLPGEKKNGLFGNLIALSLGLTPNFKSNFDLAEDAKLQLSKDTYDDDLDNLLAQIGDQYADLFLAAKNLSDAILLSDILRVNTEITKAPLSASMIKRYDEHHQDLTLLKALVRQQLPEKYKEIFFDQSKNGYAGYIDGGASQEEFYKFIKPILEKMDGTEELLVKLNREDLLRKQRTFDNGSIPHQIHLGELHAILRRQEDFYPFLKDNREKIEKILTFRIPYYVGPLARGNSRFAWMTRKSEETITPWNFEEVVDKGASAQSFIERMTNFDKNLPNEKVLPKHSLLYEYFTVYNELTKVKYVTEGMRKPAFLSGEQKKAIVDLLFKTNRKVTVKQLKEDYFKKIECFDSVEISGVEDRFNASLGTYHDLLKIIKDKDFLDNEENEDILEDIVLTLTLFEDREMIEERLKTYAHLFDDKVMKQLKRRRYTGWGRLSRKLINGIRDKQSGKTILDFLKSDGFANRNFMQLIHDDSLTFKEDIQKAQVSGQGDSLHEHIANLAGSPAIKKGILQTVKVVDELVKVMGRHKPENIVIEMARENQTTQKGQKNSRERMKRIEEGIKELGSQILKEHPVENTQLQNEKLYLYYLQNGRDMYVDQELDINRLSDYDVDHIVPQSFLKDDSIDNKVLTRSDKARGKSDNVPSEEVVKKMKNYWRQLLNAKLITQRKFDNLTKAERGGLSELDKAGFIKRQLVETRQITKHVAQILDSRMNTKYDENDKLIREVKVITLKSKLVSDFRKDFQFYKVREINNYHHAHDAYLNAVVGTALIKKYPKLESEFVYGDYKVYDVRKMIAKSEQEIGKATAKYFFYSNIMNFFKTEITLANGEIRKRPLIETNGETGEIVWDKGRDFATVRKVLSMPQVNIVKKTEVQTGGFSKESILPKRNSDKLIARKKDWDPKKYGGFDSPTVAYSVLVVAKVEKGKSKKLKSVKELLGITIMERSSFEKNPIDFLEAKGYKEVKKDLIIKLPKYSLFELENGRKRMLASAGELQKGNELALPSKYVNFLYLASHYEKLKGSPEDNEQKQLFVEQHKHYLDEIIEQISEFSKRVILADANLDKVLSAYNKHRDKPIREQAENIIHLFTLTNLGAPAAFKYFDTTIDRKRYTSTKEVLDATLIHQSITGLYETRIDLSQLGGDGGEAAAKGGMDLLKPLTVERKGVKIKGYWNSQADITCVPKDLLQGEEPVRQQNVTTIHGTQEGDVYYVNLKIDGRRINTEVIGTTLDYAIITPGDVPWILKKPLELTIKLDLEEQQGTLLNNSILSKKGKEELKQLFEKYSALWQSWENQVGHRRIRPHKIATGTVKPTPQKQYHINPKAKPDIQIVINDLLKQGVLIQKESTMNTPVYPVPKPNGRWRMVLDYRAVNKVTPLIAVQNQHSYGILGSLFKGRYKTTIDLSNGFWAHPIVPEDYWITAFTWQGKQYCWTVLPQGFLNSPGLFNGDVVDLLQGIPNVEVYVDDVYISHDSEKEHLEYLDILFNRLKEAGYIISLKKSNIANSIVDFLGFQITNEGRGLTDTFKEKLENITAPTTLKQLQSILGKLNFARNFIPDFTELIAPLYALIPKSPKNYVPWQIEHSTTLETLITKLNGAEYLQGRKGDKTLIMKVNASYTTGYIRYYNEGEKKPISYVSIVFSKTELKFTELEKLLTTVHKGLLKALDLSMGQNIHVYSPIVSMQNIQKTPQTAKKALASRWLSWLSYLEDPRIRFFYDPQMPALKDLPAVDTGKDNKKHPSNFQHIFYTDGSAITSPTKEGHLNAGMGIVYFINKDGNLQKQQEWSISLGNHTAQFAEIAAFEFALKKCLPLGGNILVVTDSNYVAKAYNEELDVWASNGFVNNRKKPLKHISKWKSVADLKRLRPDVVVTHEPGHQKLDSSPHAYGNNLADQLATQASFKVHAGKRTADGSEFEKRTADGSEFESPKKKAKVE

SEQ ID NO: 1133 - protein, 2174 aa, synthetic construct
MPAAKRVKLDGGDKKYSIGLDIGTNSVGWAVITDEYKVPSKKFKVLGNTDRHSIKKNLIGALLFDSGETAEATRLKRTARRRYTRRKNRICYLQEIFSNEMAKVDDSFFHRLEESFLVEEDKKHERHPIFGNIVDEVAYHEKYPTIYHLRKKLVDSTDKADLRLIYLALAHMIKFRGHFLIEGDLNPDNSDVDKLFIQLVQTYNQLFEENPINASGVDAKAILSARLSKSRRLENLIAQLPGEKKNGLFGNLIALSLGLTPNFKSNFDLAEDAKLQLSKDTYDDDLDNLLAQIGDQYADLFLAAKNLSDAILLSDILRVNTEITKAPLSASMIKRYDEHHQDLTLLKALVRQQLPEKYKEIFFDQSKNGYAGYIDGGASQEEFYKFIKPILEKMDGTEELLVKLNREDLLRKQRTFDNGSIPHQIHLGELHAILRRQEDFYPFLKDNREKIEKILTFRIPYYVGPLARGNSRFAWMTRKSEETITPWNFEEVVDKGASAQSFIERMTNFDKNLPNEKVLPKHSLLYEYFTVYNELTKVKYVTEGMRKPAFLSGEQKKAIVDLLFKTNRKVTVKQLKEDYFKKIECFDSVEISGVEDRFNASLGTYHDLLKIIKDKDFLDNEENEDILEDIVLTLTLFEDREMIEERLKTYAHLFDDKVMKQLKRRRYTGWGRLSRKLINGIRDKQSGKTILDFLKSDGFANRNFMQLIHDDSLTFKEDIQKAQVSGQGDSLHEHIANLAGSPAIKKGILQTVKVVDELVKVMGRHKPENIVIEMARENQTTQKGQKNSRERMKRIEEGIKELGSQILKEHPVENTQLQNEKLYLYYLQNGRDMYVDQELDINRLSDYDVDHIVPQSFLKDDSIDNKVLTRSDKARGKSDNVPSEEVVKKMKNYWRQLLNAKLITQRKFDNLTKAERGGLSELDKAGFIKRQLVETRQITKHVAQILDSRMNTKYDENDKLIREVKVITLKSKLVSDFRKDFQFYKVREINNYHHAHDAYLNAVVGTALIKKYPKLESEFVYGDYKVYDVRKMIAKSEQEIGKATAKYFFYSNIMNFFKTEITLANGEIRKRPLIETNGETGEIVWDKGRDFATVRKVLSMPQVNIVKKTEVQTGGFSKESILPKRNSDKLIARKKDWDPKKYGGFDSPTVAYSVLVVAKVEKGKSKKLKSVKELLGITIMERSSFEKNPIDFLEAKGYKEVKKDLIIKLPKYSLFELENGRKRMLASAGELQKGNELALPSKYVNFLYLASHYEKLKGSPEDNEQKQLFVEQHKHYLDEIIEQISEFSKRVILADANLDKVLSAYNKHRDKPIREQAENIIHLFTLTNLGAPAAFKYFDTTIDRKRYTSTKEVLDATLIHQSITGLYETRIDLSQLGGDGGGSAGSAAGSGEFGGMDLLKPLTVERKGVKIKGYWNSQADITCVPKDLLQGEEPVRQQNVTTIHGTQEGDVYYVNLKIDGRRINTEVIGTTLDYAIITPGDVPWILKKPLELTIKLDLEEQQGTLLNNSILSKKGKEELKQLFEKYSALWQSWENQVGHRRIRPHKIATGTVKPTPQKQYHINPKAKPDIQIVINDLLKQGVLIQKESTMNTPVYPVPKPNGRWRMVLDYRAVNKVTPLIAVQNQHSYGILGSLFKGRYKTTIDLSNGFWAHPIVPEDYWITAFTWQGKQYCWTVLPQGFLNSPGLFNGDVVDLLQGIPNVEVYVDDVYISHDSEKEHLEYLDILFNRLKEAGYIISLKKSNIANSIVDFLGFQITNEGRGLTDTFKEKLENITAPTTLKQLQSILGKLNFARNFIPDFTELIAPLYALIPKSPKNYVPWQIEHSTTLETLITKLNGAEYLQGRKGDKTLIMKVNASYTTGYIRYYNEGEKKPISYVSIVFSKTELKFTELEKLLTTVHKGLLKALDLSMGQNIHVYSPIVSMQNIQKTPQTAKKALASRWLSWLSYLEDPRIRFFYDPQMPALKDLPAVDTGKDNKKHPSNFQHIFYTDGSAITSPTKEGHLNAGMGIVYFINKDGNLQKQQEWSISLGNHTAQFAEIAAFEFALKKCLPLGGNILVVTDSNYVAKAYNEELDVWASNGFVNNRKKPLKHISKWKSVADLKRLRPDVVVTHEPGHQKLDSSPHAYGNNLADQLATQASFKVHAGKRTADGSEFEKRTADGSEFESPKKKAKVE

SEQ ID NO: 1134 - protein, 2109 aa, synthetic construct
MPAAKRVKLDGGDKKYSIGLDIGTNSVGWAVITDEYKVPSKKFKVLGNTDRHSIKKNLIGALLFDSGETAEATRLKRTARRRYTRRKNRICYLQEIFSNEMAKVDDSFFHRLEESFLVEEDKKHERHPIFGNIVDEVAYHEKYPTIYHLRKKLVDSTDKADLRLIYLALAHMIKFRGHFLIEGDLNPDNSDVDKLFIQLVQTYNQLFEENPINASGVDAKAILSARLSKSRRLENLIAQLPGEKKNGLFGNLIALSLGLTPNFKSNFDLAEDAKLQLSKDTYDDDLDNLLAQIGDQYADLFLAAKNLSDAILLSDILRVNTEITKAPLSASMIKRYDEHHQDLTLLKALVRQQLPEKYKEIFFDQSKNGYAGYIDGGASQEEFYKFIKPILEKMDGTEELLVKLNREDLLRKQRTFDNGSIPHQIHLGELHAILRRQEDFYPFLKDNREKIEKILTFRIPYYVGPLARGNSRFAWMTRKSEETITPWNFEEVVDKGASAQSFIERMTNFDKNLPNEKVLPKHSLLYEYFTVYNELTKVKYVTEGMRKPAFLSGEQKKAIVDLLFKTNRKVTVKQLKEDYFKKIECFDSVEISGVEDRFNASLGTYHDLLKIIKDKDFLDNEENEDILEDIVLTLTLFEDREMIEERLKTYAHLFDDKVMKQLKRRRYTGWGRLSRKLINGIRDKQSGKTILDFLKSDGFANRNFMQLIHDDSLTFKEDIQKAQVSGQGDSLHEHIANLAGSPAIKKGILQTVKVVDELVKVMGRHKPENIVIEMARENQTTQKGQKNSRERMKRIEEGIKELGSQILKEHPVENTQLQNEKLYLYYLQNGRDMYVDQELDINRLSDYDVDHIVPQSFLKDDSIDNKVLTRSDKARGKSDNVPSEEVVKKMKNYWRQLLNAKLITQRKFDNLTKAERGGLSELDKAGFIKRQLVETRQITKHVAQILDSRMNTKYDENDKLIREVKVITLKSKLVSDFRKDFQFYKVREINNYHHAHDAYLNAVVGTALIKKYPKLESEFVYGDYKVYDVRKMIAKSEQEIGKATAKYFFYSNIMNFFKTEITLANGEIRKRPLIETNGETGEIVWDKGRDFATVRKVLSMPQVNIVKKTEVQTGGFSKESILPKRNSDKLIARKKDWDPKKYGGFDSPTVAYSVLVVAKVEKGKSKKLKSVKELLGITIMERSSFEKNPIDFLEAKGYKEVKKDLIIKLPKYSLFELENGRKRMLASAGELQKGNELALPSKYVNFLYLASHYEKLKGSPEDNEQKQLFVEQHKHYLDEIIEQISEFSKRVILADANLDKVLSAYNKHRDKPIREQAENIIHLFTLTNLGAPAAFKYFDTTIDRKRYTSTKEVLDATLIHQSITGLYETRIDLSQLGGDGGEAAAKEAAAKEAAAKEAAAKEAAAKGGTLQLEEEYRLFEPESTQKQEMDIWLKNFPQAWAETGGMGTAHCQAPVLIQLKATATPISIRQYPMPHEAYQGIKPHIRRMLDQGILKPCQSPWNTPLLPVKKPGTEDYRPVQDLREVNKRVEDIHPTVPNPYNLLSTLPPSHPWYTVLDLKDAFFCLRLHSESQLLFAFEWRDPEIGLSGQLTWTRLPQGFKNSPTLFDEALHSDLADFRVRYPALVLLQYVDDLLLAAATRTECLEGTKALLETLGNKGYRASAKKAQICLQEVTYLGYSLKDGQRWLTKARKEAILSIPVPKNSRQVREFLGTAGYCRLWIPGFAELAAPLYPLTRPGTLFQWGTEQQLAFEDIKKALLSSPALGLPDITKPFELFIDENSGFAKGVLVQKLGPWKRPVAYLSKKLDTVASGWPPCLRMVAAIAILVKDAGKLTLGQPLTILTSHPVEALVRQPPNKWLSNARMTHYQAMLLDAERVHFGPTVSLNPATLLPLPSGGNHHDCLQILAETHGTRPDLTDQPLPDADLTWYTDGSSFIRNGEREAGAAVTTESEVIWAAPLPPGTSAQRAELIALTQALKMAEGKKLTVYTDSRYAFATTHVHGEIYRRRGLLTSEGKEIKNKNEILALLEALFLPKRLSIIHCPGHQKGDSPQAKGNRLADDTAKKAATETHSSLTVLPAGKRTADGSEFEKRTADGSEFESPKKKAKVE

SEQ ID NO: 1135 - protein, 2095 aa, synthetic construct
MPAAKRVKLDGGDKKYSIGLDIGTNSVGWAVITDEYKVPSKKFKVLGNTDRHSIKKNLIGALLFDSGETAEATRLKRTARRRYTRRKNRICYLQEIFSNEMAKVDDSFFHRLEESFLVEEDKKHERHPIFGNIVDEVAYHEKYPTIYHLRKKLVDSTDKADLRLIYLALAHMIKFRGHFLIEGDLNPDNSDVDKLFIQLVQTYNQLFEENPINASGVDAKAILSARLSKSRRLENLIAQLPGEKKNGLFGNLIALSLGLTPNFKSNFDLAEDAKLQLSKDTYDDDLDNLLAQIGDQYADLFLAAKNLSDAILLSDILRVNTEITKAPLSASMIKRYDEHHQDLTLLKALVRQQLPEKYKEIFFDQSKNGYAGYIDGGASQEEFYKFIKPILEKMDGTEELLVKLNREDLLRKQRTFDNGSIPHQIHLGELHAILRRQEDFYPFLKDNREKIEKILTFRIPYYVGPLARGNSRFAWMTRKSEETITPWNFEEVVDKGASAQSFIERMTNFDKNLPNEKVLPKHSLLYEYFTVYNELTKVKYVTEGMRKPAFLSGEQKKAIVDLLFKTNRKVTVKQLKEDYFKKIECFDSVEISGVEDRFNASLGTYHDLLKIIKDKDFLDNEENEDILEDIVLTLTLFEDREMIEERLKTYAHLFDDKVMKQLKRRRYTGWGRLSRKLINGIRDKQSGKTILDFLKSDGFANRNFMQLIHDDSLTFKEDIQKAQVSGQGDSLHEHIANLAGSPAIKKGILQTVKVVDELVKVMGRHKPENIVIEMARENQTTQKGQKNSRERMKRIEEGIKELGSQILKEHPVENTQLQNEKLYLYYLQNGRDMYVDQELDINRLSDYDVDHIVPQSFLKDDSIDNKVLTRSDKARGKSDNVPSEEVVKKMKNYWRQLLNAKLITQRKFDNLTKAERGGLSELDKAGFIKRQLVETRQITKHVAQILDSRMNTKYDENDKLIREVKVITLKSKLVSDFRKDFQFYKVREINNYHHAHDAYLNAVVGTALIKKYPKLESEFVYGDYKVYDVRKMIAKSEQEIGKATAKYFFYSNIMNFFKTEITLANGEIRKRPLIETNGETGEIVWDKGRDFATVRKVLSMPQVNIVKKTEVQTGGFSKESILPKRNSDKLIARKKDWDPKKYGGFDSPTVAYSVLVVAKVEKGKSKKLKSVKELLGITIMERSSFEKNPIDFLEAKGYKEVKKDLIIKLPKYSLFELENGRKRMLASAGELQKGNELALPSKYVNFLYLASHYEKLKGSPEDNEQKQLFVEQHKHYLDEIIEQISEFSKRVILADANLDKVLSAYNKHRDKPIREQAENIIHLFTLTNLGAPAAFKYFDTTIDRKRYTSTKEVLDATLIHQSITGLYETRIDLSQLGGDGGGGSEAAAKPAPGGTLQLEEEYRLFEPESTQKQEMDIWLKNFPQAWAETGGMGTAHCQAPVLIQLKATATPISIRQYPMPHEAYQGIKPHIRRMLDQGILKPCQSPWNTPLLPVKKPGTEDYRPVQDLREVNKRVEDIHPTVPNPYNLLSTLPPSHPWYTVLDLKDAFFCLRLHSESQLLFAFEWRDPEIGLSGQLTWTRLPQGFKNSPTLFDEALHSDLADFRVRYPALVLLQYVDDLLLAAATRTECLEGTKALLETLGNKGYRASAKKAQICLQEVTYLGYSLKDGQRWLTKARKEAILSIPVPKNSRQVREFLGTAGYCRLWIPGFAELAAPLYPLTRPGTLFQWGTEQQLAFEDIKKALLSSPALGLPDITKPFELFIDENSGFAKGVLVQKLGPWKRPVAYLSKKLDTVASGWPPCLRMVAAIAILVKDAGKLTLGQPLTILTSHPVEALVRQPPNKWLSNARMTHYQAMLLDAERVHFGPTVSLNPATLLPLPSGGNHHDCLQILAETHGTRPDLTDQPLPDADLTWYTDGSSFIRNGEREAGAAVTTESEVIWAAPLPPGTSAQRAELIALTQALKMAEGKKLTVYTDSRYAFATTHVHGEIYRRRGLLTSEGKEIKNKNEILALLEALFLPKRLSIIHCPGHQKGDSPQAKGNRLADDTAKKAATETHSSLTVLPAGKRTADGSEFEKRTADGSEFESPKKKAKVE

SEQ ID NO: 1136 - protein, 2093 aa, synthetic construct
MPAAKRVKLDGGDKKYSIGLDIGTNSVGWAVITDEYKVPSKKFKVLGNTDRHSIKKNLIGALLFDSGETAEATRLKRTARRRYTRRKNRICYLQEIFSNEMAKVDDSFFHRLEESFLVEEDKKHERHPIFGNIVDEVAYHEKYPTIYHLRKKLVDSTDKADLRLIYLALAHMIKFRGHFLIEGDLNPDNSDVDKLFIQLVQTYNQLFEENPINASGVDAKAILSARLSKSRRLENLIAQLPGEKKNGLFGNLIALSLGLTPNFKSNFDLAEDAKLQLSKDTYDDDLDNLLAQIGDQYADLFLAAKNLSDAILLSDILRVNTEITKAPLSASMIKRYDEHHQDLTLLKALVRQQLPEKYKEIFFDQSKNGYAGYIDGGASQEEFYKFIKPILEKMDGTEELLVKLNREDLLRKQRTFDNGSIPHQIHLGELHAILRRQEDFYPFLKDNREKIEKILTFRIPYYVGPLARGNSRFAWMTRKSEETITPWNFEEVVDKGASAQSFIERMTNFDKNLPNEKVLPKHSLLYEYFTVYNELTKVKYVTEGMRKPAFLSGEQKKAIVDLLFKTNRKVTVKQLKEDYFKKIECFDSVEISGVEDRFNASLGTYHDLLKIIKDKDFLDNEENEDILEDIVLTLTLFEDREMIEERLKTYAHLFDDKVMKQLKRRRYTGWGRLSRKLINGIRDKQSGKTILDFLKSDGFANRNFMQLIHDDSLTFKEDIQKAQVSGQGDSLHEHIANLAGSPAIKKGILQTVKVVDELVKVMGRHKPENIVIEMARENQTTQKGQKNSRERMKRIEEGIKELGSQILKEHPVENTQLQNEKLYLYYLQNGRDMYVDQELDINRLSDYDVDHIVPQSFLKDDSIDNKVLTRSDKARGKSDNVPSEEVVKKMKNYWRQLLNAKLITQRKFDNLTKAERGGLSELDKAGFIKRQLVETRQITKHVAQILDSRMNTKYDENDKLIREVKVITLKSKLVSDFRKDFQFYKVREINNYHHAHDAYLNAVVGTALIKKYPKLESEFVYGDYKVYDVRKMIAKSEQEIGKATAKYFFYSNIMNFFKTEITLANGEIRKRPLIETNGETGEIVWDKGRDFATVRKVLSMPQVNIVKKTEVQTGGFSKESILPKRNSDKLIARKKDWDPKKYGGFDSPTVAYSVLVVAKVEKGKSKKLKSVKELLGITIMERSSFEKNPIDFLEAKGYKEVKKDLIIKLPKYSLFELENGRKRMLASAGELQKGNELALPSKYVNFLYLASHYEKLKGSPEDNEQKQLFVEQHKHYLDEIIEQISEFSKRVILADANLDKVLSAYNKHRDKPIREQAENIIHLFTLTNLGAPAAFKYFDTTIDRKRYTSTKEVLDATLIHQSITGLYETRIDLSQLGGDGGPAPGSSGGGGGTLQLEEEYRLFEPESTQKQEMDIWLKNFPQAWAETGGMGTAHCQAPVLIQLKATATPISIRQYPMPHEAYQGIKPHIRRMLDQGILKPCQSPWNTPLLPVKKPGTEDYRPVQDLREVNKRVEDIHPTVPNPYNLLSTLPPSHPWYTVLDLKDAFFCLRLHSESQLLFAFEWRDPEIGLSGQLTWTRLPQGFKNSPTLFDEALHSDLADFRVRYPALVLLQYVDDLLLAAATRTECLEGTKALLETLGNKGYRASAKKAQICLQEVTYLGYSLKDGQRWLTKARKEAILSIPVPKNSRQVREFLGTAGYCRLWIPGFAELAAPLYPLTRPGTLFQWGTEQQLAFEDIKKALLSSPALGLPDITKPFELFIDENSGFAKGVLVQKLGPWKRPVAYLSKKLDTVASGWPPCLRMVAAIAILVKDAGKLTLGQPLTILTSHPVEALVRQPPNKWLSNARMTHYQAMLLDAERVHFGPTVSLNPATLLPLPSGGNHHDCLQILAETHGTRPDLTDQPLPDADLTWYTDGSSFIRNGEREAGAAVTTESEVIWAAPLPPGTSAQRAELIALTQALKMAEGKKLTVYTDSRYAFATTHVHGEIYRRRGLLTSEGKEIKNKNEILALLEALFLPKRLSIIHCPGHQKGDSPQAKGNRLADDTAKKAATETHSSLTVLPAGKRTADGSEFEKRTADGSEFESPKKKAKVE

SEQ ID NO: 1137 - protein, 2107 aa, synthetic construct
MPAAKRVKLDGGDKKYSIGLDIGTNSVGWAVITDEYKVPSKKFKVLGNTDRHSIKKNLIGALLFDSGETAEATRLKRTARRRYTRRKNRICYLQEIFSNEMAKVDDSFFHRLEESFLVEEDKKHERHPIFGNIVDEVAYHEKYPTIYHLRKKLVDSTDKADLRLIYLALAHMIKFRGHFLIEGDLNPDNSDVDKLFIQLVQTYNQLFEENPINASGVDAKAILSARLSKSRRLENLIAQLPGEKKNGLFGNLIALSLGLTPNFKSNFDLAEDAKLQLSKDTYDDDLDNLLAQIGDQYADLFLAAKNLSDAILLSDILRVNTEITKAPLSASMIKRYDEHHQDLTLLKALVRQQLPEKYKEIFFDQSKNGYAGYIDGGASQEEFYKFIKPILEKMDGTEELLVKLNREDLLRKQRTFDNGSIPHQIHLGELHAILRRQEDFYPFLKDNREKIEKILTFRIPYYVGPLARGNSRFAWMTRKSEETITPWNFEEVVDKGASAQSFIERMTNFDKNLPNEKVLPKHSLLYEYFTVYNELTKVKYVTEGMRKPAFLSGEQKKAIVDLLFKTNRKVTVKQLKEDYFKKIECFDSVEISGVEDRFNASLGTYHDLLKIIKDKDFLDNEENEDILEDIVLTLTLFEDREMIEERLKTYAHLFDDKVMKQLKRRRYTGWGRLSRKLINGIRDKQSGKTILDFLKSDGFANRNFMQLIHDDSLTFKEDIQKAQVSGQGDSLHEHIANLAGSPAIKKGILQTVKVVDELVKVMGRHKPENIVIEMARENQTTQKGQKNSRERMKRIEEGIKELGSQILKEHPVENTQLQNEKLYLYYLQNGRDMYVDQELDINRLSDYDVDHIVPQSFLKDDSIDNKVLTRSDKARGKSDNVPSEEVVKKMKNYWRQLLNAKLITQRKFDNLTKAERGGLSELDKAGFIKRQLVETRQITKHVAQILDSRMNTKYDENDKLIREVKVITLKSKLVSDFRKDFQFYKVREINNYHHAHDAYLNAVVGTALIKKYPKLESEFVYGDYKVYDVRKMIAKSEQEIGKATAKYFFYSNIMNFFKTEITLANGEIRKRPLIETNGETGEIVWDKGRDFATVRKVLSMPQVNIVKKTEVQTGGFSKESILPKRNSDKLIARKKDWDPKKYGGFDSPTVAYSVLVVAKVEKGKSKKLKSVKELLGITIMERSSFEKNPIDFLEAKGYKEVKKDLIIKLPKYSLFELENGRKRMLASAGELQKGNELALPSKYVNFLYLASHYEKLKGSPEDNEQKQLFVEQHKHYLDEIIEQISEFSKRVILADANLDKVLSAYNKHRDKPIREQAENIIHLFTLTNLGAPAAFKYFDTTIDRKRYTSTKEVLDATLIHQSITGLYETRIDLSQLGGDGGEAAAKEAAAKEAAAKEAAAKGGTAPLEEEYRLFLEAPIQNVTLLEQWKREIPKVWAEINPPGLASTQAPIHVQLLSTALPVRVRQYPITLEAKRSLRETIRKFRAAGILRPVHSPWNTPLLPVRKSGTSEYRMVQDLREVNKRVETIHPTVPNPYTLLSLLPPDRIWYSVLDLKDAFFCIPLAPESQLIFAFEWADAEEGESGQLTWTRLPQGFKNSPTLFNEALNRDLQGFRLDHPSVSLLQYVDDLLIAADTQAACLSATRDLLMTLAELGYRVSGKKAQLCQEEVTYLGFKIHKGSRSLSNSRTQAILQIPVPKTKRQVREFLGTIGYCRLWIPGFAELAQPLYAATRPGNDPLVWGEKEEEAFQSLKLALTQPPALALPSLDKPFQLFVEETSGAAKGVLTQALGPWKRPVAYLSKRLDPVAAGWPRCLRAIAAAALLTREASKLTFGQDIEITSSHNLESLLRSPPDKWLTNARITQYQVLLLDPPRVRFKQTAALNPATLLPETDDTLPIHHCLDTLDSLTSTRPDLTDQPLAQAEATLFTDGSSYIRDGKRYAGAAVVTLDSVIWAEPLPIGTSAQKAELIALTKALEWSKDKSVNIYTDSRYAFATLHVHGMIYRERGWLTAGGKAIKNAPEILALLTAVWLPKRVAVMHCKGHQKDDAPTSTGNRRADEVAREVAIRPLSTQATISAGKRTADGSEFEKRTADGSEFESPKKKAKVE

SEQ ID NO: 1138 - protein, 2100 aa, synthetic construct
MPAAKRVKLDGGDKKYSIGLDIGTNSVGWAVITDEYKVPSKKFKVLGNTDRHSIKKNLIGALLFDSGETAEATRLKRTARRRYTRRKNRICYLQEIFSNEMAKVDDSFFHRLEESFLVEEDKKHERHPIFGNIVDEVAYHEKYPTIYHLRKKLVDSTDKADLRLIYLALAHMIKFRGHFLIEGDLNPDNSDVDKLFIQLVQTYNQLFEENPINASGVDAKAILSARLSKSRRLENLIAQLPGEKKNGLFGNLIALSLGLTPNFKSNFDLAEDAKLQLSKDTYDDDLDNLLAQIGDQYADLFLAAKNLSDAILLSDILRVNTEITKAPLSASMIKRYDEHHQDLTLLKALVRQQLPEKYKEIFFDQSKNGYAGYIDGGASQEEFYKFIKPILEKMDGTEELLVKLNREDLLRKQRTFDNGSIPHQIHLGELHAILRRQEDFYPFLKDNREKIEKILTFRIPYYVGPLARGNSRFAWMTRKSEETITPWNFEEVVDKGASAQSFIERMTNFDKNLPNEKVLPKHSLLYEYFTVYNELTKVKYVTEGMRKPAFLSGEQKKAIVDLLFKTNRKVTVKQLKEDYFKKIECFDSVEISGVEDRFNASLGTYHDLLKIIKDKDFLDNEENEDILEDIVLTLTLFEDREMIEERLKTYAHLFDDKVMKQLKRRRYTGWGRLSRKLINGIRDKQSGKTILDFLKSDGFANRNFMQLIHDDSLTFKEDIQKAQVSGQGDSLHEHIANLAGSPAIKKGILQTVKVVDELVKVMGRHKPENIVIEMARENQTTQKGQKNSRERMKRIEEGIKELGSQILKEHPVENTQLQNEKLYLYYLQNGRDMYVDQELDINRLSDYDVDHIVPQSFLKDDSIDNKVLTRSDKARGKSDNVPSEEVVKKMKNYWRQLLNAKLITQRKFDNLTKAERGGLSELDKAGFIKRQLVETRQITKHVAQILDSRMNTKYDENDKLIREVKVITLKSKLVSDFRKDFQFYKVREINNYHHAHDAYLNAVVGTALIKKYPKLESEFVYGDYKVYDVRKMIAKSEQEIGKATAKYFFYSNIMNFFKTEITLANGEIRKRPLIETNGETGEIVWDKGRDFATVRKVLSMPQVNIVKKTEVQTGGFSKESILPKRNSDKLIARKKDWDPKKYGGFDSPTVAYSVLVVAKVEKGKSKKLKSVKELLGITIMERSSFEKNPIDFLEAKGYKEVKKDLIIKLPKYSLFELENGRKRMLASAGELQKGNELALPSKYVNFLYLASHYEKLKGSPEDNEQKQLFVEQHKHYLDEIIEQISEFSKRVILADANLDKVLSAYNKHRDKPIREQAENIIHLFTLTNLGAPAAFKYFDTTIDRKRYTSTKEVLDATLIHQSITGLYETRIDLSQLGGDGGPAPAPAPAPAPAPGGTAPLEEEYRLFLEAPIQNVTLLEQWKREIPKVWAEINPPGLASTQAPIHVQLLSTALPVRVRQYPITLEAKRSLRETIRKFRAAGILRPVHSPWNTPLLPVRKSGTSEYRMVQDLREVNKRVETIHPTVPNPYTLLSLLPPDRIWYSVLDLKDAFFCIPLAPESQLIFAFEWADAEEGESGQLTWTRLPQGFKNSPTLFNEALNRDLQGFRLDHPSVSLLQYVDDLLIAADTQAACLSATRDLLMTLAELGYRVSGKKAQLCQEEVTYLGFKIHKGSRSLSNSRTQAILQIPVPKTKRQVREFLGTIGYCRLWIPGFAELAQPLYAATRPGNDPLVWGEKEEEAFQSLKLALTQPPALALPSLDKPFQLFVEETSGAAKGVLTQALGPWKRPVAYLSKRLDPVAAGWPRCLRAIAAAALLTREASKLTFGQDIEITSSHNLESLLRSPPDKWLTNARITQYQVLLLDPPRVRFKQTAALNPATLLPETDDTLPIHHCLDTLDSLTSTRPDLTDQPLAQAEATLFTDGSSYIRDGKRYAGAAVVTLDSVIWAEPLPIGTSAQKAELIALTKALEWSKDKSVNIYTDSRYAFATLHVHGMIYRERGWLTAGGKAIKNAPEILALLTAVWLPKRVAVMHCKGHQKDDAPTSTGNRRADEVAREVAIRPLSTQATISAGKRTADGSEFEKRTADGSEFESPKKKAKVE

SEQ ID NO: 1139 - protein, 2098 aa, synthetic construct
MPAAKRVKLDGGDKKYSIGLDIGTNSVGWAVITDEYKVPSKKFKVLGNTDRHSIKKNLIGALLFDSGETAEATRLKRTARRRYTRRKNRICYLQEIFSNEMAKVDDSFFHRLEESFLVEEDKKHERHPIFGNIVDEVAYHEKYPTIYHLRKKLVDSTDKADLRLIYLALAHMIKFRGHFLIEGDLNPDNSDVDKLFIQLVQTYNQLFEENPINASGVDAKAILSARLSKSRRLENLIAQLPGEKKNGLFGNLIALSLGLTPNFKSNFDLAEDAKLQLSKDTYDDDLDNLLAQIGDQYADLFLAAKNLSDAILLSDILRVNTEITKAPLSASMIKRYDEHHQDLTLLKALVRQQLPEKYKEIFFDQSKNGYAGYIDGGASQEEFYKFIKPILEKMDGTEELLVKLNREDLLRKQRTFDNGSIPHQIHLGELHAILRRQEDFYPFLKDNREKIEKILTFRIPYYVGPLARGNSRFAWMTRKSEETITPWNFEEVVDKGASAQSFIERMTNFDKNLPNEKVLPKHSLLYEYFTVYNELTKVKYVTEGMRKPAFLSGEQKKAIVDLLFKTNRKVTVKQLKEDYFKKIECFDSVEISGVEDRFNASLGTYHDLLKIIKDKDFLDNEENEDILEDIVLTLTLFEDREMIEERLKTYAHLFDDKVMKQLKRRRYTGWGRLSRKLINGIRDKQSGKTILDFLKSDGFANRNFMQLIHDDSLTFKEDIQKAQVSGQGDSLHEHIANLAGSPAIKKGILQTVKVVDELVKVMGRHKPENIVIEMARENQTTQKGQKNSRERMKRIEEGIKELGSQILKEHPVENTQLQNEKLYLYYLQNGRDMYVDQELDINRLSDYDVDHIVPQSFLKDDSIDNKVLTRSDKARGKSDNVPSEEVVKKMKNYWRQLLNAKLITQRKFDNLTKAERGGLSELDKAGFIKRQLVETRQITKHVAQILDSRMNTKYDENDKLIREVKVITLKSKLVSDFRKDFQFYKVREINNYHHAHDAYLNAVVGTALIKKYPKLESEFVYGDYKVYDVRKMIAKSEQEIGKATAKYFFYSNIMNFFKTEITLANGEIRKRPLIETNGETGEIVWDKGRDFATVRKVLSMPQVNIVKKTEVQTGGFSKESILPKRNSDKLIARKKDWDPKKYGGFDSPTVAYSVLVVAKVEKGKSKKLKSVKELLGITIMERSSFEKNPIDFLEAKGYKEVKKDLIIKLPKYSLFELENGRKRMLASAGELQKGNELALPSKYVNFLYLASHYEKLKGSPEDNEQKQLFVEQHKHYLDEIIEQISEFSKRVILADANLDKVLSAYNKHRDKPIREQAENIIHLFTLTNLGAPAAFKYFDTTIDRKRYTSTKEVLDATLIHQSITGLYETRIDLSQLGGDGGEAAAKGGSPAPGGTAPLEEEYRLFLEAPIQNVTLLEQWKREIPKVWAEINPPGLASTQAPIHVQLLSTALPVRVRQYPITLEAKRSLRETIRKFRAAGILRPVHSPWNTPLLPVRKSGTSEYRMVQDLREVNKRVETIHPTVPNPYTLLSLLPPDRIWYSVLDLKDAFFCIPLAPESQLIFAFEWADAEEGESGQLTWTRLPQGFKNSPTLFNEALNRDLQGFRLDHPSVSLLQYVDDLLIAADTQAACLSATRDLLMTLAELGYRVSGKKAQLCQEEVTYLGFKIHKGSRSLSNSRTQAILQIPVPKTKRQVREFLGTIGYCRLWIPGFAELAQPLYAATRPGNDPLVWGEKEEEAFQSLKLALTQPPALALPSLDKPFQLFVEETSGAAKGVLTQALGPWKRPVAYLSKRLDPVAAGWPRCLRAIAAAALLTREASKLTFGQDIEITSSHNLESLLRSPPDKWLTNARITQYQVLLLDPPRVRFKQTAALNPATLLPETDDTLPIHHCLDTLDSLTSTRPDLTDQPLAQAEATLFTDGSSYIRDGKRYAGAAVVTLDSVIWAEPLPIGTSAQKAELIALTKALEWSKDKSVNIYTDSRYAFATLHVHGMIYRERGWLTAGGKAIKNAPEILALLTAVWLPKRVAVMHCKGHQKDDAPTSTGNRRADEVAREVAIRPLSTQATISAGKRTADGSEFEKRTADGSEFESPKKKAKVE

SEQ ID NO: 1140 - protein, 2096 aa, synthetic construct
MPAAKRVKLDGGDKKYSIGLDIGTNSVGWAVITDEYKVPSKKFKVLGNTDRHSIKKNLIGALLFDSGETAEATRLKRTARRRYTRRKNRICYLQEIFSNEMAKVDDSFFHRLEESFLVEEDKKHERHPIFGNIVDEVAYHEKYPTIYHLRKKLVDSTDKADLRLIYLALAHMIKFRGHFLIEGDLNPDNSDVDKLFIQLVQTYNQLFEENPINASGVDAKAILSARLSKSRRLENLIAQLPGEKKNGLFGNLIALSLGLTPNFKSNFDLAEDAKLQLSKDTYDDDLDNLLAQIGDQYADLFLAAKNLSDAILLSDILRVNTEITKAPLSASMIKRYDEHHQDLTLLKALVRQQLPEKYKEIFFDQSKNGYAGYIDGGASQEEFYKFIKPILEKMDGTEELLVKLNREDLLRKQRTFDNGSIPHQIHLGELHAILRRQEDFYPFLKDNREKIEKILTFRIPYYVGPLARGNSRFAWMTRKSEETITPWNFEEVVDKGASAQSFIERMTNFDKNLPNEKVLPKHSLLYEYFTVYNELTKVKYVTEGMRKPAFLSGEQKKAIVDLLFKTNRKVTVKQLKEDYFKKIECFDSVEISGVEDRFNASLGTYHDLLKIIKDKDFLDNEENEDILEDIVLTLTLFEDREMIEERLKTYAHLFDDKVMKQLKRRRYTGWGRLSRKLINGIRDKQSGKTILDFLKSDGFANRNFMQLIHDDSLTFKEDIQKAQVSGQGDSLHEHIANLAGSPAIKKGILQTVKVVDELVKVMGRHKPENIVIEMARENQTTQKGQKNSRERMKRIEEGIKELGSQILKEHPVENTQLQNEKLYLYYLQNGRDMYVDQELDINRLSDYDVDHIVPQSFLKDDSIDNKVLTRSDKARGKSDNVPSEEVVKKMKNYWRQLLNAKLITQRKFDNLTKAERGGLSELDKAGFIKRQLVETRQITKHVAQILDSRMNTKYDENDKLIREVKVITLKSKLVSDFRKDFQFYKVREINNYHHAHDAYLNAVVGTALIKKYPKLESEFVYGDYKVYDVRKMIAKSEQEIGKATAKYFFYSNIMNFFKTEITLANGEIRKRPLIETNGETGEIVWDKGRDFATVRKVLSMPQVNIVKKTEVQTGGFSKESILPKRNSDKLIARKKDWDPKKYGGFDSPTVAYSVLVVAKVEKGKSKKLKSVKELLGITIMERSSFEKNPIDFLEAKGYKEVKKDLIIKLPKYSLFELENGRKRMLASAGELQKGNELALPSKYVNFLYLASHYEKLKGSPEDNEQKQLFVEQHKHYLDEIIEQISEFSKRVILADANLDKVLSAYNKHRDKPIREQAENIIHLFTLTNLGAPAAFKYFDTTIDRKRYTSTKEVLDATLIHQSITGLYETRIDLSQLGGDGGGGGPAPGSSGGTAPLEEEYRLFLEAPIQNVTLLEQWKREIPKVWAEINPPGLASTQAPIHVQLLSTALPVRVRQYPITLEAKRSLRETIRKFRAAGILRPVHSPWNTPLLPVRKSGTSEYRMVQDLREVNKRVETIHPTVPNPYTLLSLLPPDRIWYSVLDLKDAFFCIPLAPESQLIFAFEWADAEEGESGQLTWTRLPQGFKNSPTLFNEALNRDLQGFRLDHPSVSLLQYVDDLLIAADTQAACLSATRDLLMTLAELGYRVSGKKAQLCQEEVTYLGFKIHKGSRSLSNSRTQAILQIPVPKTKRQVREFLGTIGYCRLWIPGFAELAQPLYAATRPGNDPLVWGEKEEEAFQSLKLALTQPPALALPSLDKPFQLFVEETSGAAKGVLTQALGPWKRPVAYLSKRLDPVAAGWPRCLRAIAAAALLTREASKLTFGQDIEITSSHNLESLLRSPPDKWLTNARITQYQVLLLDPPRVRFKQTAALNPATLLPETDDTLPIHHCLDTLDSLTSTRPDLTDQPLAQAEATLFTDGSSYIRDGKRYAGAAVVTLDSVIWAEPLPIGTSAQKAELIALTKALEWSKDKSVNIYTDSRYAFATLHVHGMIYRERGWLTAGGKAIKNAPEILALLTAVWLPKRVAVMHCKGHQKDDAPTSTGNRRADEVAREVAIRPLSTQATISAGKRTADGSEFEKRTADGSEFESPKKKAKVE

SEQ ID NO: 1141 - protein, 2095 aa, synthetic construct
MPAAKRVKLDGGDKKYSIGLDIGTNSVGWAVITDEYKVPSKKFKVLGNTDRHSIKKNLIGALLFDSGETAEATRLKRTARRRYTRRKNRICYLQEIFSNEMAKVDDSFFHRLEESFLVEEDKKHERHPIFGNIVDEVAYHEKYPTIYHLRKKLVDSTDKADLRLIYLALAHMIKFRGHFLIEGDLNPDNSDVDKLFIQLVQTYNQLFEENPINASGVDAKAILSARLSKSRRLENLIAQLPGEKKNGLFGNLIALSLGLTPNFKSNFDLAEDAKLQLSKDTYDDDLDNLLAQIGDQYADLFLAAKNLSDAILLSDILRVNTEITKAPLSASMIKRYDEHHQDLTLLKALVRQQLPEKYKEIFFDQSKNGYAGYIDGGASQEEFYKFIKPILEKMDGTEELLVKLNREDLLRKQRTFDNGSIPHQIHLGELHAILRRQEDFYPFLKDNREKIEKILTFRIPYYVGPLARGNSRFAWMTRKSEETITPWNFEEVVDKGASAQSFIERMTNFDKNLPNEKVLPKHSLLYEYFTVYNELTKVKYVTEGMRKPAFLSGEQKKAIVDLLFKTNRKVTVKQLKEDYFKKIECFDSVEISGVEDRFNASLGTYHDLLKIIKDKDFLDNEENEDILEDIVLTLTLFEDREMIEERLKTYAHLFDDKVMKQLKRRRYTGWGRLSRKLINGIRDKQSGKTILDFLKSDGFANRNFMQLIHDDSLTFKEDIQKAQVSGQGDSLHEHIANLAGSPAIKKGILQTVKVVDELVKVMGRHKPENIVIEMARENQTTQKGQKNSRERMKRIEEGIKELGSQILKEHPVENTQLQNEKLYLYYLQNGRDMYVDQELDINRLSDYDVDHIVPQSFLKDDSIDNKVLTRSDKARGKSDNVPSEEVVKKMKNYWRQLLNAKLITQRKFDNLTKAERGGLSELDKAGFIKRQLVETRQITKHVAQILDSRMNTKYDENDKLIREVKVITLKSKLVSDFRKDFQFYKVREINNYHHAHDAYLNAVVGTALIKKYPKLESEFVYGDYKVYDVRKMIAKSEQEIGKATAKYFFYSNIMNFFKTEITLANGEIRKRPLIETNGETGEIVWDKGRDFATVRKVLSMPQVNIVKKTEVQTGGFSKESILPKRNSDKLIARKKDWDPKKYGGFDSPTVAYSVLVVAKVEKGKSKKLKSVKELLGITIMERSSFEKNPIDFLEAKGYKEVKKDLIIKLPKYSLFELENGRKRMLASAGELQKGNELALPSKYVNFLYLASHYEKLKGSPEDNEQKQLFVEQHKHYLDEIIEQISEFSKRVILADANLDKVLSAYNKHRDKPIREQAENIIHLFTLTNLGAPAAFKYFDTTIDRKRYTSTKEVLDATLIHQSITGLYETRIDLSQLGGDGGEAAAKGGGGGTAPLEEEYRLFLEAPIQNVTLLEQWKREIPKVWAEINPPGLASTQAPIHVQLLSTALPVRVRQYPITLEAKRSLRETIRKFRAAGILRPVHSPWNTPLLPVRKSGTSEYRMVQDLREVNKRVETIHPTVPNPYTLLSLLPPDRIWYSVLDLKDAFFCIPLAPESQLIFAFEWADAEEGESGQLTWTRLPQGFKNSPTLFNEALNRDLQGFRLDHPSVSLLQYVDDLLIAADTQAACLSATRDLLMTLAELGYRVSGKKAQLCQEEVTYLGFKIHKGSRSLSNSRTQAILQIPVPKTKRQVREFLGTIGYCRLWIPGFAELAQPLYAATRPGNDPLVWGEKEEEAFQSLKLALTQPPALALPSLDKPFQLFVEETSGAAKGVLTQALGPWKRPVAYLSKRLDPVAAGWPRCLRAIAAAALLTREASKLTFGQDIEITSSHNLESLLRSPPDKWLTNARITQYQVLLLDPPRVRFKQTAALNPATLLPETDDTLPIHHCLDTLDSLTSTRPDLTDQPLAQAEATLFTDGSSYIRDGKRYAGAAVVTLDSVIWAEPLPIGTSAQKAELIALTKALEWSKDKSVNIYTDSRYAFATLHVHGMIYRERGWLTAGGKAIKNAPEILALLTAVWLPKRVAVMHCKGHQKDDAPTSTGNRRADEVAREVAIRPLSTQATISAGKRTADGSEFEKRTADGSEFESPKKKAKVE

SEQ ID NO: 1142 - protein, 2098 aa, synthetic construct
MPAAKRVKLDGGDKKYSIGLDIGTNSVGWAVITDEYKVPSKKFKVLGNTDRHSIKKNLIGALLFDSGETAEATRLKRTARRRYTRRKNRICYLQEIFSNEMAKVDDSFFHRLEESFLVEEDKKHERHPIFGNIVDEVAYHEKYPTIYHLRKKLVDSTDKADLRLIYLALAHMIKFRGHFLIEGDLNPDNSDVDKLFIQLVQTYNQLFEENPINASGVDAKAILSARLSKSRRLENLIAQLPGEKKNGLFGNLIALSLGLTPNFKSNFDLAEDAKLQLSKDTYDDDLDNLLAQIGDQYADLFLAAKNLSDAILLSDILRVNTEITKAPLSASMIKRYDEHHQDLTLLKALVRQQLPEKYKEIFFDQSKNGYAGYIDGGASQEEFYKFIKPILEKMDGTEELLVKLNREDLLRKQRTFDNGSIPHQIHLGELHAILRRQEDFYPFLKDNREKIEKILTFRIPYYVGPLARGNSRFAWMTRKSEETITPWNFEEVVDKGASAQSFIERMTNFDKNLPNEKVLPKHSLLYEYFTVYNELTKVKYVTEGMRKPAFLSGEQKKAIVDLLFKTNRKVTVKQLKEDYFKKIECFDSVEISGVEDRFNASLGTYHDLLKIIKDKDFLDNEENEDILEDIVLTLTLFEDREMIEERLKTYAHLFDDKVMKQLKRRRYTGWGRLSRKLINGIRDKQSGKTILDFLKSDGFANRNFMQLIHDDSLTFKEDIQKAQVSGQGDSLHEHIANLAGSPAIKKGILQTVKVVDELVKVMGRHKPENIVIEMARENQTTQKGQKNSRERMKRIEEGIKELGSQILKEHPVENTQLQNEKLYLYYLQNGRDMYVDQELDINRLSDYDVDHIVPQSFLKDDSIDNKVLTRSDKARGKSDNVPSEEVVKKMKNYWRQLLNAKLITQRKFDNLTKAERGGLSELDKAGFIKRQLVETRQITKHVAQILDSRMNTKYDENDKLIREVKVITLKSKLVSDFRKDFQFYKVREINNYHHAHDAYLNAVVGTALIKKYPKLESEFVYGDYKVYDVRKMIAKSEQEIGKATAKYFFYSNIMNFFKTEITLANGEIRKRPLIETNGETGEIVWDKGRDFATVRKVLSMPQVNIVKKTEVQTGGFSKESILPKRNSDKLIARKKDWDPKKYGGFDSPTVAYSVLVVAKVEKGKSKKLKSVKELLGITIMERSSFEKNPIDFLEAKGYKEVKKDLIIKLPKYSLFELENGRKRMLASAGELQKGNELALPSKYVNFLYLASHYEKLKGSPEDNEQKQLFVEQHKHYLDEIIEQISEFSKRVILADANLDKVLSAYNKHRDKPIREQAENIIHLFTLTNLGAPAAFKYFDTTIDRKRYTSTKEVLDATLIHQSITGLYETRIDLSQLGGDGGGGGEAAAKGSSGGTAPLEEEYRLFLEAPIQNVTLLEQWKREIPKVWAEINPPGLASTQAPIHVQLLSTALPVRVRQYPITLEAKRSLRETIRKFRAAGILRPVHSPWNTPLLPVRKSGTSEYRMVQDLREVNKRVETIHPTVPNPYTLLSLLPPDRIWYSVLDLKDAFFCIPLAPESQLIFAFEWADAEEGESGQLTWTRLPQGFKNSPTLFNEALNRDLQGFRLDHPSVSLLQYVDDLLIAADTQAACLSATRDLLMTLAELGYRVSGKKAQLCQEEVTYLGFKIHKGSRSLSNSRTQAILQIPVPKTKRQVREFLGTIGYCRLWIPGFAELAQPLYAATRPGNDPLVWGEKEEEAFQSLKLALTQPPALALPSLDKPFQLFVEETSGAAKGVLTQALGPWKRPVAYLSKRLDPVAAGWPRCLRAIAAAALLTREASKLTFGQDIEITSSHNLESLLRSPPDKWLTNARITQYQVLLLDPPRVRFKQTAALNPATLLPETDDTLPIHHCLDTLDSLTSTRPDLTDQPLAQAEATLFTDGSSYIRDGKRYAGAAVVTLDSVIWAEPLPIGTSAQKAELIALTKALEWSKDKSVNIYTDSRYAFATLHVHGMIYRERGWLTAGGKAIKNAPEILALLTAVWLPKRVAVMHCKGHQKDDAPTSTGNRRADEVAREVAIRPLSTQATISAGKRTADGSEFEKRTADGSEFESPKKKAKVE

SEQ ID NO: 1143 - protein, 2102 aa, synthetic construct
MPAAKRVKLDGGDKKYSIGLDIGTNSVGWAVITDEYKVPSKKFKVLGNTDRHSIKKNLIGALLFDSGETAEATRLKRTARRRYTRRKNRICYLQEIFSNEMAKVDDSFFHRLEESFLVEEDKKHERHPIFGNIVDEVAYHEKYPTIYHLRKKLVDSTDKADLRLIYLALAHMIKFRGHFLIEGDLNPDNSDVDKLFIQLVQTYNQLFEENPINASGVDAKAILSARLSKSRRLENLIAQLPGEKKNGLFGNLIALSLGLTPNFKSNFDLAEDAKLQLSKDTYDDDLDNLLAQIGDQYADLFLAAKNLSDAILLSDILRVNTEITKAPLSASMIKRYDEHHQDLTLLKALVRQQLPEKYKEIFFDQSKNGYAGYIDGGASQEEFYKFIKPILEKMDGTEELLVKLNREDLLRKQRTFDNGSIPHQIHLGELHAILRRQEDFYPFLKDNREKIEKILTFRIPYYVGPLARGNSRFAWMTRKSEETITPWNFEEVVDKGASAQSFIERMTNFDKNLPNEKVLPKHSLLYEYFTVYNELTKVKYVTEGMRKPAFLSGEQKKAIVDLLFKTNRKVTVKQLKEDYFKKIECFDSVEISGVEDRFNASLGTYHDLLKIIKDKDFLDNEENEDILEDIVLTLTLFEDREMIEERLKTYAHLFDDKVMKQLKRRRYTGWGRLSRKLINGIRDKQSGKTILDFLKSDGFANRNFMQLIHDDSLTFKEDIQKAQVSGQGDSLHEHIANLAGSPAIKKGILQTVKVVDELVKVMGRHKPENIVIEMARENQTTQKGQKNSRERMKRIEEGIKELGSQILKEHPVENTQLQNEKLYLYYLQNGRDMYVDQELDINRLSDYDVDHIVPQSFLKDDSIDNKVLTRSDKARGKSDNVPSEEVVKKMKNYWRQLLNAKLITQRKFDNLTKAERGGLSELDKAGFIKRQLVETRQITKHVAQILDSRMNTKYDENDKLIREVKVITLKSKLVSDFRKDFQFYKVREINNYHHAHDAYLNAVVGTALIKKYPKLESEFVYGDYKVYDVRKMIAKSEQEIGKATAKYFFYSNIMNFFKTEITLANGEIRKRPLIETNGETGEIVWDKGRDFATVRKVLSMPQVNIVKKTEVQTGGFSKESILPKRNSDKLIARKKDWDPKKYGGFDSPTVAYSVLVVAKVEKGKSKKLKSVKELLGITIMERSSFEKNPIDFLEAKGYKEVKKDLIIKLPKYSLFELENGRKRMLASAGELQKGNELALPSKYVNFLYLASHYEKLKGSPEDNEQKQLFVEQHKHYLDEIIEQISEFSKRVILADANLDKVLSAYNKHRDKPIREQAENIIHLFTLTNLGAPAAFKYFDTTIDRKRYTSTKEVLDATLIHQSITGLYETRIDLSQLGGDGGGSSGSSGSSGSSGSSGGTAPLEEEYRLFLEAPIQNVTLLEQWKREIPKVWAEINPPGLASTQAPIHVQLLSTALPVRVRQYPITLEAKRSLRETIRKFRAAGILRPVHSPWNTPLLPVRKSGTSEYRMVQDLREVNKRVETIHPTVPNPYTLLSLLPPDRIWYSVLDLKDAFFCIPLAPESQLIFAFEWADAEEGESGQLTWTRLPQGFKNSPTLFNEALNRDLQGFRLDHPSVSLLQYVDDLLIAADTQAACLSATRDLLMTLAELGYRVSGKKAQLCQEEVTYLGFKIHKGSRSLSNSRTQAILQIPVPKTKRQVREFLGTIGYCRLWIPGFAELAQPLYAATRPGNDPLVWGEKEEEAFQSLKLALTQPPALALPSLDKPFQLFVEETSGAAKGVLTQALGPWKRPVAYLSKRLDPVAAGWPRCLRAIAAAALLTREASKLTFGQDIEITSSHNLESLLRSPPDKWLTNARITQYQVLLLDPPRVRFKQTAALNPATLLPETDDTLPIHHCLDTLDSLTSTRPDLTDQPLAQAEATLFTDGSSYIRDGKRYAGAAVVTLDSVIWAEPLPIGTSAQKAELIALTKALEWSKDKSVNIYTDSRYAFATLHVHGMIYRERGWLTAGGKAIKNAPEILALLTAVWLPKRVAVMHCKGHQKDDAPTSTGNRRADEVAREVAIRPLSTQATISAGKRTADGSEFEKRTADGSEFESPKKKAKVE

SEQ ID NO: 1144 - protein, 2090 aa, synthetic construct
MPAAKRVKLDGGDKKYSIGLDIGTNSVGWAVITDEYKVPSKKFKVLGNTDRHSIKKNLIGALLFDSGETAEATRLKRTARRRYTRRKNRICYLQEIFSNEMAKVDDSFFHRLEESFLVEEDKKHERHPIFGNIVDEVAYHEKYPTIYHLRKKLVDSTDKADLRLIYLALAHMIKFRGHFLIEGDLNPDNSDVDKLFIQLVQTYNQLFEENPINASGVDAKAILSARLSKSRRLENLIAQLPGEKKNGLFGNLIALSLGLTPNFKSNFDLAEDAKLQLSKDTYDDDLDNLLAQIGDQYADLFLAAKNLSDAILLSDILRVNTEITKAPLSASMIKRYDEHHQDLTLLKALVRQQLPEKYKEIFFDQSKNGYAGYIDGGASQEEFYKFIKPILEKMDGTEELLVKLNREDLLRKQRTFDNGSIPHQIHLGELHAILRRQEDFYPFLKDNREKIEKILTFRIPYYVGPLARGNSRFAWMTRKSEETITPWNFEEVVDKGASAQSFIERMTNFDKNLPNEKVLPKHSLLYEYFTVYNELTKVKYVTEGMRKPAFLSGEQKKAIVDLLFKTNRKVTVKQLKEDYFKKIECFDSVEISGVEDRFNASLGTYHDLLKIIKDKDFLDNEENEDILEDIVLTLTLFEDREMIEERLKTYAHLFDDKVMKQLKRRRYTGWGRLSRKLINGIRDKQSGKTILDFLKSDGFANRNFMQLIHDDSLTFKEDIQKAQVSGQGDSLHEHIANLAGSPAIKKGILQTVKVVDELVKVMGRHKPENIVIEMARENQTTQKGQKNSRERMKRIEEGIKELGSQILKEHPVENTQLQNEKLYLYYLQNGRDMYVDQELDINRLSDYDVDHIVPQSFLKDDSIDNKVLTRSDKARGKSDNVPSEEVVKKMKNYWRQLLNAKLITQRKFDNLTKAERGGLSELDKAGFIKRQLVETRQITKHVAQILDSRMNTKYDENDKLIREVKVITLKSKLVSDFRKDFQFYKVREINNYHHAHDAYLNAVVGTALIKKYPKLESEFVYGDYKVYDVRKMIAKSEQEIGKATAKYFFYSNIMNFFKTEITLANGEIRKRPLIETNGETGEIVWDKGRDFATVRKVLSMPQVNIVKKTEVQTGGFSKESILPKRNSDKLIARKKDWDPKKYGGFDSPTVAYSVLVVAKVEKGKSKKLKSVKELLGITIMERSSFEKNPIDFLEAKGYKEVKKDLIIKLPKYSLFELENGRKRMLASAGELQKGNELALPSKYVNFLYLASHYEKLKGSPEDNEQKQLFVEQHKHYLDEIIEQISEFSKRVILADANLDKVLSAYNKHRDKPIREQAENIIHLFTLTNLGAPAAFKYFDTTIDRKRYTSTKEVLDATLIHQSITGLYETRIDLSQLGGDGGGGSGGTAPLEEEYRLFLEAPIQNVTLLEQWKREIPKVWAEINPPGLASTQAPIHVQLLSTALPVRVRQYPITLEAKRSLRETIRKFRAAGILRPVHSPWNTPLLPVRKSGTSEYRMVQDLREVNKRVETIHPTVPNPYTLLSLLPPDRIWYSVLDLKDAFFCIPLAPESQLIFAFEWADAEEGESGQLTWTRLPQGFKNSPTLFNEALNRDLQGFRLDHPSVSLLQYVDDLLIAADTQAACLSATRDLLMTLAELGYRVSGKKAQLCQEEVTYLGFKIHKGSRSLSNSRTQAILQIPVPKTKRQVREFLGTIGYCRLWIPGFAELAQPLYAATRPGNDPLVWGEKEEEAFQSLKLALTQPPALALPSLDKPFQLFVEETSGAAKGVLTQALGPWKRPVAYLSKRLDPVAAGWPRCLRAIAAAALLTREASKLTFGQDIEITSSHNLESLLRSPPDKWLTNARITQYQVLLLDPPRVRFKQTAALNPATLLPETDDTLPIHHCLDTLDSLTSTRPDLTDQPLAQAEATLFTDGSSYIRDGKRYAGAAVVTLDSVIWAEPLPIGTSAQKAELIALTKALEWSKDKSVNIYTDSRYAFATLHVHGMIYRERGWLTAGGKAIKNAPEILALLTAVWLPKRVAVMHCKGHQKDDAPTSTGNRRADEVAREVAIRPLSTQATISAGKRTADGSEFEKRTADGSEFESPKKKAKVE

SEQ ID NO: 1145 - protein, 2098 aa, synthetic construct
MPAAKRVKLDGGDKKYSIGLDIGTNSVGWAVITDEYKVPSKKFKVLGNTDRHSIKKNLIGALLFDSGETAEATRLKRTARRRYTRRKNRICYLQEIFSNEMAKVDDSFFHRLEESFLVEEDKKHERHPIFGNIVDEVAYHEKYPTIYHLRKKLVDSTDKADLRLIYLALAHMIKFRGHFLIEGDLNPDNSDVDKLFIQLVQTYNQLFEENPINASGVDAKAILSARLSKSRRLENLIAQLPGEKKNGLFGNLIALSLGLTPNFKSNFDLAEDAKLQLSKDTYDDDLDNLLAQIGDQYADLFLAAKNLSDAILLSDILRVNTEITKAPLSASMIKRYDEHHQDLTLLKALVRQQLPEKYKEIFFDQSKNGYAGYIDGGASQEEFYKFIKPILEKMDGTEELLVKLNREDLLRKQRTFDNGSIPHQIHLGELHAILRRQEDFYPFLKDNREKIEKILTFRIPYYVGPLARGNSRFAWMTRKSEETITPWNFEEVVDKGASAQSFIERMTNFDKNLPNEKVLPKHSLLYEYFTVYNELTKVKYVTEGMRKPAFLSGEQKKAIVDLLFKTNRKVTVKQLKEDYFKKIECFDSVEISGVEDRFNASLGTYHDLLKIIKDKDFLDNEENEDILEDIVLTLTLFEDREMIEERLKTYAHLFDDKVMKQLKRRRYTGWGRLSRKLINGIRDKQSGKTILDFLKSDGFANRNFMQLIHDDSLTFKEDIQKAQVSGQGDSLHEHIANLAGSPAIKKGILQTVKVVDELVKVMGRHKPENIVIEMARENQTTQKGQKNSRERMKRIEEGIKELGSQILKEHPVENTQLQNEKLYLYYLQNGRDMYVDQELDINRLSDYDVDHIVPQSFLKDDSIDNKVLTRSDKARGKSDNVPSEEVVKKMKNYWRQLLNAKLITQRKFDNLTKAERGGLSELDKAGFIKRQLVETRQITKHVAQILDSRMNTKYDENDKLIREVKVITLKSKLVSDFRKDFQFYKVREINNYHHAHDAYLNAVVGTALIKKYPKLESEFVYGDYKVYDVRKMIAKSEQEIGKATAKYFFYSNIMNFFKTEITLANGEIRKRPLIETNGETGEIVWDKGRDFATVRKVLSMPQVNIVKKTEVQTGGFSKESILPKRNSDKLIARKKDWDPKKYGGFDSPTVAYSVLVVAKVEKGKSKKLKSVKELLGITIMERSSFEKNPIDFLEAKGYKEVKKDLIIKLPKYSLFELENGRKRMLASAGELQKGNELALPSKYVNFLYLASHYEKLKGSPEDNEQKQLFVEQHKHYLDEIIEQISEFSKRVILADANLDKVLSAYNKHRDKPIREQAENIIHLFTLTNLGAPAAFKYFDTTIDRKRYTSTKEVLDATLIHQSITGLYETRIDLSQLGGDGGEAAAKPAPGSSGGTAPLEEEYRLFLEAPIQNVTLLEQWKREIPKVWAEINPPGLASTQAPIHVQLLSTALPVRVRQYPITLEAKRSLRETIRKFRAAGILRPVHSPWNTPLLPVRKSGTSEYRMVQDLREVNKRVETIHPTVPNPYTLLSLLPPDRIWYSVLDLKDAFFCIPLAPESQLIFAFEWADAEEGESGQLTWTRLPQGFKNSPTLFNEALNRDLQGFRLDHPSVSLLQYVDDLLIAADTQAACLSATRDLLMTLAELGYRVSGKKAQLCQEEVTYLGFKIHKGSRSLSNSRTQAILQIPVPKTKRQVREFLGTIGYCRLWIPGFAELAQPLYAATRPGNDPLVWGEKEEEAFQSLKLALTQPPALALPSLDKPFQLFVEETSGAAKGVLTQALGPWKRPVAYLSKRLDPVAAGWPRCLRAIAAAALLTREASKLTFGQDIEITSSHNLESLLRSPPDKWLTNARITQYQVLLLDPPRVRFKQTAALNPATLLPETDDTLPIHHCLDTLDSLTSTRPDLTDQPLAQAEATLFTDGSSYIRDGKRYAGAAVVTLDSVIWAEPLPIGTSAQKAELIALTKALEWSKDKSVNIYTDSRYAFATLHVHGMIYRERGWLTAGGKAIKNAPEILALLTAVWLPKRVAVMHCKGHQKDDAPTSTGNRRADEVAREVAIRPLSTQATISAGKRTADGSEFEKRTADGSEFESPKKKAKVE

SEQ ID NO: 1146 - protein, 2133 aa, synthetic construct
MPAAKRVKLDGGDKKYSIGLDIGTNSVGWAVITDEYKVPSKKFKVLGNTDRHSIKKNLIGALLFDSGETAEATRLKRTARRRYTRRKNRICYLQEIFSNEMAKVDDSFFHRLEESFLVEEDKKHERHPIFGNIVDEVAYHEKYPTIYHLRKKLVDSTDKADLRLIYLALAHMIKFRGHFLIEGDLNPDNSDVDKLFIQLVQTYNQLFEENPINASGVDAKAILSARLSKSRRLENLIAQLPGEKKNGLFGNLIALSLGLTPNFKSNFDLAEDAKLQLSKDTYDDDLDNLLAQIGDQYADLFLAAKNLSDAILLSDILRVNTEITKAPLSASMIKRYDEHHQDLTLLKALVRQQLPEKYKEIFFDQSKNGYAGYIDGGASQEEFYKFIKPILEKMDGTEELLVKLNREDLLRKQRTFDNGSIPHQIHLGELHAILRRQEDFYPFLKDNREKIEKILTFRIPYYVGPLARGNSRFAWMTRKSEETITPWNFEEVVDKGASAQSFIERMTNFDKNLPNEKVLPKHSLLYEYFTVYNELTKVKYVTEGMRKPAFLSGEQKKAIVDLLFKTNRKVTVKQLKEDYFKKIECFDSVEISGVEDRFNASLGTYHDLLKIIKDKDFLDNEENEDILEDIVLTLTLFEDREMIEERLKTYAHLFDDKVMKQLKRRRYTGWGRLSRKLINGIRDKQSGKTILDFLKSDGFANRNFMQLIHDDSLTFKEDIQKAQVSGQGDSLHEHIANLAGSPAIKKGILQTVKVVDELVKVMGRHKPENIVIEMARENQTTQKGQKNSRERMKRIEEGIKELGSQILKEHPVENTQLQNEKLYLYYLQNGRDMYVDQELDINRLSDYDVDHIVPQSFLKDDSIDNKVLTRSDKARGKSDNVPSEEVVKKMKNYWRQLLNAKLITQRKFDNLTKAERGGLSELDKAGFIKRQLVETRQITKHVAQILDSRMNTKYDENDKLIREVKVITLKSKLVSDFRKDFQFYKVREINNYHHAHDAYLNAVVGTALIKKYPKLESEFVYGDYKVYDVRKMIAKSEQEIGKATAKYFFYSNIMNFFKTEITLANGEIRKRPLIETNGETGEIVWDKGRDFATVRKVLSMPQVNIVKKTEVQTGGFSKESILPKRNSDKLIARKKDWDPKKYGGFDSPTVAYSVLVVAKVEKGKSKKLKSVKELLGITIMERSSFEKNPIDFLEAKGYKEVKKDLIIKLPKYSLFELENGRKRMLASAGELQKGNELALPSKYVNFLYLASHYEKLKGSPEDNEQKQLFVEQHKHYLDEIIEQISEFSKRVILADANLDKVLSAYNKHRDKPIREQAENIIHLFTLTNLGAPAAFKYFDTTIDRKRYTSTKEVLDATLIHQSITGLYETRIDLSQLGGDGGAEAAAKEAAAKEAAAKEAAAKALEAEAAAKEAAAKEAAAKEAAAKAGGTAPLEEEYRLFLEAPIQNVTLLEQWKREIPKVWAEINPPGLASTQAPIHVQLLSTALPVRVRQYPITLEAKRSLRETIRKFRAAGILRPVHSPWNTPLLPVRKSGTSEYRMVQDLREVNKRVETIHPTVPNPYTLLSLLPPDRIWYSVLDLKDAFFCIPLAPESQLIFAFEWADAEEGESGQLTWTRLPQGFKNSPTLFNEALNRDLQGFRLDHPSVSLLQYVDDLLIAADTQAACLSATRDLLMTLAELGYRVSGKKAQLCQEEVTYLGFKIHKGSRSLSNSRTQAILQIPVPKTKRQVREFLGTIGYCRLWIPGFAELAQPLYAATRPGNDPLVWGEKEEEAFQSLKLALTQPPALALPSLDKPFQLFVEETSGAAKGVLTQALGPWKRPVAYLSKRLDPVAAGWPRCLRAIAAAALLTREASKLTFGQDIEITSSHNLESLLRSPPDKWLTNARITQYQVLLLDPPRVRFKQTAALNPATLLPETDDTLPIHHCLDTLDSLTSTRPDLTDQPLAQAEATLFTDGSSYIRDGKRYAGAAVVTLDSVIWAEPLPIGTSAQKAELIALTKALEWSKDKSVNIYTDSRYAFATLHVHGMIYRERGWLTAGGKAIKNAPEILALLTAVWLPKRVAVMHCKGHQKDDAPTSTGNRRADEVAREVAIRPLSTQATISAGKRTADGSEFEKRTADGSEFESPKKKAKVE

SEQ ID NO: 1147 - protein, 2098 aa, synthetic construct
MPAAKRVKLDGGDKKYSIGLDIGTNSVGWAVITDEYKVPSKKFKVLGNTDRHSIKKNLIGALLFDSGETAEATRLKRTARRRYTRRKNRICYLQEIFSNEMAKVDDSFFHRLEESFLVEEDKKHERHPIFGNIVDEVAYHEKYPTIYHLRKKLVDSTDKADLRLIYLALAHMIKFRGHFLIEGDLNPDNSDVDKLFIQLVQTYNQLFEENPINASGVDAKAILSARLSKSRRLENLIAQLPGEKKNGLFGNLIALSLGLTPNFKSNFDLAEDAKLQLSKDTYDDDLDNLLAQIGDQYADLFLAAKNLSDAILLSDILRVNTEITKAPLSASMIKRYDEHHQDLTLLKALVRQQLPEKYKEIFFDQSKNGYAGYIDGGASQEEFYKFIKPILEKMDGTEELLVKLNREDLLRKQRTFDNGSIPHQIHLGELHAILRRQEDFYPFLKDNREKIEKILTFRIPYYVGPLARGNSRFAWMTRKSEETITPWNFEEVVDKGASAQSFIERMTNFDKNLPNEKVLPKHSLLYEYFTVYNELTKVKYVTEGMRKPAFLSGEQKKAIVDLLFKTNRKVTVKQLKEDYFKKIECFDSVEISGVEDRFNASLGTYHDLLKIIKDKDFLDNEENEDILEDIVLTLTLFEDREMIEERLKTYAHLFDDKVMKQLKRRRYTGWGRLSRKLINGIRDKQSGKTILDFLKSDGFANRNFMQLIHDDSLTFKEDIQKAQVSGQGDSLHEHIANLAGSPAIKKGILQTVKVVDELVKVMGRHKPENIVIEMARENQTTQKGQKNSRERMKRIEEGIKELGSQILKEHPVENTQLQNEKLYLYYLQNGRDMYVDQELDINRLSDYDVDHIVPQSFLKDDSIDNKVLTRSDKARGKSDNVPSEEVVKKMKNYWRQLLNAKLITQRKFDNLTKAERGGLSELDKAGFIKRQLVETRQITKHVAQILDSRMNTKYDENDKLIREVKVITLKSKLVSDFRKDFQFYKVREINNYHHAHDAYLNAVVGTALIKKYPKLESEFVYGDYKVYDVRKMIAKSEQEIGKATAKYFFYSNIMNFFKTEITLANGEIRKRPLIETNGETGEIVWDKGRDFATVRKVLSMPQVNIVKKTEVQTGGFSKESILPKRNSDKLIARKKDWDPKKYGGFDSPTVAYSVLVVAKVEKGKSKKLKSVKELLGITIMERSSFEKNPIDFLEAKGYKEVKKDLIIKLPKYSLFELENGRKRMLASAGELQKGNELALPSKYVNFLYLASHYEKLKGSPEDNEQKQLFVEQHKHYLDEIIEQISEFSKRVILADANLDKVLSAYNKHRDKPIREQAENIIHLFTLTNLGAPAAFKYFDTTIDRKRYTSTKEVLDATLIHQSITGLYETRIDLSQLGGDGGGGSEAAAKPAPGGTAPLEEEYRLFLEAPIQNVTLLEQWKREIPKVWAEINPPGLASTQAPIHVQLLSTALPVRVRQYPITLEAKRSLRETIRKFRAAGILRPVHSPWNTPLLPVRKSGTSEYRMVQDLREVNKRVETIHPTVPNPYTLLSLLPPDRIWYSVLDLKDAFFCIPLAPESQLIFAFEWADAEEGESGQLTWTRLPQGFKNSPTLFNEALNRDLQGFRLDHPSVSLLQYVDDLLIAADTQAACLSATRDLLMTLAELGYRVSGKKAQLCQEEVTYLGFKIHKGSRSLSNSRTQAILQIPVPKTKRQVREFLGTIGYCRLWIPGFAELAQPLYAATRPGNDPLVWGEKEEEAFQSLKLALTQPPALALPSLDKPFQLFVEETSGAAKGVLTQALGPWKRPVAYLSKRLDPVAAGWPRCLRAIAAAALLTREASKLTFGQDIEITSSHNLESLLRSPPDKWLTNARITQYQVLLLDPPRVRFKQTAALNPATLLPETDDTLPIHHCLDTLDSLTSTRPDLTDQPLAQAEATLFTDGSSYIRDGKRYAGAAVVTLDSVIWAEPLPIGTSAQKAELIALTKALEWSKDKSVNIYTDSRYAFATLHVHGMIYRERGWLTAGGKAIKNAPEILALLTAVWLPKRVAVMHCKGHQKDDAPTSTGNRRADEVAREVAIRPLSTQATISAGKRTADGSEFEKRTADGSEFESPKKKAKVE

SEQ ID NO: 1148 - protein, 2090 aa, synthetic construct
MPAAKRVKLDGGDKKYSIGLDIGTNSVGWAVITDEYKVPSKKFKVLGNTDRHSIKKNLIGALLFDSGETAEATRLKRTARRRYTRRKNRICYLQEIFSNEMAKVDDSFFHRLEESFLVEEDKKHERHPIFGNIVDEVAYHEKYPTIYHLRKKLVDSTDKADLRLIYLALAHMIKFRGHFLIEGDLNPDNSDVDKLFIQLVQTYNQLFEENPINASGVDAKAILSARLSKSRRLENLIAQLPGEKKNGLFGNLIALSLGLTPNFKSNFDLAEDAKLQLSKDTYDDDLDNLLAQIGDQYADLFLAAKNLSDAILLSDILRVNTEITKAPLSASMIKRYDEHHQDLTLLKALVRQQLPEKYKEIFFDQSKNGYAGYIDGGASQEEFYKFIKPILEKMDGTEELLVKLNREDLLRKQRTFDNGSIPHQIHLGELHAILRRQEDFYPFLKDNREKIEKILTFRIPYYVGPLARGNSRFAWMTRKSEETITPWNFEEVVDKGASAQSFIERMTNFDKNLPNEKVLPKHSLLYEYFTVYNELTKVKYVTEGMRKPAFLSGEQKKAIVDLLFKTNRKVTVKQLKEDYFKKIECFDSVEISGVEDRFNASLGTYHDLLKIIKDKDFLDNEENEDILEDIVLTLTLFEDREMIEERLKTYAHLFDDKVMKQLKRRRYTGWGRLSRKLINGIRDKQSGKTILDFLKSDGFANRNFMQLIHDDSLTFKEDIQKAQVSGQGDSLHEHIANLAGSPAIKKGILQTVKVVDELVKVMGRHKPENIVIEMARENQTTQKGQKNSRERMKRIEEGIKELGSQILKEHPVENTQLQNEKLYLYYLQNGRDMYVDQELDINRLSDYDVDHIVPQSFLKDDSIDNKVLTRSDKARGKSDNVPSEEVVKKMKNYWRQLLNAKLITQRKFDNLTKAERGGLSELDKAGFIKRQLVETRQITKHVAQILDSRMNTKYDENDKLIREVKVITLKSKLVSDFRKDFQFYKVREINNYHHAHDAYLNAVVGTALIKKYPKLESEFVYGDYKVYDVRKMIAKSEQEIGKATAKYFFYSNIMNFFKTEITLANGEIRKRPLIETNGETGEIVWDKGRDFATVRKVLSMPQVNIVKKTEVQTGGFSKESILPKRNSDKLIARKKDWDPKKYGGFDSPTVAYSVLVVAKVEKGKSKKLKSVKELLGITIMERSSFEKNPIDFLEAKGYKEVKKDLIIKLPKYSLFELENGRKRMLASAGELQKGNELALPSKYVNFLYLASHYEKLKGSPEDNEQKQLFVEQHKHYLDEIIEQISEFSKRVILADANLDKVLSAYNKHRDKPIREQAENIIHLFTLTNLGAPAAFKYFDTTIDRKRYTSTKEVLDATLIHQSITGLYETRIDLSQLGGDGGPAPGGTAPLEEEYRLFLEAPIQNVTLLEQWKREIPKVWAEINPPGLASTQAPIHVQLLSTALPVRVRQYPITLEAKRSLRETIRKFRAAGILRPVHSPWNTPLLPVRKSGTSEYRMVQDLREVNKRVETIHPTVPNPYTLLSLLPPDRIWYSVLDLKDAFFCIPLAPESQLIFAFEWADAEEGESGQLTWTRLPQGFKNSPTLFNEALNRDLQGFRLDHPSVSLLQYVDDLLIAADTQAACLSATRDLLMTLAELGYRVSGKKAQLCQEEVTYLGFKIHKGSRSLSNSRTQAILQIPVPKTKRQVREFLGTIGYCRLWIPGFAELAQPLYAATRPGNDPLVWGEKEEEAFQSLKLALTQPPALALPSLDKPFQLFVEETSGAAKGVLTQALGPWKRPVAYLSKRLDPVAAGWPRCLRAIAAAALLTREASKLTFGQDIEITSSHNLESLLRSPPDKWLTNARITQYQVLLLDPPRVRFKQTAALNPATLLPETDDTLPIHHCLDTLDSLTSTRPDLTDQPLAQAEATLFTDGSSYIRDGKRYAGAAVVTLDSVIWAEPLPIGTSAQKAELIALTKALEWSKDKSVNIYTDSRYAFATLHVHGMIYRERGWLTAGGKAIKNAPEILALLTAVWLPKRVAVMHCKGHQKDDAPTSTGNRRADEVAREVAIRPLSTQATISAGKRTADGSEFEKRTADGSEFESPKKKAKVE

SEQ ID NO: 1149 - protein, 2092 aa, synthetic construct
MPAAKRVKLDGGDKKYSIGLDIGTNSVGWAVITDEYKVPSKKFKVLGNTDRHSIKKNLIGALLFDSGETAEATRLKRTARRRYTRRKNRICYLQEIFSNEMAKVDDSFFHRLEESFLVEEDKKHERHPIFGNIVDEVAYHEKYPTIYHLRKKLVDSTDKADLRLIYLALAHMIKFRGHFLIEGDLNPDNSDVDKLFIQLVQTYNQLFEENPINASGVDAKAILSARLSKSRRLENLIAQLPGEKKNGLFGNLIALSLGLTPNFKSNFDLAEDAKLQLSKDTYDDDLDNLLAQIGDQYADLFLAAKNLSDAILLSDILRVNTEITKAPLSASMIKRYDEHHQDLTLLKALVRQQLPEKYKEIFFDQSKNGYAGYIDGGASQEEFYKFIKPILEKMDGTEELLVKLNREDLLRKQRTFDNGSIPHQIHLGELHAILRRQEDFYPFLKDNREKIEKILTFRIPYYVGPLARGNSRFAWMTRKSEETITPWNFEEVVDKGASAQSFIERMTNFDKNLPNEKVLPKHSLLYEYFTVYNELTKVKYVTEGMRKPAFLSGEQKKAIVDLLFKTNRKVTVKQLKEDYFKKIECFDSVEISGVEDRFNASLGTYHDLLKIIKDKDFLDNEENEDILEDIVLTLTLFEDREMIEERLKTYAHLFDDKVMKQLKRRRYTGWGRLSRKLINGIRDKQSGKTILDFLKSDGFANRNFMQLIHDDSLTFKEDIQKAQVSGQGDSLHEHIANLAGSPAIKKGILQTVKVVDELVKVMGRHKPENIVIEMARENQTTQKGQKNSRERMKRIEEGIKELGSQILKEHPVENTQLQNEKLYLYYLQNGRDMYVDQELDINRLSDYDVDHIVPQSFLKDDSIDNKVLTRSDKARGKSDNVPSEEVVKKMKNYWRQLLNAKLITQRKFDNLTKAERGGLSELDKAGFIKRQLVETRQITKHVAQILDSRMNTKYDENDKLIREVKVITLKSKLVSDFRKDFQFYKVREINNYHHAHDAYLNAVVGTALIKKYPKLESEFVYGDYKVYDVRKMIAKSEQEIGKATAKYFFYSNIMNFFKTEITLANGEIRKRPLIETNGETGEIVWDKGRDFATVRKVLSMPQVNIVKKTEVQTGGFSKESILPKRNSDKLIARKKDWDPKKYGGFDSPTVAYSVLVVAKVEKGKSKKLKSVKELLGITIMERSSFEKNPIDFLEAKGYKEVKKDLIIKLPKYSLFELENGRKRMLASAGELQKGNELALPSKYVNFLYLASHYEKLKGSPEDNEQKQLFVEQHKHYLDEIIEQISEFSKRVILADANLDKVLSAYNKHRDKPIREQAENIIHLFTLTNLGAPAAFKYFDTTIDRKRYTSTKEVLDATLIHQSITGLYETRIDLSQLGGDGGPAPAPGGTAPLEEEYRLFLEAPIQNVTLLEQWKREIPKVWAEINPPGLASTQAPIHVQLLSTALPVRVRQYPITLEAKRSLRETIRKFRAAGILRPVHSPWNTPLLPVRKSGTSEYRMVQDLREVNKRVETIHPTVPNPYTLLSLLPPDRIWYSVLDLKDAFFCIPLAPESQLIFAFEWADAEEGESGQLTWTRLPQGFKNSPTLFNEALNRDLQGFRLDHPSVSLLQYVDDLLIAADTQAACLSATRDLLMTLAELGYRVSGKKAQLCQEEVTYLGFKIHKGSRSLSNSRTQAILQIPVPKTKRQVREFLGTIGYCRLWIPGFAELAQPLYAATRPGNDPLVWGEKEEEAFQSLKLALTQPPALALPSLDKPFQLFVEETSGAAKGVLTQALGPWKRPVAYLSKRLDPVAAGWPRCLRAIAAAALLTREASKLTFGQDIEITSSHNLESLLRSPPDKWLTNARITQYQVLLLDPPRVRFKQTAALNPATLLPETDDTLPIHHCLDTLDSLTSTRPDLTDQPLAQAEATLFTDGSSYIRDGKRYAGAAVVTLDSVIWAEPLPIGTSAQKAELIALTKALEWSKDKSVNIYTDSRYAFATLHVHGMIYRERGWLTAGGKAIKNAPEILALLTAVWLPKRVAVMHCKGHQKDDAPTSTGNRRADEVAREVAIRPLSTQATISAGKRTADGSEFEKRTADGSEFESPKKKAKVE

SEQ ID NO: 1150 - protein, 2096 aa, synthetic construct
MPAAKRVKLDGGDKKYSIGLDIGTNSVGWAVITDEYKVPSKKFKVLGNTDRHSIKKNLIGALLFDSGETAEATRLKRTARRRYTRRKNRICYLQEIFSNEMAKVDDSFFHRLEESFLVEEDKKHERHPIFGNIVDEVAYHEKYPTIYHLRKKLVDSTDKADLRLIYLALAHMIKFRGHFLIEGDLNPDNSDVDKLFIQLVQTYNQLFEENPINASGVDAKAILSARLSKSRRLENLIAQLPGEKKNGLFGNLIALSLGLTPNFKSNFDLAEDAKLQLSKDTYDDDLDNLLAQIGDQYADLFLAAKNLSDAILLSDILRVNTEITKAPLSASMIKRYDEHHQDLTLLKALVRQQLPEKYKEIFFDQSKNGYAGYIDGGASQEEFYKFIKPILEKMDGTEELLVKLNREDLLRKQRTFDNGSIPHQIHLGELHAILRRQEDFYPFLKDNREKIEKILTFRIPYYVGPLARGNSRFAWMTRKSEETITPWNFEEVVDKGASAQSFIERMTNFDKNLPNEKVLPKHSLLYEYFTVYNELTKVKYVTEGMRKPAFLSGEQKKAIVDLLFKTNRKVTVKQLKEDYFKKIECFDSVEISGVEDRFNASLGTYHDLLKIIKDKDFLDNEENEDILEDIVLTLTLFEDREMIEERLKTYAHLFDDKVMKQLKRRRYTGWGRLSRKLINGIRDKQSGKTILDFLKSDGFANRNFMQLIHDDSLTFKEDIQKAQVSGQGDSLHEHIANLAGSPAIKKGILQTVKVVDELVKVMGRHKPENIVIEMARENQTTQKGQKNSRERMKRIEEGIKELGSQILKEHPVENTQLQNEKLYLYYLQNGRDMYVDQELDINRLSDYDVDHIVPQSFLKDDSIDNKVLTRSDKARGKSDNVPSEEVVKKMKNYWRQLLNAKLITQRKFDNLTKAERGGLSELDKAGFIKRQLVETRQITKHVAQILDSRMNTKYDENDKLIREVKVITLKSKLVSDFRKDFQFYKVREINNYHHAHDAYLNAVVGTALIKKYPKLESEFVYGDYKVYDVRKMIAKSEQEIGKATAKYFFYSNIMNFFKTEITLANGEIRKRPLIETNGETGEIVWDKGRDFATVRKVLSMPQVNIVKKTEVQTGGFSKESILPKRNSDKLIARKKDWDPKKYGGFDSPTVAYSVLVVAKVEKGKSKKLKSVKELLGITIMERSSFEKNPIDFLEAKGYKEVKKDLIIKLPKYSLFELENGRKRMLASAGELQKGNELALPSKYVNFLYLASHYEKLKGSPEDNEQKQLFVEQHKHYLDEIIEQISEFSKRVILADANLDKVLSAYNKHRDKPIREQAENIIHLFTLTNLGAPAAFKYFDTTIDRKRYTSTKEVLDATLIHQSITGLYETRIDLSQLGGDGGGGSPAPGGGGGTAPLEEEYRLFLEAPIQNVTLLEQWKREIPKVWAEINPPGLASTQAPIHVQLLSTALPVRVRQYPITLEAKRSLRETIRKFRAAGILRPVHSPWNTPLLPVRKSGTSEYRMVQDLREVNKRVETIHPTVPNPYTLLSLLPPDRIWYSVLDLKDAFFCIPLAPESQLIFAFEWADAEEGESGQLTWTRLPQGFKNSPTLFNEALNRDLQGFRLDHPSVSLLQYVDDLLIAADTQAACLSATRDLLMTLAELGYRVSGKKAQLCQEEVTYLGFKIHKGSRSLSNSRTQAILQIPVPKTKRQVREFLGTIGYCRLWIPGFAELAQPLYAATRPGNDPLVWGEKEEEAFQSLKLALTQPPALALPSLDKPFQLFVEETSGAAKGVLTQALGPWKRPVAYLSKRLDPVAAGWPRCLRAIAAAALLTREASKLTFGQDIEITSSHNLESLLRSPPDKWLTNARITQYQVLLLDPPRVRFKQTAALNPATLLPETDDTLPIHHCLDTLDSLTSTRPDLTDQPLAQAEATLFTDGSSYIRDGKRYAGAAVVTLDSVIWAEPLPIGTSAQKAELIALTKALEWSKDKSVNIYTDSRYAFATLHVHGMIYRERGWLTAGGKAIKNAPEILALLTAVWLPKRVAVMHCKGHQKDDAPTSTGNRRADEVAREVAIRPLSTQATISAGKRTADGSEFEKRTADGSEFESPKKKAKVE

SEQ ID NO: 1151 - protein, 2098 aa, synthetic construct
MPAAKRVKLDGGDKKYSIGLDIGTNSVGWAVITDEYKVPSKKFKVLGNTDRHSIKKNLIGALLFDSGETAEATRLKRTARRRYTRRKNRICYLQEIFSNEMAKVDDSFFHRLEESFLVEEDKKHERHPIFGNIVDEVAYHEKYPTIYHLRKKLVDSTDKADLRLIYLALAHMIKFRGHFLIEGDLNPDNSDVDKLFIQLVQTYNQLFEENPINASGVDAKAILSARLSKSRRLENLIAQLPGEKKNGLFGNLIALSLGLTPNFKSNFDLAEDAKLQLSKDTYDDDLDNLLAQIGDQYADLFLAAKNLSDAILLSDILRVNTEITKAPLSASMIKRYDEHHQDLTLLKALVRQQLPEKYKEIFFDQSKNGYAGYIDGGASQEEFYKFIKPILEKMDGTEELLVKLNREDLLRKQRTFDNGSIPHQIHLGELHAILRRQEDFYPFLKDNREKIEKILTFRIPYYVGPLARGNSRFAWMTRKSEETITPWNFEEVVDKGASAQSFIERMTNFDKNLPNEKVLPKHSLLYEYFTVYNELTKVKYVTEGMRKPAFLSGEQKKAIVDLLFKTNRKVTVKQLKEDYFKKIECFDSVEISGVEDRFNASLGTYHDLLKIIKDKDFLDNEENEDILEDIVLTLTLFEDREMIEERLKTYAHLFDDKVMKQLKRRRYTGWGRLSRKLINGIRDKQSGKTILDFLKSDGFANRNFMQLIHDDSLTFKEDIQKAQVSGQGDSLHEHIANLAGSPAIKKGILQTVKVVDELVKVMGRHKPENIVIEMARENQTTQKGQKNSRERMKRIEEGIKELGSQILKEHPVENTQLQNEKLYLYYLQNGRDMYVDQELDINRLSDYDVDHIVPQSFLKDDSIDNKVLTRSDKARGKSDNVPSEEVVKKMKNYWRQLLNAKLITQRKFDNLTKAERGGLSELDKAGFIKRQLVETRQITKHVAQILDSRMNTKYDENDKLIREVKVITLKSKLVSDFRKDFQFYKVREINNYHHAHDAYLNAVVGTALIKKYPKLESEFVYGDYKVYDVRKMIAKSEQEIGKATAKYFFYSNIMNFFKTEITLANGEIRKRPLIETNGETGEIVWDKGRDFATVRKVLSMPQVNIVKKTEVQTGGFSKESILPKRNSDKLIARKKDWDPKKYGGFDSPTVAYSVLVVAKVEKGKSKKLKSVKELLGITIMERSSFEKNPIDFLEAKGYKEVKKDLIIKLPKYSLFELENGRKRMLASAGELQKGNELALPSKYVNFLYLASHYEKLKGSPEDNEQKQLFVEQHKHYLDEIIEQISEFSKRVILADANLDKVLSAYNKHRDKPIREQAENIIHLFTLTNLGAPAAFKYFDTTIDRKRYTSTKEVLDATLIHQSITGLYETRIDLSQLGGDGGGSSGGGEAAAKGGTAPLEEEYRLFLEAPIQNVTLLEQWKREIPKVWAEINPPGLASTQAPIHVQLLSTALPVRVRQYPITLEAKRSLRETIRKFRAAGILRPVHSPWNTPLLPVRKSGTSEYRMVQDLREVNKRVETIHPTVPNPYTLLSLLPPDRIWYSVLDLKDAFFCIPLAPESQLIFAFEWADAEEGESGQLTWTRLPQGFKNSPTLFNEALNRDLQGFRLDHPSVSLLQYVDDLLIAADTQAACLSATRDLLMTLAELGYRVSGKKAQLCQEEVTYLGFKIHKGSRSLSNSRTQAILQIPVPKTKRQVREFLGTIGYCRLWIPGFAELAQPLYAATRPGNDPLVWGEKEEEAFQSLKLALTQPPALALPSLDKPFQLFVEETSGAAKGVLTQALGPWKRPVAYLSKRLDPVAAGWPRCLRAIAAAALLTREASKLTFGQDIEITSSHNLESLLRSPPDKWLTNARITQYQVLLLDPPRVRFKQTAALNPATLLPETDDTLPIHHCLDTLDSLTSTRPDLTDQPLAQAEATLFTDGSSYIRDGKRYAGAAVVTLDSVIWAEPLPIGTSAQKAELIALTKALEWSKDKSVNIYTDSRYAFATLHVHGMIYRERGWLTAGGKAIKNAPEILALLTAVWLPKRVAVMHCKGHQKDDAPTSTGNRRADEVAREVAIRPLSTQATISAGKRTADGSEFEKRTADGSEFESPKKKAKVE

SEQ ID NO: 1152 - protein, 2097 aa, synthetic construct
MPAAKRVKLDGGDKKYSIGLDIGTNSVGWAVITDEYKVPSKKFKVLGNTDRHSIKKNLIGALLFDSGETAEATRLKRTARRRYTRRKNRICYLQEIFSNEMAKVDDSFFHRLEESFLVEEDKKHERHPIFGNIVDEVAYHEKYPTIYHLRKKLVDSTDKADLRLIYLALAHMIKFRGHFLIEGDLNPDNSDVDKLFIQLVQTYNQLFEENPINASGVDAKAILSARLSKSRRLENLIAQLPGEKKNGLFGNLIALSLGLTPNFKSNFDLAEDAKLQLSKDTYDDDLDNLLAQIGDQYADLFLAAKNLSDAILLSDILRVNTEITKAPLSASMIKRYDEHHQDLTLLKALVRQQLPEKYKEIFFDQSKNGYAGYIDGGASQEEFYKFIKPILEKMDGTEELLVKLNREDLLRKQRTFDNGSIPHQIHLGELHAILRRQEDFYPFLKDNREKIEKILTFRIPYYVGPLARGNSRFAWMTRKSEETITPWNFEEVVDKGASAQSFIERMTNFDKNLPNEKVLPKHSLLYEYFTVYNELTKVKYVTEGMRKPAFLSGEQKKAIVDLLFKTNRKVTVKQLKEDYFKKIECFDSVEISGVEDRFNASLGTYHDLLKIIKDKDFLDNEENEDILEDIVLTLTLFEDREMIEERLKTYAHLFDDKVMKQLKRRRYTGWGRLSRKLINGIRDKQSGKTILDFLKSDGFANRNFMQLIHDDSLTFKEDIQKAQVSGQGDSLHEHIANLAGSPAIKKGILQTVKVVDELVKVMGRHKPENIVIEMARENQTTQKGQKNSRERMKRIEEGIKELGSQILKEHPVENTQLQNEKLYLYYLQNGRDMYVDQELDINRLSDYDVDHIVPQSFLKDDSIDNKVLTRSDKARGKSDNVPSEEVVKKMKNYWRQLLNAKLITQRKFDNLTKAERGGLSELDKAGFIKRQLVETRQITKHVAQILDSRMNTKYDENDKLIREVKVITLKSKLVSDFRKDFQFYKVREINNYHHAHDAYLNAVVGTALIKKYPKLESEFVYGDYKVYDVRKMIAKSEQEIGKATAKYFFYSNIMNFFKTEITLANGEIRKRPLIETNGETGEIVWDKGRDFATVRKVLSMPQVNIVKKTEVQTGGFSKESILPKRNSDKLIARKKDWDPKKYGGFDSPTVAYSVLVVAKVEKGKSKKLKSVKELLGITIMERSSFEKNPIDFLEAKGYKEVKKDLIIKLPKYSLFELENGRKRMLASAGELQKGNELALPSKYVNFLYLASHYEKLKGSPEDNEQKQLFVEQHKHYLDEIIEQISEFSKRVILADANLDKVLSAYNKHRDKPIREQAENIIHLFTLTNLGAPAAFKYFDTTIDRKRYTSTKEVLDATLIHQSITGLYETRIDLSQLGGDGGEAAAKEAAAKGGTAPLEEEYRLFLEAPIQNVTLLEQWKREIPKVWAEINPPGLASTQAPIHVQLLSTALPVRVRQYPITLEAKRSLRETIRKFRAAGILRPVHSPWNTPLLPVRKSGTSEYRMVQDLREVNKRVETIHPTVPNPYTLLSLLPPDRIWYSVLDLKDAFFCIPLAPESQLIFAFEWADAEEGESGQLTWTRLPQGFKNSPTLFNEALNRDLQGFRLDHPSVSLLQYVDDLLIAADTQAACLSATRDLLMTLAELGYRVSGKKAQLCQEEVTYLGFKIHKGSRSLSNSRTQAILQIPVPKTKRQVREFLGTIGYCRLWIPGFAELAQPLYAATRPGNDPLVWGEKEEEAFQSLKLALTQPPALALPSLDKPFQLFVEETSGAAKGVLTQALGPWKRPVAYLSKRLDPVAAGWPRCLRAIAAAALLTREASKLTFGQDIEITSSHNLESLLRSPPDKWLTNARITQYQVLLLDPPRVRFKQTAALNPATLLPETDDTLPIHHCLDTLDSLTSTRPDLTDQPLAQAEATLFTDGSSYIRDGKRYAGAAVVTLDSVIWAEPLPIGTSAQKAELIALTKALEWSKDKSVNIYTDSRYAFATLHVHGMIYRERGWLTAGGKAIKNAPEILALLTAVWLPKRVAVMHCKGHQKDDAPTSTGNRRADEVAREVAIRPLSTQATISAGKRTADGSEFEKRTADGSEFESPKKKAKVE

SEQ ID NO: 1153 - protein, 2096 aa, synthetic construct
MPAAKRVKLDGGDKKYSIGLDIGTNSVGWAVITDEYKVPSKKFKVLGNTDRHSIKKNLIGALLFDSGETAEATRLKRTARRRYTRRKNRICYLQEIFSNEMAKVDDSFFHRLEESFLVEEDKKHERHPIFGNIVDEVAYHEKYPTIYHLRKKLVDSTDKADLRLIYLALAHMIKFRGHFLIEGDLNPDNSDVDKLFIQLVQTYNQLFEENPINASGVDAKAILSARLSKSRRLENLIAQLPGEKKNGLFGNLIALSLGLTPNFKSNFDLAEDAKLQLSKDTYDDDLDNLLAQIGDQYADLFLAAKNLSDAILLSDILRVNTEITKAPLSASMIKRYDEHHQDLTLLKALVRQQLPEKYKEIFFDQSKNGYAGYIDGGASQEEFYKFIKPILEKMDGTEELLVKLNREDLLRKQRTFDNGSIPHQIHLGELHAILRRQEDFYPFLKDNREKIEKILTFRIPYYVGPLARGNSRFAWMTRKSEETITPWNFEEVVDKGASAQSFIERMTNFDKNLPNEKVLPKHSLLYEYFTVYNELTKVKYVTEGMRKPAFLSGEQKKAIVDLLFKTNRKVTVKQLKEDYFKKIECFDSVEISGVEDRFNASLGTYHDLLKIIKDKDFLDNEENEDILEDIVLTLTLFEDREMIEERLKTYAHLFDDKVMKQLKRRRYTGWGRLSRKLINGIRDKQSGKTILDFLKSDGFANRNFMQLIHDDSLTFKEDIQKAQVSGQGDSLHEHIANLAGSPAIKKGILQTVKVVDELVKVMGRHKPENIVIEMARENQTTQKGQKNSRERMKRIEEGIKELGSQILKEHPVENTQLQNEKLYLYYLQNGRDMYVDQELDINRLSDYDVDHIVPQSFLKDDSIDNKVLTRSDKARGKSDNVPSEEVVKKMKNYWRQLLNAKLITQRKFDNLTKAERGGLSELDKAGFIKRQLVETRQITKHVAQILDSRMNTKYDENDKLIREVKVITLKSKLVSDFRKDFQFYKVREINNYHHAHDAYLNAVVGTALIKKYPKLESEFVYGDYKVYDVRKMIAKSEQEIGKATAKYFFYSNIMNFFKTEITLANGEIRKRPLIETNGETGEIVWDKGRDFATVRKVLSMPQVNIVKKTEVQTGGFSKESILPKRNSDKLIARKKDWDPKKYGGFDSPTVAYSVLVVAKVEKGKSKKLKSVKELLGITIMERSSFEKNPIDFLEAKGYKEVKKDLIIKLPKYSLFELENGRKRMLASAGELQKGNELALPSKYVNFLYLASHYEKLKGSPEDNEQKQLFVEQHKHYLDEIIEQISEFSKRVILADANLDKVLSAYNKHRDKPIREQAENIIHLFTLTNLGAPAAFKYFDTTIDRKRYTSTKEVLDATLIHQSITGLYETRIDLSQLGGDGGGGSPAPGSSGGTAPLEEEYRLFLEAPIQNVTLLEQWKREIPKVWAEINPPGLASTQAPIHVQLLSTALPVRVRQYPITLEAKRSLRETIRKFRAAGILRPVHSPWNTPLLPVRKSGTSEYRMVQDLREVNKRVETIHPTVPNPYTLLSLLPPDRIWYSVLDLKDAFFCIPLAPESQLIFAFEWADAEEGESGQLTWTRLPQGFKNSPTLFNEALNRDLQGFRLDHPSVSLLQYVDDLLIAADTQAACLSATRDLLMTLAELGYRVSGKKAQLCQEEVTYLGFKIHKGSRSLSNSRTQAILQIPVPKTKRQVREFLGTIGYCRLWIPGFAELAQPLYAATRPGNDPLVWGEKEEEAFQSLKLALTQPPALALPSLDKPFQLFVEETSGAAKGVLTQALGPWKRPVAYLSKRLDPVAAGWPRCLRAIAAAALLTREASKLTFGQDIEITSSHNLESLLRSPPDKWLTNARITQYQVLLLDPPRVRFKQTAALNPATLLPETDDTLPIHHCLDTLDSLTSTRPDLTDQPLAQAEATLFTDGSSYIRDGKRYAGAAVVTLDSVIWAEPLPIGTSAQKAELIALTKALEWSKDKSVNIYTDSRYAFATLHVHGMIYRERGWLTAGGKAIKNAPEILALLTAVWLPKRVAVMHCKGHQKDDAPTSTGNRRADEVAREVAIRPLSTQATISAGKRTADGSEFEKRTADGSEFESPKKKAKVE

SEQ ID NO: 1154 - protein, 2098 aa, synthetic construct
MPAAKRVKLDGGDKKYSIGLDIGTNSVGWAVITDEYKVPSKKFKVLGNTDRHSIKKNLIGALLFDSGETAEATRLKRTARRRYTRRKNRICYLQEIFSNEMAKVDDSFFHRLEESFLVEEDKKHERHPIFGNIVDEVAYHEKYPTIYHLRKKLVDSTDKADLRLIYLALAHMIKFRGHFLIEGDLNPDNSDVDKLFIQLVQTYNQLFEENPINASGVDAKAILSARLSKSRRLENLIAQLPGEKKNGLFGNLIALSLGLTPNFKSNFDLAEDAKLQLSKDTYDDDLDNLLAQIGDQYADLFLAAKNLSDAILLSDILRVNTEITKAPLSASMIKRYDEHHQDLTLLKALVRQQLPEKYKEIFFDQSKNGYAGYIDGGASQEEFYKFIKPILEKMDGTEELLVKLNREDLLRKQRTFDNGSIPHQIHLGELHAILRRQEDFYPFLKDNREKIEKILTFRIPYYVGPLARGNSRFAWMTRKSEETITPWNFEEVVDKGASAQSFIERMTNFDKNLPNEKVLPKHSLLYEYFTVYNELTKVKYVTEGMRKPAFLSGEQKKAIVDLLFKTNRKVTVKQLKEDYFKKIECFDSVEISGVEDRFNASLGTYHDLLKIIKDKDFLDNEENEDILEDIVLTLTLFEDREMIEERLKTYAHLFDDKVMKQLKRRRYTGWGRLSRKLINGIRDKQSGKTILDFLKSDGFANRNFMQLIHDDSLTFKEDIQKAQVSGQGDSLHEHIANLAGSPAIKKGILQTVKVVDELVKVMGRHKPENIVIEMARENQTTQKGQKNSRERMKRIEEGIKELGSQILKEHPVENTQLQNEKLYLYYLQNGRDMYVDQELDINRLSDYDVDHIVPQSFLKDDSIDNKVLTRSDKARGKSDNVPSEEVVKKMKNYWRQLLNAKLITQRKFDNLTKAERGGLSELDKAGFIKRQLVETRQITKHVAQILDSRMNTKYDENDKLIREVKVITLKSKLVSDFRKDFQFYKVREINNYHHAHDAYLNAVVGTALIKKYPKLESEFVYGDYKVYDVRKMIAKSEQEIGKATAKYFFYSNIMNFFKTEITLANGEIRKRPLIETNGETGEIVWDKGRDFATVRKVLSMPQVNIVKKTEVQTGGFSKESILPKRNSDKLIARKKDWDPKKYGGFDSPTVAYSVLVVAKVEKGKSKKLKSVKELLGITIMERSSFEKNPIDFLEAKGYKEVKKDLIIKLPKYSLFELENGRKRMLASAGELQKGNELALPSKYVNFLYLASHYEKLKGSPEDNEQKQLFVEQHKHYLDEIIEQISEFSKRVILADANLDKVLSAYNKHRDKPIREQAENIIHLFTLTNLGAPAAFKYFDTTIDRKRYTSTKEVLDATLIHQSITGLYETRIDLSQLGGDGGGGGEAAAKGGSGGTAPLEEEYRLFLEAPIQNVTLLEQWKREIPKVWAEINPPGLASTQAPIHVQLLSTALPVRVRQYPITLEAKRSLRETIRKFRAAGILRPVHSPWNTPLLPVRKSGTSEYRMVQDLREVNKRVETIHPTVPNPYTLLSLLPPDRIWYSVLDLKDAFFCIPLAPESQLIFAFEWADAEEGESGQLTWTRLPQGFKNSPTLFNEALNRDLQGFRLDHPSVSLLQYVDDLLIAADTQAACLSATRDLLMTLAELGYRVSGKKAQLCQEEVTYLGFKIHKGSRSLSNSRTQAILQIPVPKTKRQVREFLGTIGYCRLWIPGFAELAQPLYAATRPGNDPLVWGEKEEEAFQSLKLALTQPPALALPSLDKPFQLFVEETSGAAKGVLTQALGPWKRPVAYLSKRLDPVAAGWPRCLRAIAAAALLTREASKLTFGQDIEITSSHNLESLLRSPPDKWLTNARITQYQVLLLDPPRVRFKQTAALNPATLLPETDDTLPIHHCLDTLDSLTSTRPDLTDQPLAQAEATLFTDGSSYIRDGKRYAGAAVVTLDSVIWAEPLPIGTSAQKAELIALTKALEWSKDKSVNIYTDSRYAFATLHVHGMIYRERGWLTAGGKAIKNAPEILALLTAVWLPKRVAVMHCKGHQKDDAPTSTGNRRADEVAREVAIRPLSTQATISAGKRTADGSEFEKRTADGSEFESPKKKAKVE

SEQ ID NO: 1155 - protein, 2098 aa, synthetic construct
MPAAKRVKLDGGDKKYSIGLDIGTNSVGWAVITDEYKVPSKKFKVLGNTDRHSIKKNLIGALLFDSGETAEATRLKRTARRRYTRRKNRICYLQEIFSNEMAKVDDSFFHRLEESFLVEEDKKHERHPIFGNIVDEVAYHEKYPTIYHLRKKLVDSTDKADLRLIYLALAHMIKFRGHFLIEGDLNPDNSDVDKLFIQLVQTYNQLFEENPINASGVDAKAILSARLSKSRRLENLIAQLPGEKKNGLFGNLIALSLGLTPNFKSNFDLAEDAKLQLSKDTYDDDLDNLLAQIGDQYADLFLAAKNLSDAILLSDILRVNTEITKAPLSASMIKRYDEHHQDLTLLKALVRQQLPEKYKEIFFDQSKNGYAGYIDGGASQEEFYKFIKPILEKMDGTEELLVKLNREDLLRKQRTFDNGSIPHQIHLGELHAILRRQEDFYPFLKDNREKIEKILTFRIPYYVGPLARGNSRFAWMTRKSEETITPWNFEEVVDKGASAQSFIERMTNFDKNLPNEKVLPKHSLLYEYFTVYNELTKVKYVTEGMRKPAFLSGEQKKAIVDLLFKTNRKVTVKQLKEDYFKKIECFDSVEISGVEDRFNASLGTYHDLLKIIKDKDFLDNEENEDILEDIVLTLTLFEDREMIEERLKTYAHLFDDKVMKQLKRRRYTGWGRLSRKLINGIRDKQSGKTILDFLKSDGFANRNFMQLIHDDSLTFKEDIQKAQVSGQGDSLHEHIANLAGSPAIKKGILQTVKVVDELVKVMGRHKPENIVIEMARENQTTQKGQKNSRERMKRIEEGIKELGSQILKEHPVENTQLQNEKLYLYYLQNGRDMYVDQELDINRLSDYDVDHIVPQSFLKDDSIDNKVLTRSDKARGKSDNVPSEEVVKKMKNYWRQLLNAKLITQRKFDNLTKAERGGLSELDKAGFIKRQLVETRQITKHVAQILDSRMNTKYDENDKLIREVKVITLKSKLVSDFRKDFQFYKVREINNYHHAHDAYLNAVVGTALIKKYPKLESEFVYGDYKVYDVRKMIAKSEQEIGKATAKYFFYSNIMNFFKTEITLANGEIRKRPLIETNGETGEIVWDKGRDFATVRKVLSMPQVNIVKKTEVQTGGFSKESILPKRNSDKLIARKKDWDPKKYGGFDSPTVAYSVLVVAKVEKGKSKKLKSVKELLGITIMERSSFEKNPIDFLEAKGYKEVKKDLIIKLPKYSLFELENGRKRMLASAGELQKGNELALPSKYVNFLYLASHYEKLKGSPEDNEQKQLFVEQHKHYLDEIIEQISEFSKRVILADANLDKVLSAYNKHRDKPIREQAENIIHLFTLTNLGAPAAFKYFDTTIDRKRYTSTKEVLDATLIHQSITGLYETRIDLSQLGGDGGGGGEAAAKPAPGGTAPLEEEYRLFLEAPIQNVTLLEQWKREIPKVWAEINPPGLASTQAPIHVQLLSTALPVRVRQYPITLEAKRSLRETIRKFRAAGILRPVHSPWNTPLLPVRKSGTSEYRMVQDLREVNKRVETIHPTVPNPYTLLSLLPPDRIWYSVLDLKDAFFCIPLAPESQLIFAFEWADAEEGESGQLTWTRLPQGFKNSPTLFNEALNRDLQGFRLDHPSVSLLQYVDDLLIAADTQAACLSATRDLLMTLAELGYRVSGKKAQLCQEEVTYLGFKIHKGSRSLSNSRTQAILQIPVPKTKRQVREFLGTIGYCRLWIPGFAELAQPLYAATRPGNDPLVWGEKEEEAFQSLKLALTQPPALALPSLDKPFQLFVEETSGAAKGVLTQALGPWKRPVAYLSKRLDPVAAGWPRCLRAIAAAALLTREASKLTFGQDIEITSSHNLESLLRSPPDKWLTNARITQYQVLLLDPPRVRFKQTAALNPATLLPETDDTLPIHHCLDTLDSLTSTRPDLTDQPLAQAEATLFTDGSSYIRDGKRYAGAAVVTLDSVIWAEPLPIGTSAQKAELIALTKALEWSKDKSVNIYTDSRYAFATLHVHGMIYRERGWLTAGGKAIKNAPEILALLTAVWLPKRVAVMHCKGHQKDDAPTSTGNRRADEVAREVAIRPLSTQATISAGKRTADGSEFEKRTADGSEFESPKKKAKVE

SEQ ID NO: 1156 - protein, 2098 aa, synthetic construct
MPAAKRVKLDGGDKKYSIGLDIGTNSVGWAVITDEYKVPSKKFKVLGNTDRHSIKKNLIGALLFDSGETAEATRLKRTARRRYTRRKNRICYLQEIFSNEMAKVDDSFFHRLEESFLVEEDKKHERHPIFGNIVDEVAYHEKYPTIYHLRKKLVDSTDKADLRLIYLALAHMIKFRGHFLIEGDLNPDNSDVDKLFIQLVQTYNQLFEENPINASGVDAKAILSARLSKSRRLENLIAQLPGEKKNGLFGNLIALSLGLTPNFKSNFDLAEDAKLQLSKDTYDDDLDNLLAQIGDQYADLFLAAKNLSDAILLSDILRVNTEITKAPLSASMIKRYDEHHQDLTLLKALVRQQLPEKYKEIFFDQSKNGYAGYIDGGASQEEFYKFIKPILEKMDGTEELLVKLNREDLLRKQRTFDNGSIPHQIHLGELHAILRRQEDFYPFLKDNREKIEKILTFRIPYYVGPLARGNSRFAWMTRKSEETITPWNFEEVVDKGASAQSFIERMTNFDKNLPNEKVLPKHSLLYEYFTVYNELTKVKYVTEGMRKPAFLSGEQKKAIVDLLFKTNRKVTVKQLKEDYFKKIECFDSVEISGVEDRFNASLGTYHDLLKIIKDKDFLDNEENEDILEDIVLTLTLFEDREMIEERLKTYAHLFDDKVMKQLKRRRYTGWGRLSRKLINGIRDKQSGKTILDFLKSDGFANRNFMQLIHDDSLTFKEDIQKAQVSGQGDSLHEHIANLAGSPAIKKGILQTVKVVDELVKVMGRHKPENIVIEMARENQTTQKGQKNSRERMKRIEEGIKELGSQILKEHPVENTQLQNEKLYLYYLQNGRDMYVDQELDINRLSDYDVDHIVPQSFLKDDSIDNKVLTRSDKARGKSDNVPSEEVVKKMKNYWRQLLNAKLITQRKFDNLTKAERGGLSELDKAGFIKRQLVETRQITKHVAQILDSRMNTKYDENDKLIREVKVITLKSKLVSDFRKDFQFYKVREINNYHHAHDAYLNAVVGTALIKKYPKLESEFVYGDYKVYDVRKMIAKSEQEIGKATAKYFFYSNIMNFFKTEITLANGEIRKRPLIETNGETGEIVWDKGRDFATVRKVLSMPQVNIVKKTEVQTGGFSKESILPKRNSDKLIARKKDWDPKKYGGFDSPTVAYSVLVVAKVEKGKSKKLKSVKELLGITIMERSSFEKNPIDFLEAKGYKEVKKDLIIKLPKYSLFELENGRKRMLASAGELQKGNELALPSKYVNFLYLASHYEKLKGSPEDNEQKQLFVEQHKHYLDEIIEQISEFSKRVILADANLDKVLSAYNKHRDKPIREQAENIIHLFTLTNLGAPAAFKYFDTTIDRKRYTSTKEVLDATLIHQSITGLYETRIDLSQLGGDGGEAAAKPAPGGSGGTAPLEEEYRLFLEAPIQNVTLLEQWKREIPKVWAEINPPGLASTQAPIHVQLLSTALPVRVRQYPITLEAKRSLRETIRKFRAAGILRPVHSPWNTPLLPVRKSGTSEYRMVQDLREVNKRVETIHPTVPNPYTLLSLLPPDRIWYSVLDLKDAFFCIPLAPESQLIFAFEWADAEEGESGQLTWTRLPQGFKNSPTLFNEALNRDLQGFRLDHPSVSLLQYVDDLLIAADTQAACLSATRDLLMTLAELGYRVSGKKAQLCQEEVTYLGFKIHKGSRSLSNSRTQAILQIPVPKTKRQVREFLGTIGYCRLWIPGFAELAQPLYAATRPGNDPLVWGEKEEEAFQSLKLALTQPPALALPSLDKPFQLFVEETSGAAKGVLTQALGPWKRPVAYLSKRLDPVAAGWPRCLRAIAAAALLTREASKLTFGQDIEITSSHNLESLLRSPPDKWLTNARITQYQVLLLDPPRVRFKQTAALNPATLLPETDDTLPIHHCLDTLDSLTSTRPDLTDQPLAQAEATLFTDGSSYIRDGKRYAGAAVVTLDSVIWAEPLPIGTSAQKAELIALTKALEWSKDKSVNIYTDSRYAFATLHVHGMIYRERGWLTAGGKAIKNAPEILALLTAVWLPKRVAVMHCKGHQKDDAPTSTGNRRADEVAREVAIRPLSTQATISAGKRTADGSEFEKRTADGSEFESPKKKAKVE

SEQ ID NO: 1157 - protein, 2098 aa, synthetic construct
MPAAKRVKLDGGDKKYSIGLDIGTNSVGWAVITDEYKVPSKKFKVLGNTDRHSIKKNLIGALLFDSGETAEATRLKRTARRRYTRRKNRICYLQEIFSNEMAKVDDSFFHRLEESFLVEEDKKHERHPIFGNIVDEVAYHEKYPTIYHLRKKLVDSTDKADLRLIYLALAHMIKFRGHFLIEGDLNPDNSDVDKLFIQLVQTYNQLFEENPINASGVDAKAILSARLSKSRRLENLIAQLPGEKKNGLFGNLIALSLGLTPNFKSNFDLAEDAKLQLSKDTYDDDLDNLLAQIGDQYADLFLAAKNLSDAILLSDILRVNTEITKAPLSASMIKRYDEHHQDLTLLKALVRQQLPEKYKEIFFDQSKNGYAGYIDGGASQEEFYKFIKPILEKMDGTEELLVKLNREDLLRKQRTFDNGSIPHQIHLGELHAILRRQEDFYPFLKDNREKIEKILTFRIPYYVGPLARGNSRFAWMTRKSEETITPWNFEEVVDKGASAQSFIERMTNFDKNLPNEKVLPKHSLLYEYFTVYNELTKVKYVTEGMRKPAFLSGEQKKAIVDLLFKTNRKVTVKQLKEDYFKKIECFDSVEISGVEDRFNASLGTYHDLLKIIKDKDFLDNEENEDILEDIVLTLTLFEDREMIEERLKTYAHLFDDKVMKQLKRRRYTGWGRLSRKLINGIRDKQSGKTILDFLKSDGFANRNFMQLIHDDSLTFKEDIQKAQVSGQGDSLHEHIANLAGSPAIKKGILQTVKVVDELVKVMGRHKPENIVIEMARENQTTQKGQKNSRERMKRIEEGIKELGSQILKEHPVENTQLQNEKLYLYYLQNGRDMYVDQELDINRLSDYDVDHIVPQSFLKDDSIDNKVLTRSDKARGKSDNVPSEEVVKKMKNYWRQLLNAKLITQRKFDNLTKAERGGLSELDKAGFIKRQLVETRQITKHVAQILDSRMNTKYDENDKLIREVKVITLKSKLVSDFRKDFQFYKVREINNYHHAHDAYLNAVVGTALIKKYPKLESEFVYGDYKVYDVRKMIAKSEQEIGKATAKYFFYSNIMNFFKTEITLANGEIRKRPLIETNGETGEIVWDKGRDFATVRKVLSMPQVNIVKKTEVQTGGFSKESILPKRNSDKLIARKKDWDPKKYGGFDSPTVAYSVLVVAKVEKGKSKKLKSVKELLGITIMERSSFEKNPIDFLEAKGYKEVKKDLIIKLPKYSLFELENGRKRMLASAGELQKGNELALPSKYVNFLYLASHYEKLKGSPEDNEQKQLFVEQHKHYLDEIIEQISEFSKRVILADANLDKVLSAYNKHRDKPIREQAENIIHLFTLTNLGAPAAFKYFDTTIDRKRYTSTKEVLDATLIHQSITGLYETRIDLSQLGGDGGEAAAKGGGGGSGGTAPLEEEYRLFLEAPIQNVTLLEQWKREIPKVWAEINPPGLASTQAPIHVQLLSTALPVRVRQYPITLEAKRSLRETIRKFRAAGILRPVHSPWNTPLLPVRKSGTSEYRMVQDLREVNKRVETIHPTVPNPYTLLSLLPPDRIWYSVLDLKDAFFCIPLAPESQLIFAFEWADAEEGESGQLTWTRLPQGFKNSPTLFNEALNRDLQGFRLDHPSVSLLQYVDDLLIAADTQAACLSATRDLLMTLAELGYRVSGKKAQLCQEEVTYLGFKIHKGSRSLSNSRTQAILQIPVPKTKRQVREFLGTIGYCRLWIPGFAELAQPLYAATRPGNDPLVWGEKEEEAFQSLKLALTQPPALALPSLDKPFQLFVEETSGAAKGVLTQALGPWKRPVAYLSKRLDPVAAGWPRCLRAIAAAALLTREASKLTFGQDIEITSSHNLESLLRSPPDKWLTNARITQYQVLLLDPPRVRFKQTAALNPATLLPETDDTLPIHHCLDTLDSLTSTRPDLTDQPLAQAEATLFTDGSSYIRDGKRYAGAAVVTLDSVIWAEPLPIGTSAQKAELIALTKALEWSKDKSVNIYTDSRYAFATLHVHGMIYRERGWLTAGGKAIKNAPEILALLTAVWLPKRVAVMHCKGHQKDDAPTSTGNRRADEVAREVAIRPLSTQATISAGKRTADGSEFEKRTADGSEFESPKKKAKVE

SEQ ID NO: 1158 - protein, 2102 aa, synthetic construct
MPAAKRVKLDGGDKKYSIGLDIGTNSVGWAVITDEYKVPSKKFKVLGNTDRHSIKKNLIGALLFDSGETAEATRLKRTARRRYTRRKNRICYLQEIFSNEMAKVDDSFFHRLEESFLVEEDKKHERHPIFGNIVDEVAYHEKYPTIYHLRKKLVDSTDKADLRLIYLALAHMIKFRGHFLIEGDLNPDNSDVDKLFIQLVQTYNQLFEENPINASGVDAKAILSARLSKSRRLENLIAQLPGEKKNGLFGNLIALSLGLTPNFKSNFDLAEDAKLQLSKDTYDDDLDNLLAQIGDQYADLFLAAKNLSDAILLSDILRVNTEITKAPLSASMIKRYDEHHQDLTLLKALVRQQLPEKYKEIFFDQSKNGYAGYIDGGASQEEFYKFIKPILEKMDGTEELLVKLNREDLLRKQRTFDNGSIPHQIHLGELHAILRRQEDFYPFLKDNREKIEKILTFRIPYYVGPLARGNSRFAWMTRKSEETITPWNFEEVVDKGASAQSFIERMTNFDKNLPNEKVLPKHSLLYEYFTVYNELTKVKYVTEGMRKPAFLSGEQKKAIVDLLFKTNRKVTVKQLKEDYFKKIECFDSVEISGVEDRFNASLGTYHDLLKIIKDKDFLDNEENEDILEDIVLTLTLFEDREMIEERLKTYAHLFDDKVMKQLKRRRYTGWGRLSRKLINGIRDKQSGKTILDFLKSDGFANRNFMQLIHDDSLTFKEDIQKAQVSGQGDSLHEHIANLAGSPAIKKGILQTVKVVDELVKVMGRHKPENIVIEMARENQTTQKGQKNSRERMKRIEEGIKELGSQILKEHPVENTQLQNEKLYLYYLQNGRDMYVDQELDINRLSDYDVDHIVPQSFLKDDSIDNKVLTRSDKARGKSDNVPSEEVVKKMKNYWRQLLNAKLITQRKFDNLTKAERGGLSELDKAGFIKRQLVETRQITKHVAQILDSRMNTKYDENDKLIREVKVITLKSKLVSDFRKDFQFYKVREINNYHHAHDAYLNAVVGTALIKKYPKLESEFVYGDYKVYDVRKMIAKSEQEIGKATAKYFFYSNIMNFFKTEITLANGEIRKRPLIETNGETGEIVWDKGRDFATVRKVLSMPQVNIVKKTEVQTGGFSKESILPKRNSDKLIARKKDWDPKKYGGFDSPTVAYSVLVVAKVEKGKSKKLKSVKELLGITIMERSSFEKNPIDFLEAKGYKEVKKDLIIKLPKYSLFELENGRKRMLASAGELQKGNELALPSKYVNFLYLASHYEKLKGSPEDNEQKQLFVEQHKHYLDEIIEQISEFSKRVILADANLDKVLSAYNKHRDKPIREQAENIIHLFTLTNLGAPAAFKYFDTTIDRKRYTSTKEVLDATLIHQSITGLYETRIDLSQLGGDGGGGGGSEAAAKGGGGSGGTAPLEEEYRLFLEAPIQNVTLLEQWKREIPKVWAEINPPGLASTQAPIHVQLLSTALPVRVRQYPITLEAKRSLRETIRKFRAAGILRPVHSPWNTPLLPVRKSGTSEYRMVQDLREVNKRVETIHPTVPNPYTLLSLLPPDRIWYSVLDLKDAFFCIPLAPESQLIFAFEWADAEEGESGQLTWTRLPQGFKNSPTLFNEALNRDLQGFRLDHPSVSLLQYVDDLLIAADTQAACLSATRDLLMTLAELGYRVSGKKAQLCQEEVTYLGFKIHKGSRSLSNSRTQAILQIPVPKTKRQVREFLGTIGYCRLWIPGFAELAQPLYAATRPGNDPLVWGEKEEEAFQSLKLALTQPPALALPSLDKPFQLFVEETSGAAKGVLTQALGPWKRPVAYLSKRLDPVAAGWPRCLRAIAAAALLTREASKLTFGQDIEITSSHNLESLLRSPPDKWLTNARITQYQVLLLDPPRVRFKQTAALNPATLLPETDDTLPIHHCLDTLDSLTSTRPDLTDQPLAQAEATLFTDGSSYIRDGKRYAGAAVVTLDSVIWAEPLPIGTSAQKAELIALTKALEWSKDKSVNIYTDSRYAFATLHVHGMIYRERGWLTAGGKAIKNAPEILALLTAVWLPKRVAVMHCKGHQKDDAPTSTGNRRADEVAREVAIRPLSTQATISAGKRTADGSEFEKRTADGSEFESPKKKAKVE

SEQ ID NO: 1159 - protein, 2096 aa, synthetic construct
MPAAKRVKLDGGDKKYSIGLDIGTNSVGWAVITDEYKVPSKKFKVLGNTDRHSIKKNLIGALLFDSGETAEATRLKRTARRRYTRRKNRICYLQEIFSNEMAKVDDSFFHRLEESFLVEEDKKHERHPIFGNIVDEVAYHEKYPTIYHLRKKLVDSTDKADLRLIYLALAHMIKFRGHFLIEGDLNPDNSDVDKLFIQLVQTYNQLFEENPINASGVDAKAILSARLSKSRRLENLIAQLPGEKKNGLFGNLIALSLGLTPNFKSNFDLAEDAKLQLSKDTYDDDLDNLLAQIGDQYADLFLAAKNLSDAILLSDILRVNTEITKAPLSASMIKRYDEHHQDLTLLKALVRQQLPEKYKEIFFDQSKNGYAGYIDGGASQEEFYKFIKPILEKMDGTEELLVKLNREDLLRKQRTFDNGSIPHQIHLGELHAILRRQEDFYPFLKDNREKIEKILTFRIPYYVGPLARGNSRFAWMTRKSEETITPWNFEEVVDKGASAQSFIERMTNFDKNLPNEKVLPKHSLLYEYFTVYNELTKVKYVTEGMRKPAFLSGEQKKAIVDLLFKTNRKVTVKQLKEDYFKKIECFDSVEISGVEDRFNASLGTYHDLLKIIKDKDFLDNEENEDILEDIVLTLTLFEDREMIEERLKTYAHLFDDKVMKQLKRRRYTGWGRLSRKLINGIRDKQSGKTILDFLKSDGFANRNFMQLIHDDSLTFKEDIQKAQVSGQGDSLHEHIANLAGSPAIKKGILQTVKVVDELVKVMGRHKPENIVIEMARENQTTQKGQKNSRERMKRIEEGIKELGSQILKEHPVENTQLQNEKLYLYYLQNGRDMYVDQELDINRLSDYDVDHIVPQSFLKDDSIDNKVLTRSDKARGKSDNVPSEEVVKKMKNYWRQLLNAKLITQRKFDNLTKAERGGLSELDKAGFIKRQLVETRQITKHVAQILDSRMNTKYDENDKLIREVKVITLKSKLVSDFRKDFQFYKVREINNYHHAHDAYLNAVVGTALIKKYPKLESEFVYGDYKVYDVRKMIAKSEQEIGKATAKYFFYSNIMNFFKTEITLANGEIRKRPLIETNGETGEIVWDKGRDFATVRKVLSMPQVNIVKKTEVQTGGFSKESILPKRNSDKLIARKKDWDPKKYGGFDSPTVAYSVLVVAKVEKGKSKKLKSVKELLGITIMERSSFEKNPIDFLEAKGYKEVKKDLIIKLPKYSLFELENGRKRMLASAGELQKGNELALPSKYVNFLYLASHYEKLKGSPEDNEQKQLFVEQHKHYLDEIIEQISEFSKRVILADANLDKVLSAYNKHRDKPIREQAENIIHLFTLTNLGAPAAFKYFDTTIDRKRYTSTKEVLDATLIHQSITGLYETRIDLSQLGGDGGPAPGGGGGSGGTAPLEEEYRLFLEAPIQNVTLLEQWKREIPKVWAEINPPGLASTQAPIHVQLLSTALPVRVRQYPITLEAKRSLRETIRKFRAAGILRPVHSPWNTPLLPVRKSGTSEYRMVQDLREVNKRVETIHPTVPNPYTLLSLLPPDRIWYSVLDLKDAFFCIPLAPESQLIFAFEWADAEEGESGQLTWTRLPQGFKNSPTLFNEALNRDLQGFRLDHPSVSLLQYVDDLLIAADTQAACLSATRDLLMTLAELGYRVSGKKAQLCQEEVTYLGFKIHKGSRSLSNSRTQAILQIPVPKTKRQVREFLGTIGYCRLWIPGFAELAQPLYAATRPGNDPLVWGEKEEEAFQSLKLALTQPPALALPSLDKPFQLFVEETSGAAKGVLTQALGPWKRPVAYLSKRLDPVAAGWPRCLRAIAAAALLTREASKLTFGQDIEITSSHNLESLLRSPPDKWLTNARITQYQVLLLDPPRVRFKQTAALNPATLLPETDDTLPIHHCLDTLDSLTSTRPDLTDQPLAQAEATLFTDGSSYIRDGKRYAGAAVVTLDSVIWAEPLPIGTSAQKAELIALTKALEWSKDKSVNIYTDSRYAFATLHVHGMIYRERGWLTAGGKAIKNAPEILALLTAVWLPKRVAVMHCKGHQKDDAPTSTGNRRADEVAREVAIRPLSTQATISAGKRTADGSEFEKRTADGSEFESPKKKAKVE

SEQ ID NO: 1160 - protein, 2098 aa, synthetic construct
MPAAKRVKLDGGDKKYSIGLDIGTNSVGWAVITDEYKVPSKKFKVLGNTDRHSIKKNLIGALLFDSGETAEATRLKRTARRRYTRRKNRICYLQEIFSNEMAKVDDSFFHRLEESFLVEEDKKHERHPIFGNIVDEVAYHEKYPTIYHLRKKLVDSTDKADLRLIYLALAHMIKFRGHFLIEGDLNPDNSDVDKLFIQLVQTYNQLFEENPINASGVDAKAILSARLSKSRRLENLIAQLPGEKKNGLFGNLIALSLGLTPNFKSNFDLAEDAKLQLSKDTYDDDLDNLLAQIGDQYADLFLAAKNLSDAILLSDILRVNTEITKAPLSASMIKRYDEHHQDLTLLKALVRQQLPEKYKEIFFDQSKNGYAGYIDGGASQEEFYKFIKPILEKMDGTEELLVKLNREDLLRKQRTFDNGSIPHQIHLGELHAILRRQEDFYPFLKDNREKIEKILTFRIPYYVGPLARGNSRFAWMTRKSEETITPWNFEEVVDKGASAQSFIERMTNFDKNLPNEKVLPKHSLLYEYFTVYNELTKVKYVTEGMRKPAFLSGEQKKAIVDLLFKTNRKVTVKQLKEDYFKKIECFDSVEISGVEDRFNASLGTYHDLLKIIKDKDFLDNEENEDILEDIVLTLTLFEDREMIEERLKTYAHLFDDKVMKQLKRRRYTGWGRLSRKLINGIRDKQSGKTILDFLKSDGFANRNFMQLIHDDSLTFKEDIQKAQVSGQGDSLHEHIANLAGSPAIKKGILQTVKVVDELVKVMGRHKPENIVIEMARENQTTQKGQKNSRERMKRIEEGIKELGSQILKEHPVENTQLQNEKLYLYYLQNGRDMYVDQELDINRLSDYDVDHIVPQSFLKDDSIDNKVLTRSDKARGKSDNVPSEEVVKKMKNYWRQLLNAKLITQRKFDNLTKAERGGLSELDKAGFIKRQLVETRQITKHVAQILDSRMNTKYDENDKLIREVKVITLKSKLVSDFRKDFQFYKVREINNYHHAHDAYLNAVVGTALIKKYPKLESEFVYGDYKVYDVRKMIAKSEQEIGKATAKYFFYSNIMNFFKTEITLANGEIRKRPLIETNGETGEIVWDKGRDFATVRKVLSMPQVNIVKKTEVQTGGFSKESILPKRNSDKLIARKKDWDPKKYGGFDSPTVAYSVLVVAKVEKGKSKKLKSVKELLGITIMERSSFEKNPIDFLEAKGYKEVKKDLIIKLPKYSLFELENGRKRMLASAGELQKGNELALPSKYVNFLYLASHYEKLKGSPEDNEQKQLFVEQHKHYLDEIIEQISEFSKRVILADANLDKVLSAYNKHRDKPIREQAENIIHLFTLTNLGAPAAFKYFDTTIDRKRYTSTKEVLDATLIHQSITGLYETRIDLSQLGGDGGGGSPAPEAAAKGGTAPLEEEYRLFLEAPIQNVTLLEQWKREIPKVWAEINPPGLASTQAPIHVQLLSTALPVRVRQYPITLEAKRSLRETIRKFRAAGILRPVHSPWNTPLLPVRKSGTSEYRMVQDLREVNKRVETIHPTVPNPYTLLSLLPPDRIWYSVLDLKDAFFCIPLAPESQLIFAFEWADAEEGESGQLTWTRLPQGFKNSPTLFNEALNRDLQGFRLDHPSVSLLQYVDDLLIAADTQAACLSATRDLLMTLAELGYRVSGKKAQLCQEEVTYLGFKIHKGSRSLSNSRTQAILQIPVPKTKRQVREFLGTIGYCRLWIPGFAELAQPLYAATRPGNDPLVWGEKEEEAFQSLKLALTQPPALALPSLDKPFQLFVEETSGAAKGVLTQALGPWKRPVAYLSKRLDPVAAGWPRCLRAIAAAALLTREASKLTFGQDIEITSSHNLESLLRSPPDKWLTNARITQYQVLLLDPPRVRFKQTAALNPATLLPETDDTLPIHHCLDTLDSLTSTRPDLTDQPLAQAEATLFTDGSSYIRDGKRYAGAAVVTLDSVIWAEPLPIGTSAQKAELIALTKALEWSKDKSVNIYTDSRYAFATLHVHGMIYRERGWLTAGGKAIKNAPEILALLTAVWLPKRVAVMHCKGHQKDDAPTSTGNRRADEVAREVAIRPLSTQATISAGKRTADGSEFEKRTADGSEFESPKKKAKVE

SEQ ID NO: 1161 - protein, 2098 aa, synthetic construct
MPAAKRVKLDGGDKKYSIGLDIGTNSVGWAVITDEYKVPSKKFKVLGNTDRHSIKKNLIGALLFDSGETAEATRLKRTARRRYTRRKNRICYLQEIFSNEMAKVDDSFFHRLEESFLVEEDKKHERHPIFGNIVDEVAYHEKYPTIYHLRKKLVDSTDKADLRLIYLALAHMIKFRGHFLIEGDLNPDNSDVDKLFIQLVQTYNQLFEENPINASGVDAKAILSARLSKSRRLENLIAQLPGEKKNGLFGNLIALSLGLTPNFKSNFDLAEDAKLQLSKDTYDDDLDNLLAQIGDQYADLFLAAKNLSDAILLSDILRVNTEITKAPLSASMIKRYDEHHQDLTLLKALVRQQLPEKYKEIFFDQSKNGYAGYIDGGASQEEFYKFIKPILEKMDGTEELLVKLNREDLLRKQRTFDNGSIPHQIHLGELHAILRRQEDFYPFLKDNREKIEKILTFRIPYYVGPLARGNSRFAWMTRKSEETITPWNFEEVVDKGASAQSFIERMTNFDKNLPNEKVLPKHSLLYEYFTVYNELTKVKYVTEGMRKPAFLSGEQKKAIVDLLFKTNRKVTVKQLKEDYFKKIECFDSVEISGVEDRFNASLGTYHDLLKIIKDKDFLDNEENEDILEDIVLTLTLFEDREMIEERLKTYAHLFDDKVMKQLKRRRYTGWGRLSRKLINGIRDKQSGKTILDFLKSDGFANRNFMQLIHDDSLTFKEDIQKAQVSGQGDSLHEHIANLAGSPAIKKGILQTVKVVDELVKVMGRHKPENIVIEMARENQTTQKGQKNSRERMKRIEEGIKELGSQILKEHPVENTQLQNEKLYLYYLQNGRDMYVDQELDINRLSDYDVDHIVPQSFLKDDSIDNKVLTRSDKARGKSDNVPSEEVVKKMKNYWRQLLNAKLITQRKFDNLTKAERGGLSELDKAGFIKRQLVETRQITKHVAQILDSRMNTKYDENDKLIREVKVITLKSKLVSDFRKDFQFYKVREINNYHHAHDAYLNAVVGTALIKKYPKLESEFVYGDYKVYDVRKMIAKSEQEIGKATAKYFFYSNIMNFFKTEITLANGEIRKRPLIETNGETGEIVWDKGRDFATVRKVLSMPQVNIVKKTEVQTGGFSKESILPKRNSDKLIARKKDWDPKKYGGFDSPTVAYSVLVVAKVEKGKSKKLKSVKELLGITIMERSSFEKNPIDFLEAKGYKEVKKDLIIKLPKYSLFELENGRKRMLASAGELQKGNELALPSKYVNFLYLASHYEKLKGSPEDNEQKQLFVEQHKHYLDEIIEQISEFSKRVILADANLDKVLSAYNKHRDKPIREQAENIIHLFTLTNLGAPAAFKYFDTTIDRKRYTSTKEVLDATLIHQSITGLYETRIDLSQLGGDGGPAPEAAAKGGSGGTAPLEEEYRLFLEAPIQNVTLLEQWKREIPKVWAEINPPGLASTQAPIHVQLLSTALPVRVRQYPITLEAKRSLRETIRKFRAAGILRPVHSPWNTPLLPVRKSGTSEYRMVQDLREVNKRVETIHPTVPNPYTLLSLLPPDRIWYSVLDLKDAFFCIPLAPESQLIFAFEWADAEEGESGQLTWTRLPQGFKNSPTLFNEALNRDLQGFRLDHPSVSLLQYVDDLLIAADTQAACLSATRDLLMTLAELGYRVSGKKAQLCQEEVTYLGFKIHKGSRSLSNSRTQAILQIPVPKTKRQVREFLGTIGYCRLWIPGFAELAQPLYAATRPGNDPLVWGEKEEEAFQSLKLALTQPPALALPSLDKPFQLFVEETSGAAKGVLTQALGPWKRPVAYLSKRLDPVAAGWPRCLRAIAAAALLTREASKLTFGQDIEITSSHNLESLLRSPPDKWLTNARITQYQVLLLDPPRVRFKQTAALNPATLLPETDDTLPIHHCLDTLDSLTSTRPDLTDQPLAQAEATLFTDGSSYIRDGKRYAGAAVVTLDSVIWAEPLPIGTSAQKAELIALTKALEWSKDKSVNIYTDSRYAFATLHVHGMIYRERGWLTAGGKAIKNAPEILALLTAVWLPKRVAVMHCKGHQKDDAPTSTGNRRADEVAREVAIRPLSTQATISAGKRTADGSEFEKRTADGSEFESPKKKAKVE

SEQ ID NO: 1162 - protein, 2098 aa, synthetic construct
MPAAKRVKLDGGDKKYSIGLDIGTNSVGWAVITDEYKVPSKKFKVLGNTDRHSIKKNLIGALLFDSGETAEATRLKRTARRRYTRRKNRICYLQEIFSNEMAKVDDSFFHRLEESFLVEEDKKHERHPIFGNIVDEVAYHEKYPTIYHLRKKLVDSTDKADLRLIYLALAHMIKFRGHFLIEGDLNPDNSDVDKLFIQLVQTYNQLFEENPINASGVDAKAILSARLSKSRRLENLIAQLPGEKKNGLFGNLIALSLGLTPNFKSNFDLAEDAKLQLSKDTYDDDLDNLLAQIGDQYADLFLAAKNLSDAILLSDILRVNTEITKAPLSASMIKRYDEHHQDLTLLKALVRQQLPEKYKEIFFDQSKNGYAGYIDGGASQEEFYKFIKPILEKMDGTEELLVKLNREDLLRKQRTFDNGSIPHQIHLGELHAILRRQEDFYPFLKDNREKIEKILTFRIPYYVGPLARGNSRFAWMTRKSEETITPWNFEEVVDKGASAQSFIERMTNFDKNLPNEKVLPKHSLLYEYFTVYNELTKVKYVTEGMRKPAFLSGEQKKAIVDLLFKTNRKVTVKQLKEDYFKKIECFDSVEISGVEDRFNASLGTYHDLLKIIKDKDFLDNEENEDILEDIVLTLTLFEDREMIEERLKTYAHLFDDKVMKQLKRRRYTGWGRLSRKLINGIRDKQSGKTILDFLKSDGFANRNFMQLIHDDSLTFKEDIQKAQVSGQGDSLHEHIANLAGSPAIKKGILQTVKVVDELVKVMGRHKPENIVIEMARENQTTQKGQKNSRERMKRIEEGIKELGSQILKEHPVENTQLQNEKLYLYYLQNGRDMYVDQELDINRLSDYDVDHIVPQSFLKDDSIDNKVLTRSDKARGKSDNVPSEEVVKKMKNYWRQLLNAKLITQRKFDNLTKAERGGLSELDKAGFIKRQLVETRQITKHVAQILDSRMNTKYDENDKLIREVKVITLKSKLVSDFRKDFQFYKVREINNYHHAHDAYLNAVVGTALIKKYPKLESEFVYGDYKVYDVRKMIAKSEQEIGKATAKYFFYSNIMNFFKTEITLANGEIRKRPLIETNGETGEIVWDKGRDFATVRKVLSMPQVNIVKKTEVQTGGFSKESILPKRNSDKLIARKKDWDPKKYGGFDSPTVAYSVLVVAKVEKGKSKKLKSVKELLGITIMERSSFEKNPIDFLEAKGYKEVKKDLIIKLPKYSLFELENGRKRMLASAGELQKGNELALPSKYVNFLYLASHYEKLKGSPEDNEQKQLFVEQHKHYLDEIIEQISEFSKRVILADANLDKVLSAYNKHRDKPIREQAENIIHLFTLTNLGAPAAFKYFDTTIDRKRYTSTKEVLDATLIHQSITGLYETRIDLSQLGGDGGGSSEAAAKGGGGGTAPLEEEYRLFLEAPIQNVTLLEQWKREIPKVWAEINPPGLASTQAPIHVQLLSTALPVRVRQYPITLEAKRSLRETIRKFRAAGILRPVHSPWNTPLLPVRKSGTSEYRMVQDLREVNKRVETIHPTVPNPYTLLSLLPPDRIWYSVLDLKDAFFCIPLAPESQLIFAFEWADAEEGESGQLTWTRLPQGFKNSPTLFNEALNRDLQGFRLDHPSVSLLQYVDDLLIAADTQAACLSATRDLLMTLAELGYRVSGKKAQLCQEEVTYLGFKIHKGSRSLSNSRTQAILQIPVPKTKRQVREFLGTIGYCRLWIPGFAELAQPLYAATRPGNDPLVWGEKEEEAFQSLKLALTQPPALALPSLDKPFQLFVEETSGAAKGVLTQALGPWKRPVAYLSKRLDPVAAGWPRCLRAIAAAALLTREASKLTFGQDIEITSSHNLESLLRSPPDKWLTNARITQYQVLLLDPPRVRFKQTAALNPATLLPETDDTLPIHHCLDTLDSLTSTRPDLTDQPLAQAEATLFTDGSSYIRDGKRYAGAAVVTLDSVIWAEPLPIGTSAQKAELIALTKALEWSKDKSVNIYTDSRYAFATLHVHGMIYRERGWLTAGGKAIKNAPEILALLTAVWLPKRVAVMHCKGHQKDDAPTSTGNRRADEVAREVAIRPLSTQATISAGKRTADGSEFEKRTADGSEFESPKKKAKVE

SEQ ID NO: 1163 - protein, 2096 aa, synthetic construct
MPAAKRVKLDGGDKKYSIGLDIGTNSVGWAVITDEYKVPSKKFKVLGNTDRHSIKKNLIGALLFDSGETAEATRLKRTARRRYTRRKNRICYLQEIFSNEMAKVDDSFFHRLEESFLVEEDKKHERHPIFGNIVDEVAYHEKYPTIYHLRKKLVDSTDKADLRLIYLALAHMIKFRGHFLIEGDLNPDNSDVDKLFIQLVQTYNQLFEENPINASGVDAKAILSARLSKSRRLENLIAQLPGEKKNGLFGNLIALSLGLTPNFKSNFDLAEDAKLQLSKDTYDDDLDNLLAQIGDQYADLFLAAKNLSDAILLSDILRVNTEITKAPLSASMIKRYDEHHQDLTLLKALVRQQLPEKYKEIFFDQSKNGYAGYIDGGASQEEFYKFIKPILEKMDGTEELLVKLNREDLLRKQRTFDNGSIPHQIHLGELHAILRRQEDFYPFLKDNREKIEKILTFRIPYYVGPLARGNSRFAWMTRKSEETITPWNFEEVVDKGASAQSFIERMTNFDKNLPNEKVLPKHSLLYEYFTVYNELTKVKYVTEGMRKPAFLSGEQKKAIVDLLFKTNRKVTVKQLKEDYFKKIECFDSVEISGVEDRFNASLGTYHDLLKIIKDKDFLDNEENEDILEDIVLTLTLFEDREMIEERLKTYAHLFDDKVMKQLKRRRYTGWGRLSRKLINGIRDKQSGKTILDFLKSDGFANRNFMQLIHDDSLTFKEDIQKAQVSGQGDSLHEHIANLAGSPAIKKGILQTVKVVDELVKVMGRHKPENIVIEMARENQTTQKGQKNSRERMKRIEEGIKELGSQILKEHPVENTQLQNEKLYLYYLQNGRDMYVDQELDINRLSDYDVDHIVPQSFLKDDSIDNKVLTRSDKARGKSDNVPSEEVVKKMKNYWRQLLNAKLITQRKFDNLTKAERGGLSELDKAGFIKRQLVETRQITKHVAQILDSRMNTKYDENDKLIREVKVITLKSKLVSDFRKDFQFYKVREINNYHHAHDAYLNAVVGTALIKKYPKLESEFVYGDYKVYDVRKMIAKSEQEIGKATAKYFFYSNIMNFFKTEITLANGEIRKRPLIETNGETGEIVWDKGRDFATVRKVLSMPQVNIVKKTEVQTGGFSKESILPKRNSDKLIARKKDWDPKKYGGFDSPTVAYSVLVVAKVEKGKSKKLKSVKELLGITIMERSSFEKNPIDFLEAKGYKEVKKDLIIKLPKYSLFELENGRKRMLASAGELQKGNELALPSKYVNFLYLASHYEKLKGSPEDNEQKQLFVEQHKHYLDEIIEQISEFSKRVILADANLDKVLSAYNKHRDKPIREQAENIIHLFTLTNLGAPAAFKYFDTTIDRKRYTSTKEVLDATLIHQSITGLYETRIDLSQLGGDGGGGGGGSPAPGGTAPLEEEYRLFLEAPIQNVTLLEQWKREIPKVWAEINPPGLASTQAPIHVQLLSTALPVRVRQYPITLEAKRSLRETIRKFRAAGILRPVHSPWNTPLLPVRKSGTSEYRMVQDLREVNKRVETIHPTVPNPYTLLSLLPPDRIWYSVLDLKDAFFCIPLAPESQLIFAFEWADAEEGESGQLTWTRLPQGFKNSPTLFNEALNRDLQGFRLDHPSVSLLQYVDDLLIAADTQAACLSATRDLLMTLAELGYRVSGKKAQLCQEEVTYLGFKIHKGSRSLSNSRTQAILQIPVPKTKRQVREFLGTIGYCRLWIPGFAELAQPLYAATRPGNDPLVWGEKEEEAFQSLKLALTQPPALALPSLDKPFQLFVEETSGAAKGVLTQALGPWKRPVAYLSKRLDPVAAGWPRCLRAIAAAALLTREASKLTFGQDIEITSSHNLESLLRSPPDKWLTNARITQYQVLLLDPPRVRFKQTAALNPATLLPETDDTLPIHHCLDTLDSLTSTRPDLTDQPLAQAEATLFTDGSSYIRDGKRYAGAAVVTLDSVIWAEPLPIGTSAQKAELIALTKALEWSKDKSVNIYTDSRYAFATLHVHGMIYRERGWLTAGGKAIKNAPEILALLTAVWLPKRVAVMHCKGHQKDDAPTSTGNRRADEVAREVAIRPLSTQATISAGKRTADGSEFEKRTADGSEFESPKKKAKVE

SEQ ID NO: 1164 - protein, 2098 aa, synthetic construct
MPAAKRVKLDGGDKKYSIGLDIGTNSVGWAVITDEYKVPSKKFKVLGNTDRHSIKKNLIGALLFDSGETAEATRLKRTARRRYTRRKNRICYLQEIFSNEMAKVDDSFFHRLEESFLVEEDKKHERHPIFGNIVDEVAYHEKYPTIYHLRKKLVDSTDKADLRLIYLALAHMIKFRGHFLIEGDLNPDNSDVDKLFIQLVQTYNQLFEENPINASGVDAKAILSARLSKSRRLENLIAQLPGEKKNGLFGNLIALSLGLTPNFKSNFDLAEDAKLQLSKDTYDDDLDNLLAQIGDQYADLFLAAKNLSDAILLSDILRVNTEITKAPLSASMIKRYDEHHQDLTLLKALVRQQLPEKYKEIFFDQSKNGYAGYIDGGASQEEFYKFIKPILEKMDGTEELLVKLNREDLLRKQRTFDNGSIPHQIHLGELHAILRRQEDFYPFLKDNREKIEKILTFRIPYYVGPLARGNSRFAWMTRKSEETITPWNFEEVVDKGASAQSFIERMTNFDKNLPNEKVLPKHSLLYEYFTVYNELTKVKYVTEGMRKPAFLSGEQKKAIVDLLFKTNRKVTVKQLKEDYFKKIECFDSVEISGVEDRFNASLGTYHDLLKIIKDKDFLDNEENEDILEDIVLTLTLFEDREMIEERLKTYAHLFDDKVMKQLKRRRYTGWGRLSRKLINGIRDKQSGKTILDFLKSDGFANRNFMQLIHDDSLTFKEDIQKAQVSGQGDSLHEHIANLAGSPAIKKGILQTVKVVDELVKVMGRHKPENIVIEMARENQTTQKGQKNSRERMKRIEEGIKELGSQILKEHPVENTQLQNEKLYLYYLQNGRDMYVDQELDINRLSDYDVDHIVPQSFLKDDSIDNKVLTRSDKARGKSDNVPSEEVVKKMKNYWRQLLNAKLITQRKFDNLTKAERGGLSELDKAGFIKRQLVETRQITKHVAQILDSRMNTKYDENDKLIREVKVITLKSKLVSDFRKDFQFYKVREINNYHHAHDAYLNAVVGTALIKKYPKLESEFVYGDYKVYDVRKMIAKSEQEIGKATAKYFFYSNIMNFFKTEITLANGEIRKRPLIETNGETGEIVWDKGRDFATVRKVLSMPQVNIVKKTEVQTGGFSKESILPKRNSDKLIARKKDWDPKKYGGFDSPTVAYSVLVVAKVEKGKSKKLKSVKELLGITIMERSSFEKNPIDFLEAKGYKEVKKDLIIKLPKYSLFELENGRKRMLASAGELQKGNELALPSKYVNFLYLASHYEKLKGSPEDNEQKQLFVEQHKHYLDEIIEQISEFSKRVILADANLDKVLSAYNKHRDKPIREQAENIIHLFTLTNLGAPAAFKYFDTTIDRKRYTSTKEVLDATLIHQSITGLYETRIDLSQLGGDGGGSSPAPEAAAKGGTAPLEEEYRLFLEAPIQNVTLLEQWKREIPKVWAEINPPGLASTQAPIHVQLLSTALPVRVRQYPITLEAKRSLRETIRKFRAAGILRPVHSPWNTPLLPVRKSGTSEYRMVQDLREVNKRVETIHPTVPNPYTLLSLLPPDRIWYSVLDLKDAFFCIPLAPESQLIFAFEWADAEEGESGQLTWTRLPQGFKNSPTLFNEALNRDLQGFRLDHPSVSLLQYVDDLLIAADTQAACLSATRDLLMTLAELGYRVSGKKAQLCQEEVTYLGFKIHKGSRSLSNSRTQAILQIPVPKTKRQVREFLGTIGYCRLWIPGFAELAQPLYAATRPGNDPLVWGEKEEEAFQSLKLALTQPPALALPSLDKPFQLFVEETSGAAKGVLTQALGPWKRPVAYLSKRLDPVAAGWPRCLRAIAAAALLTREASKLTFGQDIEITSSHNLESLLRSPPDKWLTNARITQYQVLLLDPPRVRFKQTAALNPATLLPETDDTLPIHHCLDTLDSLTSTRPDLTDQPLAQAEATLFTDGSSYIRDGKRYAGAAVVTLDSVIWAEPLPIGTSAQKAELIALTKALEWSKDKSVNIYTDSRYAFATLHVHGMIYRERGWLTAGGKAIKNAPEILALLTAVWLPKRVAVMHCKGHQKDDAPTSTGNRRADEVAREVAIRPLSTQATISAGKRTADGSEFEKRTADGSEFESPKKKAKVE

SEQ ID NO: 1165 - protein, 2096 aa, synthetic construct
MPAAKRVKLDGGDKKYSIGLDIGTNSVGWAVITDEYKVPSKKFKVLGNTDRHSIKKNLIGALLFDSGETAEATRLKRTARRRYTRRKNRICYLQEIFSNEMAKVDDSFFHRLEESFLVEEDKKHERHPIFGNIVDEVAYHEKYPTIYHLRKKLVDSTDKADLRLIYLALAHMIKFRGHFLIEGDLNPDNSDVDKLFIQLVQTYNQLFEENPINASGVDAKAILSARLSKSRRLENLIAQLPGEKKNGLFGNLIALSLGLTPNFKSNFDLAEDAKLQLSKDTYDDDLDNLLAQIGDQYADLFLAAKNLSDAILLSDILRVNTEITKAPLSASMIKRYDEHHQDLTLLKALVRQQLPEKYKEIFFDQSKNGYAGYIDGGASQEEFYKFIKPILEKMDGTEELLVKLNREDLLRKQRTFDNGSIPHQIHLGELHAILRRQEDFYPFLKDNREKIEKILTFRIPYYVGPLARGNSRFAWMTRKSEETITPWNFEEVVDKGASAQSFIERMTNFDKNLPNEKVLPKHSLLYEYFTVYNELTKVKYVTEGMRKPAFLSGEQKKAIVDLLFKTNRKVTVKQLKEDYFKKIECFDSVEISGVEDRFNASLGTYHDLLKIIKDKDFLDNEENEDILEDIVLTLTLFEDREMIEERLKTYAHLFDDKVMKQLKRRRYTGWGRLSRKLINGIRDKQSGKTILDFLKSDGFANRNFMQLIHDDSLTFKEDIQKAQVSGQGDSLHEHIANLAGSPAIKKGILQTVKVVDELVKVMGRHKPENIVIEMARENQTTQKGQKNSRERMKRIEEGIKELGSQILKEHPVENTQLQNEKLYLYYLQNGRDMYVDQELDINRLSDYDVDHIVPQSFLKDDSIDNKVLTRSDKARGKSDNVPSEEVVKKMKNYWRQLLNAKLITQRKFDNLTKAERGGLSELDKAGFIKRQLVETRQITKHVAQILDSRMNTKYDENDKLIREVKVITLKSKLVSDFRKDFQFYKVREINNYHHAHDAYLNAVVGTALIKKYPKLESEFVYGDYKVYDVRKMIAKSEQEIGKATAKYFFYSNIMNFFKTEITLANGEIRKRPLIETNGETGEIVWDKGRDFATVRKVLSMPQVNIVKKTEVQTGGFSKESILPKRNSDKLIARKKDWDPKKYGGFDSPTVAYSVLVVAKVEKGKSKKLKSVKELLGITIMERSSFEKNPIDFLEAKGYKEVKKDLIIKLPKYSLFELENGRKRMLASAGELQKGNELALPSKYVNFLYLASHYEKLKGSPEDNEQKQLFVEQHKHYLDEIIEQISEFSKRVILADANLDKVLSAYNKHRDKPIREQAENIIHLFTLTNLGAPAAFKYFDTTIDRKRYTSTKEVLDATLIHQSITGLYETRIDLSQLGGDGGGSSGGSPAPGGTAPLEEEYRLFLEAPIQNVTLLEQWKREIPKVWAEINPPGLASTQAPIHVQLLSTALPVRVRQYPITLEAKRSLRETIRKFRAAGILRPVHSPWNTPLLPVRKSGTSEYRMVQDLREVNKRVETIHPTVPNPYTLLSLLPPDRIWYSVLDLKDAFFCIPLAPESQLIFAFEWADAEEGESGQLTWTRLPQGFKNSPTLFNEALNRDLQGFRLDHPSVSLLQYVDDLLIAADTQAACLSATRDLLMTLAELGYRVSGKKAQLCQEEVTYLGFKIHKGSRSLSNSRTQAILQIPVPKTKRQVREFLGTIGYCRLWIPGFAELAQPLYAATRPGNDPLVWGEKEEEAFQSLKLALTQPPALALPSLDKPFQLFVEETSGAAKGVLTQALGPWKRPVAYLSKRLDPVAAGWPRCLRAIAAAALLTREASKLTFGQDIEITSSHNLESLLRSPPDKWLTNARITQYQVLLLDPPRVRFKQTAALNPATLLPETDDTLPIHHCLDTLDSLTSTRPDLTDQPLAQAEATLFTDGSSYIRDGKRYAGAAVVTLDSVIWAEPLPIGTSAQKAELIALTKALEWSKDKSVNIYTDSRYAFATLHVHGMIYRERGWLTAGGKAIKNAPEILALLTAVWLPKRVAVMHCKGHQKDDAPTSTGNRRADEVAREVAIRPLSTQATISAGKRTADGSEFEKRTADGSEFESPKKKAKVE

SEQ ID NO: 1166 - protein, 2093 aa, synthetic construct
MPAAKRVKLDGGDKKYSIGLDIGTNSVGWAVITDEYKVPSKKFKVLGNTDRHSIKKNLIGALLFDSGETAEATRLKRTARRRYTRRKNRICYLQEIFSNEMAKVDDSFFHRLEESFLVEEDKKHERHPIFGNIVDEVAYHEKYPTIYHLRKKLVDSTDKADLRLIYLALAHMIKFRGHFLIEGDLNPDNSDVDKLFIQLVQTYNQLFEENPINASGVDAKAILSARLSKSRRLENLIAQLPGEKKNGLFGNLIALSLGLTPNFKSNFDLAEDAKLQLSKDTYDDDLDNLLAQIGDQYADLFLAAKNLSDAILLSDILRVNTEITKAPLSASMIKRYDEHHQDLTLLKALVRQQLPEKYKEIFFDQSKNGYAGYIDGGASQEEFYKFIKPILEKMDGTEELLVKLNREDLLRKQRTFDNGSIPHQIHLGELHAILRRQEDFYPFLKDNREKIEKILTFRIPYYVGPLARGNSRFAWMTRKSEETITPWNFEEVVDKGASAQSFIERMTNFDKNLPNEKVLPKHSLLYEYFTVYNELTKVKYVTEGMRKPAFLSGEQKKAIVDLLFKTNRKVTVKQLKEDYFKKIECFDSVEISGVEDRFNASLGTYHDLLKIIKDKDFLDNEENEDILEDIVLTLTLFEDREMIEERLKTYAHLFDDKVMKQLKRRRYTGWGRLSRKLINGIRDKQSGKTILDFLKSDGFANRNFMQLIHDDSLTFKEDIQKAQVSGQGDSLHEHIANLAGSPAIKKGILQTVKVVDELVKVMGRHKPENIVIEMARENQTTQKGQKNSRERMKRIEEGIKELGSQILKEHPVENTQLQNEKLYLYYLQNGRDMYVDQELDINRLSDYDVDHIVPQSFLKDDSIDNKVLTRSDKARGKSDNVPSEEVVKKMKNYWRQLLNAKLITQRKFDNLTKAERGGLSELDKAGFIKRQLVETRQITKHVAQILDSRMNTKYDENDKLIREVKVITLKSKLVSDFRKDFQFYKVREINNYHHAHDAYLNAVVGTALIKKYPKLESEFVYGDYKVYDVRKMIAKSEQEIGKATAKYFFYSNIMNFFKTEITLANGEIRKRPLIETNGETGEIVWDKGRDFATVRKVLSMPQVNIVKKTEVQTGGFSKESILPKRNSDKLIARKKDWDPKKYGGFDSPTVAYSVLVVAKVEKGKSKKLKSVKELLGITIMERSSFEKNPIDFLEAKGYKEVKKDLIIKLPKYSLFELENGRKRMLASAGELQKGNELALPSKYVNFLYLASHYEKLKGSPEDNEQKQLFVEQHKHYLDEIIEQISEFSKRVILADANLDKVLSAYNKHRDKPIREQAENIIHLFTLTNLGAPAAFKYFDTTIDRKRYTSTKEVLDATLIHQSITGLYETRIDLSQLGGDGGGGSGSSGGTAPLEEEYRLFLEAPIQNVTLLEQWKREIPKVWAEINPPGLASTQAPIHVQLLSTALPVRVRQYPITLEAKRSLRETIRKFRAAGILRPVHSPWNTPLLPVRKSGTSEYRMVQDLREVNKRVETIHPTVPNPYTLLSLLPPDRIWYSVLDLKDAFFCIPLAPESQLIFAFEWADAEEGESGQLTWTRLPQGFKNSPTLFNEALNRDLQGFRLDHPSVSLLQYVDDLLIAADTQAACLSATRDLLMTLAELGYRVSGKKAQLCQEEVTYLGFKIHKGSRSLSNSRTQAILQIPVPKTKRQVREFLGTIGYCRLWIPGFAELAQPLYAATRPGNDPLVWGEKEEEAFQSLKLALTQPPALALPSLDKPFQLFVEETSGAAKGVLTQALGPWKRPVAYLSKRLDPVAAGWPRCLRAIAAAALLTREASKLTFGQDIEITSSHNLESLLRSPPDKWLTNARITQYQVLLLDPPRVRFKQTAALNPATLLPETDDTLPIHHCLDTLDSLTSTRPDLTDQPLAQAEATLFTDGSSYIRDGKRYAGAAVVTLDSVIWAEPLPIGTSAQKAELIALTKALEWSKDKSVNIYTDSRYAFATLHVHGMIYRERGWLTAGGKAIKNAPEILALLTAVWLPKRVAVMHCKGHQKDDAPTSTGNRRADEVAREVAIRPLSTQATISAGKRTADGSEFEKRTADGSEFESPKKKAKVE

SEQ ID NO: 1167 - protein, 2098 aa, synthetic construct
MPAAKRVKLDGGDKKYSIGLDIGTNSVGWAVITDEYKVPSKKFKVLGNTDRHSIKKNLIGALLFDSGETAEATRLKRTARRRYTRRKNRICYLQEIFSNEMAKVDDSFFHRLEESFLVEEDKKHERHPIFGNIVDEVAYHEKYPTIYHLRKKLVDSTDKADLRLIYLALAHMIKFRGHFLIEGDLNPDNSDVDKLFIQLVQTYNQLFEENPINASGVDAKAILSARLSKSRRLENLIAQLPGEKKNGLFGNLIALSLGLTPNFKSNFDLAEDAKLQLSKDTYDDDLDNLLAQIGDQYADLFLAAKNLSDAILLSDILRVNTEITKAPLSASMIKRYDEHHQDLTLLKALVRQQLPEKYKEIFFDQSKNGYAGYIDGGASQEEFYKFIKPILEKMDGTEELLVKLNREDLLRKQRTFDNGSIPHQIHLGELHAILRRQEDFYPFLKDNREKIEKILTFRIPYYVGPLARGNSRFAWMTRKSEETITPWNFEEVVDKGASAQSFIERMTNFDKNLPNEKVLPKHSLLYEYFTVYNELTKVKYVTEGMRKPAFLSGEQKKAIVDLLFKTNRKVTVKQLKEDYFKKIECFDSVEISGVEDRFNASLGTYHDLLKIIKDKDFLDNEENEDILEDIVLTLTLFEDREMIEERLKTYAHLFDDKVMKQLKRRRYTGWGRLSRKLINGIRDKQSGKTILDFLKSDGFANRNFMQLIHDDSLTFKEDIQKAQVSGQGDSLHEHIANLAGSPAIKKGILQTVKVVDELVKVMGRHKPENIVIEMARENQTTQKGQKNSRERMKRIEEGIKELGSQILKEHPVENTQLQNEKLYLYYLQNGRDMYVDQELDINRLSDYDVDHIVPQSFLKDDSIDNKVLTRSDKARGKSDNVPSEEVVKKMKNYWRQLLNAKLITQRKFDNLTKAERGGLSELDKAGFIKRQLVETRQITKHVAQILDSRMNTKYDENDKLIREVKVITLKSKLVSDFRKDFQFYKVREINNYHHAHDAYLNAVVGTALIKKYPKLESEFVYGDYKVYDVRKMIAKSEQEIGKATAKYFFYSNIMNFFKTEITLANGEIRKRPLIETNGETGEIVWDKGRDFATVRKVLSMPQVNIVKKTEVQTGGFSKESILPKRNSDKLIARKKDWDPKKYGGFDSPTVAYSVLVVAKVEKGKSKKLKSVKELLGITIMERSSFEKNPIDFLEAKGYKEVKKDLIIKLPKYSLFELENGRKRMLASAGELQKGNELALPSKYVNFLYLASHYEKLKGSPEDNEQKQLFVEQHKHYLDEIIEQISEFSKRVILADANLDKVLSAYNKHRDKPIREQAENIIHLFTLTNLGAPAAFKYFDTTIDRKRYTSTKEVLDATLIHQSITGLYETRIDLSQLGGDGGEAAAKPAPGGGGGTAPLEEEYRLFLEAPIQNVTLLEQWKREIPKVWAEINPPGLASTQAPIHVQLLSTALPVRVRQYPITLEAKRSLRETIRKFRAAGILRPVHSPWNTPLLPVRKSGTSEYRMVQDLREVNKRVETIHPTVPNPYTLLSLLPPDRIWYSVLDLKDAFFCIPLAPESQLIFAFEWADAEEGESGQLTWTRLPQGFKNSPTLFNEALNRDLQGFRLDHPSVSLLQYVDDLLIAADTQAACLSATRDLLMTLAELGYRVSGKKAQLCQEEVTYLGFKIHKGSRSLSNSRTQAILQIPVPKTKRQVREFLGTIGYCRLWIPGFAELAQPLYAATRPGNDPLVWGEKEEEAFQSLKLALTQPPALALPSLDKPFQLFVEETSGAAKGVLTQALGPWKRPVAYLSKRLDPVAAGWPRCLRAIAAAALLTREASKLTFGQDIEITSSHNLESLLRSPPDKWLTNARITQYQVLLLDPPRVRFKQTAALNPATLLPETDDTLPIHHCLDTLDSLTSTRPDLTDQPLAQAEATLFTDGSSYIRDGKRYAGAAVVTLDSVIWAEPLPIGTSAQKAELIALTKALEWSKDKSVNIYTDSRYAFATLHVHGMIYRERGWLTAGGKAIKNAPEILALLTAVWLPKRVAVMHCKGHQKDDAPTSTGNRRADEVAREVAIRPLSTQATISAGKRTADGSEFEKRTADGSEFESPKKKAKVE

SEQ ID NO: 1168 - protein, 2093 aa, synthetic construct
MPAAKRVKLDGGDKKYSIGLDIGTNSVGWAVITDEYKVPSKKFKVLGNTDRHSIKKNLIGALLFDSGETAEATRLKRTARRRYTRRKNRICYLQEIFSNEMAKVDDSFFHRLEESFLVEEDKKHERHPIFGNIVDEVAYHEKYPTIYHLRKKLVDSTDKADLRLIYLALAHMIKFRGHFLIEGDLNPDNSDVDKLFIQLVQTYNQLFEENPINASGVDAKAILSARLSKSRRLENLIAQLPGEKKNGLFGNLIALSLGLTPNFKSNFDLAEDAKLQLSKDTYDDDLDNLLAQIGDQYADLFLAAKNLSDAILLSDILRVNTEITKAPLSASMIKRYDEHHQDLTLLKALVRQQLPEKYKEIFFDQSKNGYAGYIDGGASQEEFYKFIKPILEKMDGTEELLVKLNREDLLRKQRTFDNGSIPHQIHLGELHAILRRQEDFYPFLKDNREKIEKILTFRIPYYVGPLARGNSRFAWMTRKSEETITPWNFEEVVDKGASAQSFIERMTNFDKNLPNEKVLPKHSLLYEYFTVYNELTKVKYVTEGMRKPAFLSGEQKKAIVDLLFKTNRKVTVKQLKEDYFKKIECFDSVEISGVEDRFNASLGTYHDLLKIIKDKDFLDNEENEDILEDIVLTLTLFEDREMIEERLKTYAHLFDDKVMKQLKRRRYTGWGRLSRKLINGIRDKQSGKTILDFLKSDGFANRNFMQLIHDDSLTFKEDIQKAQVSGQGDSLHEHIANLAGSPAIKKGILQTVKVVDELVKVMGRHKPENIVIEMARENQTTQKGQKNSRERMKRIEEGIKELGSQILKEHPVENTQLQNEKLYLYYLQNGRDMYVDQELDINRLSDYDVDHIVPQSFLKDDSIDNKVLTRSDKARGKSDNVPSEEVVKKMKNYWRQLLNAKLITQRKFDNLTKAERGGLSELDKAGFIKRQLVETRQITKHVAQILDSRMNTKYDENDKLIREVKVITLKSKLVSDFRKDFQFYKVREINNYHHAHDAYLNAVVGTALIKKYPKLESEFVYGDYKVYDVRKMIAKSEQEIGKATAKYFFYSNIMNFFKTEITLANGEIRKRPLIETNGETGEIVWDKGRDFATVRKVLSMPQVNIVKKTEVQTGGFSKESILPKRNSDKLIARKKDWDPKKYGGFDSPTVAYSVLVVAKVEKGKSKKLKSVKELLGITIMERSSFEKNPIDFLEAKGYKEVKKDLIIKLPKYSLFELENGRKRMLASAGELQKGNELALPSKYVNFLYLASHYEKLKGSPEDNEQKQLFVEQHKHYLDEIIEQISEFSKRVILADANLDKVLSAYNKHRDKPIREQAENIIHLFTLTNLGAPAAFKYFDTTIDRKRYTSTKEVLDATLIHQSITGLYETRIDLSQLGGDGGGGGGGSPAPGGTLQLEEEYRLFEPESTQKQEMDIWLKNFPQAWAETGGMGTAHCQAPVLIQLKATATPISIRQYPMPHEAYQGIKPHIRRMLDQGILKPCQSPWNTPLLPVKKPGTEDYRPVQDLREVNKRVEDIHPTVPNPYNLLSTLPPSHPWYTVLDLKDAFFCLRLHSESQLLFAFEWRDPEIGLSGQLTWTRLPQGFKNSPTLFNEALHSDLADFRVRYPALVLLQYVDDLLLAAATRTECLEGTKALLETLGNKGYRASAKKAQICLQEVTYLGYSLKDGQRWLTKARKEAILSIPVPKNSRQVREFLGTAGYCRLWIPGFAELAAPLYPLTRPGTLFQWGTEQQLAFEDIKKALLSSPALGLPDITKPFELFIDENSGFAKGVLVQKLGPWKRPVAYLSKKLDTVASGWPPCLRMVAAIAILVKDAGKLTLGQPLTILTSHPVEALVRQPPNKWLSNARMTHYQAMLLDAERVHFGPTVSLNPATLLPLPSGGNHHDCLQILAETHGTRPDLTDQPLPDADLTWYTDGSSFIRNGEREAGAAVTTESEVIWAAPLPPGTSAQRAELIALTQALKMAEGKKLTVYTDSRYAFATTHVHGEIYRRRGWLTSEGKEIKNKNEILALLEALFLPKRLSIIHCPGHQKGDSPQAKGNRLADDTAKKAATETHSSLTVLPAGKRTADGSEFEKRTADGSEFESPKKKAKVE

SEQ ID NO: 1169 - protein, 2117 aa, synthetic construct
MPAAKRVKLDGGDKKYSIGLDIGTNSVGWAVITDEYKVPSKKFKVLGNTDRHSIKKNLIGALLFDSGETAEATRLKRTARRRYTRRKNRICYLQEIFSNEMAKVDDSFFHRLEESFLVEEDKKHERHPIFGNIVDEVAYHEKYPTIYHLRKKLVDSTDKADLRLIYLALAHMIKFRGHFLIEGDLNPDNSDVDKLFIQLVQTYNQLFEENPINASGVDAKAILSARLSKSRRLENLIAQLPGEKKNGLFGNLIALSLGLTPNFKSNFDLAEDAKLQLSKDTYDDDLDNLLAQIGDQYADLFLAAKNLSDAILLSDILRVNTEITKAPLSASMIKRYDEHHQDLTLLKALVRQQLPEKYKEIFFDQSKNGYAGYIDGGASQEEFYKFIKPILEKMDGTEELLVKLNREDLLRKQRTFDNGSIPHQIHLGELHAILRRQEDFYPFLKDNREKIEKILTFRIPYYVGPLARGNSRFAWMTRKSEETITPWNFEEVVDKGASAQSFIERMTNFDKNLPNEKVLPKHSLLYEYFTVYNELTKVKYVTEGMRKPAFLSGEQKKAIVDLLFKTNRKVTVKQLKEDYFKKIECFDSVEISGVEDRFNASLGTYHDLLKIIKDKDFLDNEENEDILEDIVLTLTLFEDREMIEERLKTYAHLFDDKVMKQLKRRRYTGWGRLSRKLINGIRDKQSGKTILDFLKSDGFANRNFMQLIHDDSLTFKEDIQKAQVSGQGDSLHEHIANLAGSPAIKKGILQTVKVVDELVKVMGRHKPENIVIEMARENQTTQKGQKNSRERMKRIEEGIKELGSQILKEHPVENTQLQNEKLYLYYLQNGRDMYVDQELDINRLSDYDVDHIVPQSFLKDDSIDNKVLTRSDKARGKSDNVPSEEVVKKMKNYWRQLLNAKLITQRKFDNLTKAERGGLSELDKAGFIKRQLVETRQITKHVAQILDSRMNTKYDENDKLIREVKVITLKSKLVSDFRKDFQFYKVREINNYHHAHDAYLNAVVGTALIKKYPKLESEFVYGDYKVYDVRKMIAKSEQEIGKATAKYFFYSNIMNFFKTEITLANGEIRKRPLIETNGETGEIVWDKGRDFATVRKVLSMPQVNIVKKTEVQTGGFSKESILPKRNSDKLIARKKDWDPKKYGGFDSPTVAYSVLVVAKVEKGKSKKLKSVKELLGITIMERSSFEKNPIDFLEAKGYKEVKKDLIIKLPKYSLFELENGRKRMLASAGELQKGNELALPSKYVNFLYLASHYEKLKGSPEDNEQKQLFVEQHKHYLDEIIEQISEFSKRVILADANLDKVLSAYNKHRDKPIREQAENIIHLFTLTNLGAPAAFKYFDTTIDRKRYTSTKEVLDATLIHQSITGLYETRIDLSQLGGDGGSGGSSGGSSGSETPGTSESATPESSGGSSGGSSGGTLQLEEEYRLFEPESTQKQEMDIWLKNFPQAWAETGGMGTAHCQAPVLIQLKATATPISIRQYPMPHEAYQGIKPHIRRMLDQGILKPCQSPWNTPLLPVKKPGTEDYRPVQDLREVNKRVEDIHPTVPNPYNLLSTLPPSHPWYTVLDLKDAFFCLRLHSESQLLFAFEWRDPEIGLSGQLTWTRLPQGFKNSPTLFNEALHSDLADFRVRYPALVLLQYVDDLLLAAATRTECLEGTKALLETLGNKGYRASAKKAQICLQEVTYLGYSLKDGQRWLTKARKEAILSIPVPKNSRQVREFLGTAGYCRLWIPGFAELAAPLYPLTRPGTLFQWGTEQQLAFEDIKKALLSSPALGLPDITKPFELFIDENSGFAKGVLVQKLGPWKRPVAYLSKKLDTVASGWPPCLRMVAAIAILVKDAGKLTLGQPLTILTSHPVEALVRQPPNKWLSNARMTHYQAMLLDAERVHFGPTVSLNPATLLPLPSGGNHHDCLQILAETHGTRPDLTDQPLPDADLTWYTDGSSFIRNGEREAGAAVTTESEVIWAAPLPPGTSAQRAELIALTQALKMAEGKKLTVYTDSRYAFATTHVHGEIYRRRGWLTSEGKEIKNKNEILALLEALFLPKRLSIIHCPGHQKGDSPQAKGNRLADDTAKKAATETHSSLTVLPAGKRTADGSEFEKRTADGSEFESPKKKAKVE

SEQ ID NO: 1170 - protein, 2130 aa, synthetic construct
MPAAKRVKLDGGDKKYSIGLDIGTNSVGWAVITDEYKVPSKKFKVLGNTDRHSIKKNLIGALLFDSGETAEATRLKRTARRRYTRRKNRICYLQEIFSNEMAKVDDSFFHRLEESFLVEEDKKHERHPIFGNIVDEVAYHEKYPTIYHLRKKLVDSTDKADLRLIYLALAHMIKFRGHFLIEGDLNPDNSDVDKLFIQLVQTYNQLFEENPINASGVDAKAILSARLSKSRRLENLIAQLPGEKKNGLFGNLIALSLGLTPNFKSNFDLAEDAKLQLSKDTYDDDLDNLLAQIGDQYADLFLAAKNLSDAILLSDILRVNTEITKAPLSASMIKRYDEHHQDLTLLKALVRQQLPEKYKEIFFDQSKNGYAGYIDGGASQEEFYKFIKPILEKMDGTEELLVKLNREDLLRKQRTFDNGSIPHQIHLGELHAILRRQEDFYPFLKDNREKIEKILTFRIPYYVGPLARGNSRFAWMTRKSEETITPWNFEEVVDKGASAQSFIERMTNFDKNLPNEKVLPKHSLLYEYFTVYNELTKVKYVTEGMRKPAFLSGEQKKAIVDLLFKTNRKVTVKQLKEDYFKKIECFDSVEISGVEDRFNASLGTYHDLLKIIKDKDFLDNEENEDILEDIVLTLTLFEDREMIEERLKTYAHLFDDKVMKQLKRRRYTGWGRLSRKLINGIRDKQSGKTILDFLKSDGFANRNFMQLIHDDSLTFKEDIQKAQVSGQGDSLHEHIANLAGSPAIKKGILQTVKVVDELVKVMGRHKPENIVIEMARENQTTQKGQKNSRERMKRIEEGIKELGSQILKEHPVENTQLQNEKLYLYYLQNGRDMYVDQELDINRLSDYDVDHIVPQSFLKDDSIDNKVLTRSDKARGKSDNVPSEEVVKKMKNYWRQLLNAKLITQRKFDNLTKAERGGLSELDKAGFIKRQLVETRQITKHVAQILDSRMNTKYDENDKLIREVKVITLKSKLVSDFRKDFQFYKVREINNYHHAHDAYLNAVVGTALIKKYPKLESEFVYGDYKVYDVRKMIAKSEQEIGKATAKYFFYSNIMNFFKTEITLANGEIRKRPLIETNGETGEIVWDKGRDFATVRKVLSMPQVNIVKKTEVQTGGFSKESILPKRNSDKLIARKKDWDPKKYGGFDSPTVAYSVLVVAKVEKGKSKKLKSVKELLGITIMERSSFEKNPIDFLEAKGYKEVKKDLIIKLPKYSLFELENGRKRMLASAGELQKGNELALPSKYVNFLYLASHYEKLKGSPEDNEQKQLFVEQHKHYLDEIIEQISEFSKRVILADANLDKVLSAYNKHRDKPIREQAENIIHLFTLTNLGAPAAFKYFDTTIDRKRYTSTKEVLDATLIHQSITGLYETRIDLSQLGGDGGAEAAAKEAAAKEAAAKEAAAKALEAEAAAKEAAAKEAAAKEAAAKAGGTLQLEEEYRLFEPESTQKQEMDIWLKNFPQAWAETGGMGTAHCQAPVLIQLKATATPISIRQYPMPHEAYQGIKPHIRRMLDQGILKPCQSPWNTPLLPVKKPGTEDYRPVQDLREVNKRVEDIHPTVPNPYNLLSTLPPSHPWYTVLDLKDAFFCLRLHSESQLLFAFEWRDPEIGLSGQLTWTRLPQGFKNSPTLFNEALHSDLADFRVRYPALVLLQYVDDLLLAAATRTECLEGTKALLETLGNKGYRASAKKAQICLQEVTYLGYSLKDGQRWLTKARKEAILSIPVPKNSRQVREFLGTAGYCRLWIPGFAELAAPLYPLTRPGTLFQWGTEQQLAFEDIKKALLSSPALGLPDITKPFELFIDENSGFAKGVLVQKLGPWKRPVAYLSKKLDTVASGWPPCLRMVAAIAILVKDAGKLTLGQPLTILTSHPVEALVRQPPNKWLSNARMTHYQAMLLDAERVHFGPTVSLNPATLLPLPSGGNHHDCLQILAETHGTRPDLTDQPLPDADLTWYTDGSSFIRNGEREAGAAVTTESEVIWAAPLPPGTSAQRAELIALTQALKMAEGKKLTVYTDSRYAFATTHVHGEIYRRRGWLTSEGKEIKNKNEILALLEALFLPKRLSIIHCPGHQKGDSPQAKGNRLADDTAKKAATETHSSLTVLPAGKRTADGSEFEKRTADGSEFESPKKKAKVE

SEQ ID NO: 1171 - protein, 2114 aa, synthetic construct
MPAAKRVKLDGGDKKYSIGLDIGTNSVGWAVITDEYKVPSKKFKVLGNTDRHSIKKNLIGALLFDSGETAEATRLKRTARRRYTRRKNRICYLQEIFSNEMAKVDDSFFHRLEESFLVEEDKKHERHPIFGNIVDEVAYHEKYPTIYHLRKKLVDSTDKADLRLIYLALAHMIKFRGHFLIEGDLNPDNSDVDKLFIQLVQTYNQLFEENPINASGVDAKAILSARLSKSRRLENLIAQLPGEKKNGLFGNLIALSLGLTPNFKSNFDLAEDAKLQLSKDTYDDDLDNLLAQIGDQYADLFLAAKNLSDAILLSDILRVNTEITKAPLSASMIKRYDEHHQDLTLLKALVRQQLPEKYKEIFFDQSKNGYAGYIDGGASQEEFYKFIKPILEKMDGTEELLVKLNREDLLRKQRTFDNGSIPHQIHLGELHAILRRQEDFYPFLKDNREKIEKILTFRIPYYVGPLARGNSRFAWMTRKSEETITPWNFEEVVDKGASAQSFIERMTNFDKNLPNEKVLPKHSLLYEYFTVYNELTKVKYVTEGMRKPAFLSGEQKKAIVDLLFKTNRKVTVKQLKEDYFKKIECFDSVEISGVEDRFNASLGTYHDLLKIIKDKDFLDNEENEDILEDIVLTLTLFEDREMIEERLKTYAHLFDDKVMKQLKRRRYTGWGRLSRKLINGIRDKQSGKTILDFLKSDGFANRNFMQLIHDDSLTFKEDIQKAQVSGQGDSLHEHIANLAGSPAIKKGILQTVKVVDELVKVMGRHKPENIVIEMARENQTTQKGQKNSRERMKRIEEGIKELGSQILKEHPVENTQLQNEKLYLYYLQNGRDMYVDQELDINRLSDYDVDHIVPQSFLKDDSIDNKVLTRSDKARGKSDNVPSEEVVKKMKNYWRQLLNAKLITQRKFDNLTKAERGGLSELDKAGFIKRQLVETRQITKHVAQILDSRMNTKYDENDKLIREVKVITLKSKLVSDFRKDFQFYKVREINNYHHAHDAYLNAVVGTALIKKYPKLESEFVYGDYKVYDVRKMIAKSEQEIGKATAKYFFYSNIMNFFKTEITLANGEIRKRPLIETNGETGEIVWDKGRDFATVRKVLSMPQVNIVKKTEVQTGGFSKESILPKRNSDKLIARKKDWDPKKYGGFDSPTVAYSVLVVAKVEKGKSKKLKSVKELLGITIMERSSFEKNPIDFLEAKGYKEVKKDLIIKLPKYSLFELENGRKRMLASAGELQKGNELALPSKYVNFLYLASHYEKLKGSPEDNEQKQLFVEQHKHYLDEIIEQISEFSKRVILADANLDKVLSAYNKHRDKPIREQAENIIHLFTLTNLGAPAAFKYFDTTIDRKRYTSTKEVLDATLIHQSITGLYETRIDLSQLGGDGGEAAAKEAAAKEAAAKEAAAKEAAAKEAAAKGGTLQLEEEYRLFEPESTQKQEMDIWLKNFPQAWAETGGMGTAHCQAPVLIQLKATATPISIRQYPMPHEAYQGIKPHIRRMLDQGILKPCQSPWNTPLLPVKKPGTEDYRPVQDLREVNKRVEDIHPTVPNPYNLLSTLPPSHPWYTVLDLKDAFFCLRLHSESQLLFAFEWRDPEIGLSGQLTWTRLPQGFKNSPTLFNEALHSDLADFRVRYPALVLLQYVDDLLLAAATRTECLEGTKALLETLGNKGYRASAKKAQICLQEVTYLGYSLKDGQRWLTKARKEAILSIPVPKNSRQVREFLGTAGYCRLWIPGFAELAAPLYPLTRPGTLFQWGTEQQLAFEDIKKALLSSPALGLPDITKPFELFIDENSGFAKGVLVQKLGPWKRPVAYLSKKLDTVASGWPPCLRMVAAIAILVKDAGKLTLGQPLTILTSHPVEALVRQPPNKWLSNARMTHYQAMLLDAERVHFGPTVSLNPATLLPLPSGGNHHDCLQILAETHGTRPDLTDQPLPDADLTWYTDGSSFIRNGEREAGAAVTTESEVIWAAPLPPGTSAQRAELIALTQALKMAEGKKLTVYTDSRYAFATTHVHGEIYRRRGWLTSEGKEIKNKNEILALLEALFLPKRLSIIHCPGHQKGDSPQAKGNRLADDTAKKAATETHSSLTVLPAGKRTADGSEFEKRTADGSEFESPKKKAKVE

SEQ ID NO: 1172 - protein, 2092 aa, synthetic construct
MPAAKRVKLDGGDKKYSIGLDIGTNSVGWAVITDEYKVPSKKFKVLGNTDRHSIKKNLIGALLFDSGETAEATRLKRTARRRYTRRKNRICYLQEIFSNEMAKVDDSFFHRLEESFLVEEDKKHERHPIFGNIVDEVAYHEKYPTIYHLRKKLVDSTDKADLRLIYLALAHMIKFRGHFLIEGDLNPDNSDVDKLFIQLVQTYNQLFEENPINASGVDAKAILSARLSKSRRLENLIAQLPGEKKNGLFGNLIALSLGLTPNFKSNFDLAEDAKLQLSKDTYDDDLDNLLAQIGDQYADLFLAAKNLSDAILLSDILRVNTEITKAPLSASMIKRYDEHHQDLTLLKALVRQQLPEKYKEIFFDQSKNGYAGYIDGGASQEEFYKFIKPILEKMDGTEELLVKLNREDLLRKQRTFDNGSIPHQIHLGELHAILRRQEDFYPFLKDNREKIEKILTFRIPYYVGPLARGNSRFAWMTRKSEETITPWNFEEVVDKGASAQSFIERMTNFDKNLPNEKVLPKHSLLYEYFTVYNELTKVKYVTEGMRKPAFLSGEQKKAIVDLLFKTNRKVTVKQLKEDYFKKIECFDSVEISGVEDRFNASLGTYHDLLKIIKDKDFLDNEENEDILEDIVLTLTLFEDREMIEERLKTYAHLFDDKVMKQLKRRRYTGWGRLSRKLINGIRDKQSGKTILDFLKSDGFANRNFMQLIHDDSLTFKEDIQKAQVSGQGDSLHEHIANLAGSPAIKKGILQTVKVVDELVKVMGRHKPENIVIEMARENQTTQKGQKNSRERMKRIEEGIKELGSQILKEHPVENTQLQNEKLYLYYLQNGRDMYVDQELDINRLSDYDVDHIVPQSFLKDDSIDNKVLTRSDKARGKSDNVPSEEVVKKMKNYWRQLLNAKLITQRKFDNLTKAERGGLSELDKAGFIKRQLVETRQITKHVAQILDSRMNTKYDENDKLIREVKVITLKSKLVSDFRKDFQFYKVREINNYHHAHDAYLNAVVGTALIKKYPKLESEFVYGDYKVYDVRKMIAKSEQEIGKATAKYFFYSNIMNFFKTEITLANGEIRKRPLIETNGETGEIVWDKGRDFATVRKVLSMPQVNIVKKTEVQTGGFSKESILPKRNSDKLIARKKDWDPKKYGGFDSPTVAYSVLVVAKVEKGKSKKLKSVKELLGITIMERSSFEKNPIDFLEAKGYKEVKKDLIIKLPKYSLFELENGRKRMLASAGELQKGNELALPSKYVNFLYLASHYEKLKGSPEDNEQKQLFVEQHKHYLDEIIEQISEFSKRVILADANLDKVLSAYNKHRDKPIREQAENIIHLFTLTNLGAPAAFKYFDTTIDRKRYTSTKEVLDATLIHQSITGLYETRIDLSQLGGDGGEAAAKGGSGGTLQLEEEYRLFEPESTQKQEMDIWLKNFPQAWAETGGMGTAHCQAPVLIQLKATATPISIRQYPMPHEAYQGIKPHIRRMLDQGILKPCQSPWNTPLLPVKKPGTEDYRPVQDLREVNKRVEDIHPTVPNPYNLLSTLPPSHPWYTVLDLKDAFFCLRLHSESQLLFAFEWRDPEIGLSGQLTWTRLPQGFKNSPTLFNEALHSDLADFRVRYPALVLLQYVDDLLLAAATRTECLEGTKALLETLGNKGYRASAKKAQICLQEVTYLGYSLKDGQRWLTKARKEAILSIPVPKNSRQVREFLGTAGYCRLWIPGFAELAAPLYPLTRPGTLFQWGTEQQLAFEDIKKALLSSPALGLPDITKPFELFIDENSGFAKGVLVQKLGPWKRPVAYLSKKLDTVASGWPPCLRMVAAIAILVKDAGKLTLGQPLTILTSHPVEALVRQPPNKWLSNARMTHYQAMLLDAERVHFGPTVSLNPATLLPLPSGGNHHDCLQILAETHGTRPDLTDQPLPDADLTWYTDGSSFIRNGEREAGAAVTTESEVIWAAPLPPGTSAQRAELIALTQALKMAEGKKLTVYTDSRYAFATTHVHGEIYRRRGWLTSEGKEIKNKNEILALLEALFLPKRLSIIHCPGHQKGDSPQAKGNRLADDTAKKAATETHSSLTVLPAGKRTADGSEFEKRTADGSEFESPKKKAKVE

SEQ ID NO: 1173 - protein, 2095 aa, synthetic construct
MPAAKRVKLDGGDKKYSIGLDIGTNSVGWAVITDEYKVPSKKFKVLGNTDRHSIKKNLIGALLFDSGETAEATRLKRTARRRYTRRKNRICYLQEIFSNEMAKVDDSFFHRLEESFLVEEDKKHERHPIFGNIVDEVAYHEKYPTIYHLRKKLVDSTDKADLRLIYLALAHMIKFRGHFLIEGDLNPDNSDVDKLFIQLVQTYNQLFEENPINASGVDAKAILSARLSKSRRLENLIAQLPGEKKNGLFGNLIALSLGLTPNFKSNFDLAEDAKLQLSKDTYDDDLDNLLAQIGDQYADLFLAAKNLSDAILLSDILRVNTEITKAPLSASMIKRYDEHHQDLTLLKALVRQQLPEKYKEIFFDQSKNGYAGYIDGGASQEEFYKFIKPILEKMDGTEELLVKLNREDLLRKQRTFDNGSIPHQIHLGELHAILRRQEDFYPFLKDNREKIEKILTFRIPYYVGPLARGNSRFAWMTRKSEETITPWNFEEVVDKGASAQSFIERMTNFDKNLPNEKVLPKHSLLYEYFTVYNELTKVKYVTEGMRKPAFLSGEQKKAIVDLLFKTNRKVTVKQLKEDYFKKIECFDSVEISGVEDRFNASLGTYHDLLKIIKDKDFLDNEENEDILEDIVLTLTLFEDREMIEERLKTYAHLFDDKVMKQLKRRRYTGWGRLSRKLINGIRDKQSGKTILDFLKSDGFANRNFMQLIHDDSLTFKEDIQKAQVSGQGDSLHEHIANLAGSPAIKKGILQTVKVVDELVKVMGRHKPENIVIEMARENQTTQKGQKNSRERMKRIEEGIKELGSQILKEHPVENTQLQNEKLYLYYLQNGRDMYVDQELDINRLSDYDVDHIVPQSFLKDDSIDNKVLTRSDKARGKSDNVPSEEVVKKMKNYWRQLLNAKLITQRKFDNLTKAERGGLSELDKAGFIKRQLVETRQITKHVAQILDSRMNTKYDENDKLIREVKVITLKSKLVSDFRKDFQFYKVREINNYHHAHDAYLNAVVGTALIKKYPKLESEFVYGDYKVYDVRKMIAKSEQEIGKATAKYFFYSNIMNFFKTEITLANGEIRKRPLIETNGETGEIVWDKGRDFATVRKVLSMPQVNIVKKTEVQTGGFSKESILPKRNSDKLIARKKDWDPKKYGGFDSPTVAYSVLVVAKVEKGKSKKLKSVKELLGITIMERSSFEKNPIDFLEAKGYKEVKKDLIIKLPKYSLFELENGRKRMLASAGELQKGNELALPSKYVNFLYLASHYEKLKGSPEDNEQKQLFVEQHKHYLDEIIEQISEFSKRVILADANLDKVLSAYNKHRDKPIREQAENIIHLFTLTNLGAPAAFKYFDTTIDRKRYTSTKEVLDATLIHQSITGLYETRIDLSQLGGDGGPAPAPAPAPAPGGTLQLEEEYRLFEPESTQKQEMDIWLKNFPQAWAETGGMGTAHCQAPVLIQLKATATPISIRQYPMPHEAYQGIKPHIRRMLDQGILKPCQSPWNTPLLPVKKPGTEDYRPVQDLREVNKRVEDIHPTVPNPYNLLSTLPPSHPWYTVLDLKDAFFCLRLHSESQLLFAFEWRDPEIGLSGQLTWTRLPQGFKNSPTLFNEALHSDLADFRVRYPALVLLQYVDDLLLAAATRTECLEGTKALLETLGNKGYRASAKKAQICLQEVTYLGYSLKDGQRWLTKARKEAILSIPVPKNSRQVREFLGTAGYCRLWIPGFAELAAPLYPLTRPGTLFQWGTEQQLAFEDIKKALLSSPALGLPDITKPFELFIDENSGFAKGVLVQKLGPWKRPVAYLSKKLDTVASGWPPCLRMVAAIAILVKDAGKLTLGQPLTILTSHPVEALVRQPPNKWLSNARMTHYQAMLLDAERVHFGPTVSLNPATLLPLPSGGNHHDCLQILAETHGTRPDLTDQPLPDADLTWYTDGSSFIRNGEREAGAAVTTESEVIWAAPLPPGTSAQRAELIALTQALKMAEGKKLTVYTDSRYAFATTHVHGEIYRRRGWLTSEGKEIKNKNEILALLEALFLPKRLSIIHCPGHQKGDSPQAKGNRLADDTAKKAATETHSSLTVLPAGKRTADGSEFEKRTADGSEFESPKKKAKVE

SEQ ID NO: 1174 - protein, 2099 aa, synthetic construct
MPAAKRVKLDGGDKKYSIGLDIGTNSVGWAVITDEYKVPSKKFKVLGNTDRHSIKKNLIGALLFDSGETAEATRLKRTARRRYTRRKNRICYLQEIFSNEMAKVDDSFFHRLEESFLVEEDKKHERHPIFGNIVDEVAYHEKYPTIYHLRKKLVDSTDKADLRLIYLALAHMIKFRGHFLIEGDLNPDNSDVDKLFIQLVQTYNQLFEENPINASGVDAKAILSARLSKSRRLENLIAQLPGEKKNGLFGNLIALSLGLTPNFKSNFDLAEDAKLQLSKDTYDDDLDNLLAQIGDQYADLFLAAKNLSDAILLSDILRVNTEITKAPLSASMIKRYDEHHQDLTLLKALVRQQLPEKYKEIFFDQSKNGYAGYIDGGASQEEFYKFIKPILEKMDGTEELLVKLNREDLLRKQRTFDNGSIPHQIHLGELHAILRRQEDFYPFLKDNREKIEKILTFRIPYYVGPLARGNSRFAWMTRKSEETITPWNFEEVVDKGASAQSFIERMTNFDKNLPNEKVLPKHSLLYEYFTVYNELTKVKYVTEGMRKPAFLSGEQKKAIVDLLFKTNRKVTVKQLKEDYFKKIECFDSVEISGVEDRFNASLGTYHDLLKIIKDKDFLDNEENEDILEDIVLTLTLFEDREMIEERLKTYAHLFDDKVMKQLKRRRYTGWGRLSRKLINGIRDKQSGKTILDFLKSDGFANRNFMQLIHDDSLTFKEDIQKAQVSGQGDSLHEHIANLAGSPAIKKGILQTVKVVDELVKVMGRHKPENIVIEMARENQTTQKGQKNSRERMKRIEEGIKELGSQILKEHPVENTQLQNEKLYLYYLQNGRDMYVDQELDINRLSDYDVDHIVPQSFLKDDSIDNKVLTRSDKARGKSDNVPSEEVVKKMKNYWRQLLNAKLITQRKFDNLTKAERGGLSELDKAGFIKRQLVETRQITKHVAQILDSRMNTKYDENDKLIREVKVITLKSKLVSDFRKDFQFYKVREINNYHHAHDAYLNAVVGTALIKKYPKLESEFVYGDYKVYDVRKMIAKSEQEIGKATAKYFFYSNIMNFFKTEITLANGEIRKRPLIETNGETGEIVWDKGRDFATVRKVLSMPQVNIVKKTEVQTGGFSKESILPKRNSDKLIARKKDWDPKKYGGFDSPTVAYSVLVVAKVEKGKSKKLKSVKELLGITIMERSSFEKNPIDFLEAKGYKEVKKDLIIKLPKYSLFELENGRKRMLASAGELQKGNELALPSKYVNFLYLASHYEKLKGSPEDNEQKQLFVEQHKHYLDEIIEQISEFSKRVILADANLDKVLSAYNKHRDKPIREQAENIIHLFTLTNLGAPAAFKYFDTTIDRKRYTSTKEVLDATLIHQSITGLYETRIDLSQLGGDGGGGGGSGGGGSGGGGSGGTLQLEEEYRLFEPESTQKQEMDIWLKNFPQAWAETGGMGTAHCQAPVLIQLKATATPISIRQYPMPHEAYQGIKPHIRRMLDQGILKPCQSPWNTPLLPVKKPGTEDYRPVQDLREVNKRVEDIHPTVPNPYNLLSTLPPSHPWYTVLDLKDAFFCLRLHSESQLLFAFEWRDPEIGLSGQLTWTRLPQGFKNSPTLFNEALHSDLADFRVRYPALVLLQYVDDLLLAAATRTECLEGTKALLETLGNKGYRASAKKAQICLQEVTYLGYSLKDGQRWLTKARKEAILSIPVPKNSRQVREFLGTAGYCRLWIPGFAELAAPLYPLTRPGTLFQWGTEQQLAFEDIKKALLSSPALGLPDITKPFELFIDENSGFAKGVLVQKLGPWKRPVAYLSKKLDTVASGWPPCLRMVAAIAILVKDAGKLTLGQPLTILTSHPVEALVRQPPNKWLSNARMTHYQAMLLDAERVHFGPTVSLNPATLLPLPSGGNHHDCLQILAETHGTRPDLTDQPLPDADLTWYTDGSSFIRNGEREAGAAVTTESEVIWAAPLPPGTSAQRAELIALTQALKMAEGKKLTVYTDSRYAFATTHVHGEIYRRRGWLTSEGKEIKNKNEILALLEALFLPKRLSIIHCPGHQKGDSPQAKGNRLADDTAKKAATETHSSLTVLPAGKRTADGSEFEKRTADGSEFESPKKKAKVE

SEQ ID NO: 1175 - protein, 2109 aa, synthetic construct
MPAAKRVKLDGGDKKYSIGLDIGTNSVGWAVITDEYKVPSKKFKVLGNTDRHSIKKNLIGALLFDSGETAEATRLKRTARRRYTRRKNRICYLQEIFSNEMAKVDDSFFHRLEESFLVEEDKKHERHPIFGNIVDEVAYHEKYPTIYHLRKKLVDSTDKADLRLIYLALAHMIKFRGHFLIEGDLNPDNSDVDKLFIQLVQTYNQLFEENPINASGVDAKAILSARLSKSRRLENLIAQLPGEKKNGLFGNLIALSLGLTPNFKSNFDLAEDAKLQLSKDTYDDDLDNLLAQIGDQYADLFLAAKNLSDAILLSDILRVNTEITKAPLSASMIKRYDEHHQDLTLLKALVRQQLPEKYKEIFFDQSKNGYAGYIDGGASQEEFYKFIKPILEKMDGTEELLVKLNREDLLRKQRTFDNGSIPHQIHLGELHAILRRQEDFYPFLKDNREKIEKILTFRIPYYVGPLARGNSRFAWMTRKSEETITPWNFEEVVDKGASAQSFIERMTNFDKNLPNEKVLPKHSLLYEYFTVYNELTKVKYVTEGMRKPAFLSGEQKKAIVDLLFKTNRKVTVKQLKEDYFKKIECFDSVEISGVEDRFNASLGTYHDLLKIIKDKDFLDNEENEDILEDIVLTLTLFEDREMIEERLKTYAHLFDDKVMKQLKRRRYTGWGRLSRKLINGIRDKQSGKTILDFLKSDGFANRNFMQLIHDDSLTFKEDIQKAQVSGQGDSLHEHIANLAGSPAIKKGILQTVKVVDELVKVMGRHKPENIVIEMARENQTTQKGQKNSRERMKRIEEGIKELGSQILKEHPVENTQLQNEKLYLYYLQNGRDMYVDQELDINRLSDYDVDHIVPQSFLKDDSIDNKVLTRSDKARGKSDNVPSEEVVKKMKNYWRQLLNAKLITQRKFDNLTKAERGGLSELDKAGFIKRQLVETRQITKHVAQILDSRMNTKYDENDKLIREVKVITLKSKLVSDFRKDFQFYKVREINNYHHAHDAYLNAVVGTALIKKYPKLESEFVYGDYKVYDVRKMIAKSEQEIGKATAKYFFYSNIMNFFKTEITLANGEIRKRPLIETNGETGEIVWDKGRDFATVRKVLSMPQVNIVKKTEVQTGGFSKESILPKRNSDKLIARKKDWDPKKYGGFDSPTVAYSVLVVAKVEKGKSKKLKSVKELLGITIMERSSFEKNPIDFLEAKGYKEVKKDLIIKLPKYSLFELENGRKRMLASAGELQKGNELALPSKYVNFLYLASHYEKLKGSPEDNEQKQLFVEQHKHYLDEIIEQISEFSKRVILADANLDKVLSAYNKHRDKPIREQAENIIHLFTLTNLGAPAAFKYFDTTIDRKRYTSTKEVLDATLIHQSITGLYETRIDLSQLGGDGGEAAAKEAAAKEAAAKEAAAKEAAAKGGTLQLEEEYRLFEPESTQKQEMDIWLKNFPQAWAETGGMGTAHCQAPVLIQLKATATPISIRQYPMPHEAYQGIKPHIRRMLDQGILKPCQSPWNTPLLPVKKPGTEDYRPVQDLREVNKRVEDIHPTVPNPYNLLSTLPPSHPWYTVLDLKDAFFCLRLHSESQLLFAFEWRDPEIGLSGQLTWTRLPQGFKNSPTLFNEALHSDLADFRVRYPALVLLQYVDDLLLAAATRTECLEGTKALLETLGNKGYRASAKKAQICLQEVTYLGYSLKDGQRWLTKARKEAILSIPVPKNSRQVREFLGTAGYCRLWIPGFAELAAPLYPLTRPGTLFQWGTEQQLAFEDIKKALLSSPALGLPDITKPFELFIDENSGFAKGVLVQKLGPWKRPVAYLSKKLDTVASGWPPCLRMVAAIAILVKDAGKLTLGQPLTILTSHPVEALVRQPPNKWLSNARMTHYQAMLLDAERVHFGPTVSLNPATLLPLPSGGNHHDCLQILAETHGTRPDLTDQPLPDADLTWYTDGSSFIRNGEREAGAAVTTESEVIWAAPLPPGTSAQRAELIALTQALKMAEGKKLTVYTDSRYAFATTHVHGEIYRRRGWLTSEGKEIKNKNEILALLEALFLPKRLSIIHCPGHQKGDSPQAKGNRLADDTAKKAATETHSSLTVLPAGKRTADGSEFEKRTADGSEFESPKKKAKVE

SEQ ID NO: 1176 - protein, 2095 aa, synthetic construct
MPAAKRVKLDGGDKKYSIGLDIGTNSVGWAVITDEYKVPSKKFKVLGNTDRHSIKKNLIGALLFDSGETAEATRLKRTARRRYTRRKNRICYLQEIFSNEMAKVDDSFFHRLEESFLVEEDKKHERHPIFGNIVDEVAYHEKYPTIYHLRKKLVDSTDKADLRLIYLALAHMIKFRGHFLIEGDLNPDNSDVDKLFIQLVQTYNQLFEENPINASGVDAKAILSARLSKSRRLENLIAQLPGEKKNGLFGNLIALSLGLTPNFKSNFDLAEDAKLQLSKDTYDDDLDNLLAQIGDQYADLFLAAKNLSDAILLSDILRVNTEITKAPLSASMIKRYDEHHQDLTLLKALVRQQLPEKYKEIFFDQSKNGYAGYIDGGASQEEFYKFIKPILEKMDGTEELLVKLNREDLLRKQRTFDNGSIPHQIHLGELHAILRRQEDFYPFLKDNREKIEKILTFRIPYYVGPLARGNSRFAWMTRKSEETITPWNFEEVVDKGASAQSFIERMTNFDKNLPNEKVLPKHSLLYEYFTVYNELTKVKYVTEGMRKPAFLSGEQKKAIVDLLFKTNRKVTVKQLKEDYFKKIECFDSVEISGVEDRFNASLGTYHDLLKIIKDKDFLDNEENEDILEDIVLTLTLFEDREMIEERLKTYAHLFDDKVMKQLKRRRYTGWGRLSRKLINGIRDKQSGKTILDFLKSDGFANRNFMQLIHDDSLTFKEDIQKAQVSGQGDSLHEHIANLAGSPAIKKGILQTVKVVDELVKVMGRHKPENIVIEMARENQTTQKGQKNSRERMKRIEEGIKELGSQILKEHPVENTQLQNEKLYLYYLQNGRDMYVDQELDINRLSDYDVDHIVPQSFLKDDSIDNKVLTRSDKARGKSDNVPSEEVVKKMKNYWRQLLNAKLITQRKFDNLTKAERGGLSELDKAGFIKRQLVETRQITKHVAQILDSRMNTKYDENDKLIREVKVITLKSKLVSDFRKDFQFYKVREINNYHHAHDAYLNAVVGTALIKKYPKLESEFVYGDYKVYDVRKMIAKSEQEIGKATAKYFFYSNIMNFFKTEITLANGEIRKRPLIETNGETGEIVWDKGRDFATVRKVLSMPQVNIVKKTEVQTGGFSKESILPKRNSDKLIARKKDWDPKKYGGFDSPTVAYSVLVVAKVEKGKSKKLKSVKELLGITIMERSSFEKNPIDFLEAKGYKEVKKDLIIKLPKYSLFELENGRKRMLASAGELQKGNELALPSKYVNFLYLASHYEKLKGSPEDNEQKQLFVEQHKHYLDEIIEQISEFSKRVILADANLDKVLSAYNKHRDKPIREQAENIIHLFTLTNLGAPAAFKYFDTTIDRKRYTSTKEVLDATLIHQSITGLYETRIDLSQLGGDGGGGSPAPEAAAKGGTLQLEEEYRLFEPESTQKQEMDIWLKNFPQAWAETGGMGTAHCQAPVLIQLKATATPISIRQYPMPHEAYQGIKPHIRRMLDQGILKPCQSPWNTPLLPVKKPGTEDYRPVQDLREVNKRVEDIHPTVPNPYNLLSTLPPSHPWYTVLDLKDAFFCLRLHSESQLLFAFEWRDPEIGLSGQLTWTRLPQGFKNSPTLFNEALHSDLADFRVRYPALVLLQYVDDLLLAAATRTECLEGTKALLETLGNKGYRASAKKAQICLQEVTYLGYSLKDGQRWLTKARKEAILSIPVPKNSRQVREFLGTAGYCRLWIPGFAELAAPLYPLTRPGTLFQWGTEQQLAFEDIKKALLSSPALGLPDITKPFELFIDENSGFAKGVLVQKLGPWKRPVAYLSKKLDTVASGWPPCLRMVAAIAILVKDAGKLTLGQPLTILTSHPVEALVRQPPNKWLSNARMTHYQAMLLDAERVHFGPTVSLNPATLLPLPSGGNHHDCLQILAETHGTRPDLTDQPLPDADLTWYTDGSSFIRNGEREAGAAVTTESEVIWAAPLPPGTSAQRAELIALTQALKMAEGKKLTVYTDSRYAFATTHVHGEIYRRRGWLTSEGKEIKNKNEILALLEALFLPKRLSIIHCPGHQKGDSPQAKGNRLADDTAKKAATETHSSLTVLPAGKRTADGSEFEKRTADGSEFESPKKKAKVE

SEQ ID NO: 1177 - protein, 2102 aa, synthetic construct
MPAAKRVKLDGGDKKYSIGLDIGTNSVGWAVITDEYKVPSKKFKVLGNTDRHSIKKNLIGALLFDSGETAEATRLKRTARRRYTRRKNRICYLQEIFSNEMAKVDDSFFHRLEESFLVEEDKKHERHPIFGNIVDEVAYHEKYPTIYHLRKKLVDSTDKADLRLIYLALAHMIKFRGHFLIEGDLNPDNSDVDKLFIQLVQTYNQLFEENPINASGVDAKAILSARLSKSRRLENLIAQLPGEKKNGLFGNLIALSLGLTPNFKSNFDLAEDAKLQLSKDTYDDDLDNLLAQIGDQYADLFLAAKNLSDAILLSDILRVNTEITKAPLSASMIKRYDEHHQDLTLLKALVRQQLPEKYKEIFFDQSKNGYAGYIDGGASQEEFYKFIKPILEKMDGTEELLVKLNREDLLRKQRTFDNGSIPHQIHLGELHAILRRQEDFYPFLKDNREKIEKILTFRIPYYVGPLARGNSRFAWMTRKSEETITPWNFEEVVDKGASAQSFIERMTNFDKNLPNEKVLPKHSLLYEYFTVYNELTKVKYVTEGMRKPAFLSGEQKKAIVDLLFKTNRKVTVKQLKEDYFKKIECFDSVEISGVEDRFNASLGTYHDLLKIIKDKDFLDNEENEDILEDIVLTLTLFEDREMIEERLKTYAHLFDDKVMKQLKRRRYTGWGRLSRKLINGIRDKQSGKTILDFLKSDGFANRNFMQLIHDDSLTFKEDIQKAQVSGQGDSLHEHIANLAGSPAIKKGILQTVKVVDELVKVMGRHKPENIVIEMARENQTTQKGQKNSRERMKRIEEGIKELGSQILKEHPVENTQLQNEKLYLYYLQNGRDMYVDQELDINRLSDYDVDHIVPQSFLKDDSIDNKVLTRSDKARGKSDNVPSEEVVKKMKNYWRQLLNAKLITQRKFDNLTKAERGGLSELDKAGFIKRQLVETRQITKHVAQILDSRMNTKYDENDKLIREVKVITLKSKLVSDFRKDFQFYKVREINNYHHAHDAYLNAVVGTALIKKYPKLESEFVYGDYKVYDVRKMIAKSEQEIGKATAKYFFYSNIMNFFKTEITLANGEIRKRPLIETNGETGEIVWDKGRDFATVRKVLSMPQVNIVKKTEVQTGGFSKESILPKRNSDKLIARKKDWDPKKYGGFDSPTVAYSVLVVAKVEKGKSKKLKSVKELLGITIMERSSFEKNPIDFLEAKGYKEVKKDLIIKLPKYSLFELENGRKRMLASAGELQKGNELALPSKYVNFLYLASHYEKLKGSPEDNEQKQLFVEQHKHYLDEIIEQISEFSKRVILADANLDKVLSAYNKHRDKPIREQAENIIHLFTLTNLGAPAAFKYFDTTIDRKRYTSTKEVLDATLIHQSITGLYETRIDLSQLGGDGGGGSGGSGGSGGSGGSGGSGGTLQLEEEYRLFEPESTQKQEMDIWLKNFPQAWAETGGMGTAHCQAPVLIQLKATATPISIRQYPMPHEAYQGIKPHIRRMLDQGILKPCQSPWNTPLLPVKKPGTEDYRPVQDLREVNKRVEDIHPTVPNPYNLLSTLPPSHPWYTVLDLKDAFFCLRLHSESQLLFAFEWRDPEIGLSGQLTWTRLPQGFKNSPTLFNEALHSDLADFRVRYPALVLLQYVDDLLLAAATRTECLEGTKALLETLGNKGYRASAKKAQICLQEVTYLGYSLKDGQRWLTKARKEAILSIPVPKNSRQVREFLGTAGYCRLWIPGFAELAAPLYPLTRPGTLFQWGTEQQLAFEDIKKALLSSPALGLPDITKPFELFIDENSGFAKGVLVQKLGPWKRPVAYLSKKLDTVASGWPPCLRMVAAIAILVKDAGKLTLGQPLTILTSHPVEALVRQPPNKWLSNARMTHYQAMLLDAERVHFGPTVSLNPATLLPLPSGGNHHDCLQILAETHGTRPDLTDQPLPDADLTWYTDGSSFIRNGEREAGAAVTTESEVIWAAPLPPGTSAQRAELIALTQALKMAEGKKLTVYTDSRYAFATTHVHGEIYRRRGWLTSEGKEIKNKNEILALLEALFLPKRLSIIHCPGHQKGDSPQAKGNRLADDTAKKAATETHSSLTVLPAGKRTADGSEFEKRTADGSEFESPKKKAKVE

SEQ ID NO: 1178 - protein, 2095 aa, synthetic construct
MPAAKRVKLDGGDKKYSIGLDIGTNSVGWAVITDEYKVPSKKFKVLGNTDRHSIKKNLIGALLFDSGETAEATRLKRTARRRYTRRKNRICYLQEIFSNEMAKVDDSFFHRLEESFLVEEDKKHERHPIFGNIVDEVAYHEKYPTIYHLRKKLVDSTDKADLRLIYLALAHMIKFRGHFLIEGDLNPDNSDVDKLFIQLVQTYNQLFEENPINASGVDAKAILSARLSKSRRLENLIAQLPGEKKNGLFGNLIALSLGLTPNFKSNFDLAEDAKLQLSKDTYDDDLDNLLAQIGDQYADLFLAAKNLSDAILLSDILRVNTEITKAPLSASMIKRYDEHHQDLTLLKALVRQQLPEKYKEIFFDQSKNGYAGYIDGGASQEEFYKFIKPILEKMDGTEELLVKLNREDLLRKQRTFDNGSIPHQIHLGELHAILRRQEDFYPFLKDNREKIEKILTFRIPYYVGPLARGNSRFAWMTRKSEETITPWNFEEVVDKGASAQSFIERMTNFDKNLPNEKVLPKHSLLYEYFTVYNELTKVKYVTEGMRKPAFLSGEQKKAIVDLLFKTNRKVTVKQLKEDYFKKIECFDSVEISGVEDRFNASLGTYHDLLKIIKDKDFLDNEENEDILEDIVLTLTLFEDREMIEERLKTYAHLFDDKVMKQLKRRRYTGWGRLSRKLINGIRDKQSGKTILDFLKSDGFANRNFMQLIHDDSLTFKEDIQKAQVSGQGDSLHEHIANLAGSPAIKKGILQTVKVVDELVKVMGRHKPENIVIEMARENQTTQKGQKNSRERMKRIEEGIKELGSQILKEHPVENTQLQNEKLYLYYLQNGRDMYVDQELDINRLSDYDVDHIVPQSFLKDDSIDNKVLTRSDKARGKSDNVPSEEVVKKMKNYWRQLLNAKLITQRKFDNLTKAERGGLSELDKAGFIKRQLVETRQITKHVAQILDSRMNTKYDENDKLIREVKVITLKSKLVSDFRKDFQFYKVREINNYHHAHDAYLNAVVGTALIKKYPKLESEFVYGDYKVYDVRKMIAKSEQEIGKATAKYFFYSNIMNFFKTEITLANGEIRKRPLIETNGETGEIVWDKGRDFATVRKVLSMPQVNIVKKTEVQTGGFSKESILPKRNSDKLIARKKDWDPKKYGGFDSPTVAYSVLVVAKVEKGKSKKLKSVKELLGITIMERSSFEKNPIDFLEAKGYKEVKKDLIIKLPKYSLFELENGRKRMLASAGELQKGNELALPSKYVNFLYLASHYEKLKGSPEDNEQKQLFVEQHKHYLDEIIEQISEFSKRVILADANLDKVLSAYNKHRDKPIREQAENIIHLFTLTNLGAPAAFKYFDTTIDRKRYTSTKEVLDATLIHQSITGLYETRIDLSQLGGDGGEAAAKGGSGSSGGTLQLEEEYRLFEPESTQKQEMDIWLKNFPQAWAETGGMGTAHCQAPVLIQLKATATPISIRQYPMPHEAYQGIKPHIRRMLDQGILKPCQSPWNTPLLPVKKPGTEDYRPVQDLREVNKRVEDIHPTVPNPYNLLSTLPPSHPWYTVLDLKDAFFCLRLHSESQLLFAFEWRDPEIGLSGQLTWTRLPQGFKNSPTLFNEALHSDLADFRVRYPALVLLQYVDDLLLAAATRTECLEGTKALLETLGNKGYRASAKKAQICLQEVTYLGYSLKDGQRWLTKARKEAILSIPVPKNSRQVREFLGTAGYCRLWIPGFAELAAPLYPLTRPGTLFQWGTEQQLAFEDIKKALLSSPALGLPDITKPFELFIDENSGFAKGVLVQKLGPWKRPVAYLSKKLDTVASGWPPCLRMVAAIAILVKDAGKLTLGQPLTILTSHPVEALVRQPPNKWLSNARMTHYQAMLLDAERVHFGPTVSLNPATLLPLPSGGNHHDCLQILAETHGTRPDLTDQPLPDADLTWYTDGSSFIRNGEREAGAAVTTESEVIWAAPLPPGTSAQRAELIALTQALKMAEGKKLTVYTDSRYAFATTHVHGEIYRRRGWLTSEGKEIKNKNEILALLEALFLPKRLSIIHCPGHQKGDSPQAKGNRLADDTAKKAATETHSSLTVLPAGKRTADGSEFEKRTADGSEFESPKKKAKVE

SEQ ID NO: 1179 - protein, 2095 aa, synthetic construct
MPAAKRVKLDGGDKKYSIGLDIGTNSVGWAVITDEYKVPSKKFKVLGNTDRHSIKKNLIGALLFDSGETAEATRLKRTARRRYTRRKNRICYLQEIFSNEMAKVDDSFFHRLEESFLVEEDKKHERHPIFGNIVDEVAYHEKYPTIYHLRKKLVDSTDKADLRLIYLALAHMIKFRGHFLIEGDLNPDNSDVDKLFIQLVQTYNQLFEENPINASGVDAKAILSARLSKSRRLENLIAQLPGEKKNGLFGNLIALSLGLTPNFKSNFDLAEDAKLQLSKDTYDDDLDNLLAQIGDQYADLFLAAKNLSDAILLSDILRVNTEITKAPLSASMIKRYDEHHQDLTLLKALVRQQLPEKYKEIFFDQSKNGYAGYIDGGASQEEFYKFIKPILEKMDGTEELLVKLNREDLLRKQRTFDNGSIPHQIHLGELHAILRRQEDFYPFLKDNREKIEKILTFRIPYYVGPLARGNSRFAWMTRKSEETITPWNFEEVVDKGASAQSFIERMTNFDKNLPNEKVLPKHSLLYEYFTVYNELTKVKYVTEGMRKPAFLSGEQKKAIVDLLFKTNRKVTVKQLKEDYFKKIECFDSVEISGVEDRFNASLGTYHDLLKIIKDKDFLDNEENEDILEDIVLTLTLFEDREMIEERLKTYAHLFDDKVMKQLKRRRYTGWGRLSRKLINGIRDKQSGKTILDFLKSDGFANRNFMQLIHDDSLTFKEDIQKAQVSGQGDSLHEHIANLAGSPAIKKGILQTVKVVDELVKVMGRHKPENIVIEMARENQTTQKGQKNSRERMKRIEEGIKELGSQILKEHPVENTQLQNEKLYLYYLQNGRDMYVDQELDINRLSDYDVDHIVPQSFLKDDSIDNKVLTRSDKARGKSDNVPSEEVVKKMKNYWRQLLNAKLITQRKFDNLTKAERGGLSELDKAGFIKRQLVETRQITKHVAQILDSRMNTKYDENDKLIREVKVITLKSKLVSDFRKDFQFYKVREINNYHHAHDAYLNAVVGTALIKKYPKLESEFVYGDYKVYDVRKMIAKSEQEIGKATAKYFFYSNIMNFFKTEITLANGEIRKRPLIETNGETGEIVWDKGRDFATVRKVLSMPQVNIVKKTEVQTGGFSKESILPKRNSDKLIARKKDWDPKKYGGFDSPTVAYSVLVVAKVEKGKSKKLKSVKELLGITIMERSSFEKNPIDFLEAKGYKEVKKDLIIKLPKYSLFELENGRKRMLASAGELQKGNELALPSKYVNFLYLASHYEKLKGSPEDNEQKQLFVEQHKHYLDEIIEQISEFSKRVILADANLDKVLSAYNKHRDKPIREQAENIIHLFTLTNLGAPAAFKYFDTTIDRKRYTSTKEVLDATLIHQSITGLYETRIDLSQLGGDGGGGGEAAAKPAPGGTLQLEEEYRLFEPESTQKQEMDIWLKNFPQAWAETGGMGTAHCQAPVLIQLKATATPISIRQYPMPHEAYQGIKPHIRRMLDQGILKPCQSPWNTPLLPVKKPGTEDYRPVQDLREVNKRVEDIHPTVPNPYNLLSTLPPSHPWYTVLDLKDAFFCLRLHSESQLLFAFEWRDPEIGLSGQLTWTRLPQGFKNSPTLFNEALHSDLADFRVRYPALVLLQYVDDLLLAAATRTECLEGTKALLETLGNKGYRASAKKAQICLQEVTYLGYSLKDGQRWLTKARKEAILSIPVPKNSRQVREFLGTAGYCRLWIPGFAELAAPLYPLTRPGTLFQWGTEQQLAFEDIKKALLSSPALGLPDITKPFELFIDENSGFAKGVLVQKLGPWKRPVAYLSKKLDTVASGWPPCLRMVAAIAILVKDAGKLTLGQPLTILTSHPVEALVRQPPNKWLSNARMTHYQAMLLDAERVHFGPTVSLNPATLLPLPSGGNHHDCLQILAETHGTRPDLTDQPLPDADLTWYTDGSSFIRNGEREAGAAVTTESEVIWAAPLPPGTSAQRAELIALTQALKMAEGKKLTVYTDSRYAFATTHVHGEIYRRRGWLTSEGKEIKNKNEILALLEALFLPKRLSIIHCPGHQKGDSPQAKGNRLADDTAKKAATETHSSLTVLPAGKRTADGSEFEKRTADGSEFESPKKKAKVE

SEQ ID NO: 1180 - protein, 2094 aa, synthetic construct
MPAAKRVKLDGGDKKYSIGLDIGTNSVGWAVITDEYKVPSKKFKVLGNTDRHSIKKNLIGALLFDSGETAEATRLKRTARRRYTRRKNRICYLQEIFSNEMAKVDDSFFHRLEESFLVEEDKKHERHPIFGNIVDEVAYHEKYPTIYHLRKKLVDSTDKADLRLIYLALAHMIKFRGHFLIEGDLNPDNSDVDKLFIQLVQTYNQLFEENPINASGVDAKAILSARLSKSRRLENLIAQLPGEKKNGLFGNLIALSLGLTPNFKSNFDLAEDAKLQLSKDTYDDDLDNLLAQIGDQYADLFLAAKNLSDAILLSDILRVNTEITKAPLSASMIKRYDEHHQDLTLLKALVRQQLPEKYKEIFFDQSKNGYAGYIDGGASQEEFYKFIKPILEKMDGTEELLVKLNREDLLRKQRTFDNGSIPHQIHLGELHAILRRQEDFYPFLKDNREKIEKILTFRIPYYVGPLARGNSRFAWMTRKSEETITPWNFEEVVDKGASAQSFIERMTNFDKNLPNEKVLPKHSLLYEYFTVYNELTKVKYVTEGMRKPAFLSGEQKKAIVDLLFKTNRKVTVKQLKEDYFKKIECFDSVEISGVEDRFNASLGTYHDLLKIIKDKDFLDNEENEDILEDIVLTLTLFEDREMIEERLKTYAHLFDDKVMKQLKRRRYTGWGRLSRKLINGIRDKQSGKTILDFLKSDGFANRNFMQLIHDDSLTFKEDIQKAQVSGQGDSLHEHIANLAGSPAIKKGILQTVKVVDELVKVMGRHKPENIVIEMARENQTTQKGQKNSRERMKRIEEGIKELGSQILKEHPVENTQLQNEKLYLYYLQNGRDMYVDQELDINRLSDYDVDHIVPQSFLKDDSIDNKVLTRSDKARGKSDNVPSEEVVKKMKNYWRQLLNAKLITQRKFDNLTKAERGGLSELDKAGFIKRQLVETRQITKHVAQILDSRMNTKYDENDKLIREVKVITLKSKLVSDFRKDFQFYKVREINNYHHAHDAYLNAVVGTALIKKYPKLESEFVYGDYKVYDVRKMIAKSEQEIGKATAKYFFYSNIMNFFKTEITLANGEIRKRPLIETNGETGEIVWDKGRDFATVRKVLSMPQVNIVKKTEVQTGGFSKESILPKRNSDKLIARKKDWDPKKYGGFDSPTVAYSVLVVAKVEKGKSKKLKSVKELLGITIMERSSFEKNPIDFLEAKGYKEVKKDLIIKLPKYSLFELENGRKRMLASAGELQKGNELALPSKYVNFLYLASHYEKLKGSPEDNEQKQLFVEQHKHYLDEIIEQISEFSKRVILADANLDKVLSAYNKHRDKPIREQAENIIHLFTLTNLGAPAAFKYFDTTIDRKRYTSTKEVLDATLIHQSITGLYETRIDLSQLGGDGGGGGGSGGGGSGGTLQLEEEYRLFEPESTQKQEMDIWLKNFPQAWAETGGMGTAHCQAPVLIQLKATATPISIRQYPMPHEAYQGIKPHIRRMLDQGILKPCQSPWNTPLLPVKKPGTEDYRPVQDLREVNKRVEDIHPTVPNPYNLLSTLPPSHPWYTVLDLKDAFFCLRLHSESQLLFAFEWRDPEIGLSGQLTWTRLPQGFKNSPTLFNEALHSDLADFRVRYPALVLLQYVDDLLLAAATRTECLEGTKALLETLGNKGYRASAKKAQICLQEVTYLGYSLKDGQRWLTKARKEAILSIPVPKNSRQVREFLGTAGYCRLWIPGFAELAAPLYPLTRPGTLFQWGTEQQLAFEDIKKALLSSPALGLPDITKPFELFIDENSGFAKGVLVQKLGPWKRPVAYLSKKLDTVASGWPPCLRMVAAIAILVKDAGKLTLGQPLTILTSHPVEALVRQPPNKWLSNARMTHYQAMLLDAERVHFGPTVSLNPATLLPLPSGGNHHDCLQILAETHGTRPDLTDQPLPDADLTWYTDGSSFIRNGEREAGAAVTTESEVIWAAPLPPGTSAQRAELIALTQALKMAEGKKLTVYTDSRYAFATTHVHGEIYRRRGWLTSEGKEIKNKNEILALLEALFLPKRLSIIHCPGHQKGDSPQAKGNRLADDTAKKAATETHSSLTVLPAGKRTADGSEFEKRTADGSEFESPKKKAKVE

SEQ ID NO: 1181 - protein, 2091 aa, synthetic construct
MPAAKRVKLDGGDKKYSIGLDIGTNSVGWAVITDEYKVPSKKFKVLGNTDRHSIKKNLIGALLFDSGETAEATRLKRTARRRYTRRKNRICYLQEIFSNEMAKVDDSFFHRLEESFLVEEDKKHERHPIFGNIVDEVAYHEKYPTIYHLRKKLVDSTDKADLRLIYLALAHMIKFRGHFLIEGDLNPDNSDVDKLFIQLVQTYNQLFEENPINASGVDAKAILSARLSKSRRLENLIAQLPGEKKNGLFGNLIALSLGLTPNFKSNFDLAEDAKLQLSKDTYDDDLDNLLAQIGDQYADLFLAAKNLSDAILLSDILRVNTEITKAPLSASMIKRYDEHHQDLTLLKALVRQQLPEKYKEIFFDQSKNGYAGYIDGGASQEEFYKFIKPILEKMDGTEELLVKLNREDLLRKQRTFDNGSIPHQIHLGELHAILRRQEDFYPFLKDNREKIEKILTFRIPYYVGPLARGNSRFAWMTRKSEETITPWNFEEVVDKGASAQSFIERMTNFDKNLPNEKVLPKHSLLYEYFTVYNELTKVKYVTEGMRKPAFLSGEQKKAIVDLLFKTNRKVTVKQLKEDYFKKIECFDSVEISGVEDRFNASLGTYHDLLKIIKDKDFLDNEENEDILEDIVLTLTLFEDREMIEERLKTYAHLFDDKVMKQLKRRRYTGWGRLSRKLINGIRDKQSGKTILDFLKSDGFANRNFMQLIHDDSLTFKEDIQKAQVSGQGDSLHEHIANLAGSPAIKKGILQTVKVVDELVKVMGRHKPENIVIEMARENQTTQKGQKNSRERMKRIEEGIKELGSQILKEHPVENTQLQNEKLYLYYLQNGRDMYVDQELDINRLSDYDVDHIVPQSFLKDDSIDNKVLTRSDKARGKSDNVPSEEVVKKMKNYWRQLLNAKLITQRKFDNLTKAERGGLSELDKAGFIKRQLVETRQITKHVAQILDSRMNTKYDENDKLIREVKVITLKSKLVSDFRKDFQFYKVREINNYHHAHDAYLNAVVGTALIKKYPKLESEFVYGDYKVYDVRKMIAKSEQEIGKATAKYFFYSNIMNFFKTEITLANGEIRKRPLIETNGETGEIVWDKGRDFATVRKVLSMPQVNIVKKTEVQTGGFSKESILPKRNSDKLIARKKDWDPKKYGGFDSPTVAYSVLVVAKVEKGKSKKLKSVKELLGITIMERSSFEKNPIDFLEAKGYKEVKKDLIIKLPKYSLFELENGRKRMLASAGELQKGNELALPSKYVNFLYLASHYEKLKGSPEDNEQKQLFVEQHKHYLDEIIEQISEFSKRVILADANLDKVLSAYNKHRDKPIREQAENIIHLFTLTNLGAPAAFKYFDTTIDRKRYTSTKEVLDATLIHQSITGLYETRIDLSQLGGDGGGGGGGGGGGTLQLEEEYRLFEPESTQKQEMDIWLKNFPQAWAETGGMGTAHCQAPVLIQLKATATPISIRQYPMPHEAYQGIKPHIRRMLDQGILKPCQSPWNTPLLPVKKPGTEDYRPVQDLREVNKRVEDIHPTVPNPYNLLSTLPPSHPWYTVLDLKDAFFCLRLHSESQLLFAFEWRDPEIGLSGQLTWTRLPQGFKNSPTLFNEALHSDLADFRVRYPALVLLQYVDDLLLAAATRTECLEGTKALLETLGNKGYRASAKKAQICLQEVTYLGYSLKDGQRWLTKARKEAILSIPVPKNSRQVREFLGTAGYCRLWIPGFAELAAPLYPLTRPGTLFQWGTEQQLAFEDIKKALLSSPALGLPDITKPFELFIDENSGFAKGVLVQKLGPWKRPVAYLSKKLDTVASGWPPCLRMVAAIAILVKDAGKLTLGQPLTILTSHPVEALVRQPPNKWLSNARMTHYQAMLLDAERVHFGPTVSLNPATLLPLPSGGNHHDCLQILAETHGTRPDLTDQPLPDADLTWYTDGSSFIRNGEREAGAAVTTESEVIWAAPLPPGTSAQRAELIALTQALKMAEGKKLTVYTDSRYAFATTHVHGEIYRRRGWLTSEGKEIKNKNEILALLEALFLPKRLSIIHCPGHQKGDSPQAKGNRLADDTAKKAATETHSSLTVLPAGKRTADGSEFEKRTADGSEFESPKKKAKVE

SEQ ID NO: 1182 - protein, 2093 aa, synthetic construct
MPAAKRVKLDGGDKKYSIGLDIGTNSVGWAVITDEYKVPSKKFKVLGNTDRHSIKKNLIGALLFDSGETAEATRLKRTARRRYTRRKNRICYLQEIFSNEMAKVDDSFFHRLEESFLVEEDKKHERHPIFGNIVDEVAYHEKYPTIYHLRKKLVDSTDKADLRLIYLALAHMIKFRGHFLIEGDLNPDNSDVDKLFIQLVQTYNQLFEENPINASGVDAKAILSARLSKSRRLENLIAQLPGEKKNGLFGNLIALSLGLTPNFKSNFDLAEDAKLQLSKDTYDDDLDNLLAQIGDQYADLFLAAKNLSDAILLSDILRVNTEITKAPLSASMIKRYDEHHQDLTLLKALVRQQLPEKYKEIFFDQSKNGYAGYIDGGASQEEFYKFIKPILEKMDGTEELLVKLNREDLLRKQRTFDNGSIPHQIHLGELHAILRRQEDFYPFLKDNREKIEKILTFRIPYYVGPLARGNSRFAWMTRKSEETITPWNFEEVVDKGASAQSFIERMTNFDKNLPNEKVLPKHSLLYEYFTVYNELTKVKYVTEGMRKPAFLSGEQKKAIVDLLFKTNRKVTVKQLKEDYFKKIECFDSVEISGVEDRFNASLGTYHDLLKIIKDKDFLDNEENEDILEDIVLTLTLFEDREMIEERLKTYAHLFDDKVMKQLKRRRYTGWGRLSRKLINGIRDKQSGKTILDFLKSDGFANRNFMQLIHDDSLTFKEDIQKAQVSGQGDSLHEHIANLAGSPAIKKGILQTVKVVDELVKVMGRHKPENIVIEMARENQTTQKGQKNSRERMKRIEEGIKELGSQILKEHPVENTQLQNEKLYLYYLQNGRDMYVDQELDINRLSDYDVDHIVPQSFLKDDSIDNKVLTRSDKARGKSDNVPSEEVVKKMKNYWRQLLNAKLITQRKFDNLTKAERGGLSELDKAGFIKRQLVETRQITKHVAQILDSRMNTKYDENDKLIREVKVITLKSKLVSDFRKDFQFYKVREINNYHHAHDAYLNAVVGTALIKKYPKLESEFVYGDYKVYDVRKMIAKSEQEIGKATAKYFFYSNIMNFFKTEITLANGEIRKRPLIETNGETGEIVWDKGRDFATVRKVLSMPQVNIVKKTEVQTGGFSKESILPKRNSDKLIARKKDWDPKKYGGFDSPTVAYSVLVVAKVEKGKSKKLKSVKELLGITIMERSSFEKNPIDFLEAKGYKEVKKDLIIKLPKYSLFELENGRKRMLASAGELQKGNELALPSKYVNFLYLASHYEKLKGSPEDNEQKQLFVEQHKHYLDEIIEQISEFSKRVILADANLDKVLSAYNKHRDKPIREQAENIIHLFTLTNLGAPAAFKYFDTTIDRKRYTSTKEVLDATLIHQSITGLYETRIDLSQLGGDGGGGGPAPGGSGGTLQLEEEYRLFEPESTQKQEMDIWLKNFPQAWAETGGMGTAHCQAPVLIQLKATATPISIRQYPMPHEAYQGIKPHIRRMLDQGILKPCQSPWNTPLLPVKKPGTEDYRPVQDLREVNKRVEDIHPTVPNPYNLLSTLPPSHPWYTVLDLKDAFFCLRLHSESQLLFAFEWRDPEIGLSGQLTWTRLPQGFKNSPTLFNEALHSDLADFRVRYPALVLLQYVDDLLLAAATRTECLEGTKALLETLGNKGYRASAKKAQICLQEVTYLGYSLKDGQRWLTKARKEAILSIPVPKNSRQVREFLGTAGYCRLWIPGFAELAAPLYPLTRPGTLFQWGTEQQLAFEDIKKALLSSPALGLPDITKPFELFIDENSGFAKGVLVQKLGPWKRPVAYLSKKLDTVASGWPPCLRMVAAIAILVKDAGKLTLGQPLTILTSHPVEALVRQPPNKWLSNARMTHYQAMLLDAERVHFGPTVSLNPATLLPLPSGGNHHDCLQILAETHGTRPDLTDQPLPDADLTWYTDGSSFIRNGEREAGAAVTTESEVIWAAPLPPGTSAQRAELIALTQALKMAEGKKLTVYTDSRYAFATTHVHGEIYRRRGWLTSEGKEIKNKNEILALLEALFLPKRLSIIHCPGHQKGDSPQAKGNRLADDTAKKAATETHSSLTVLPAGKRTADGSEFEKRTADGSEFESPKKKAKVE

SEQ ID NO: 1183 - protein, 2089 aa, synthetic construct
MPAAKRVKLDGGDKKYSIGLDIGTNSVGWAVITDEYKVPSKKFKVLGNTDRHSIKKNLIGALLFDSGETAEATRLKRTARRRYTRRKNRICYLQEIFSNEMAKVDDSFFHRLEESFLVEEDKKHERHPIFGNIVDEVAYHEKYPTIYHLRKKLVDSTDKADLRLIYLALAHMIKFRGHFLIEGDLNPDNSDVDKLFIQLVQTYNQLFEENPINASGVDAKAILSARLSKSRRLENLIAQLPGEKKNGLFGNLIALSLGLTPNFKSNFDLAEDAKLQLSKDTYDDDLDNLLAQIGDQYADLFLAAKNLSDAILLSDILRVNTEITKAPLSASMIKRYDEHHQDLTLLKALVRQQLPEKYKEIFFDQSKNGYAGYIDGGASQEEFYKFIKPILEKMDGTEELLVKLNREDLLRKQRTFDNGSIPHQIHLGELHAILRRQEDFYPFLKDNREKIEKILTFRIPYYVGPLARGNSRFAWMTRKSEETITPWNFEEVVDKGASAQSFIERMTNFDKNLPNEKVLPKHSLLYEYFTVYNELTKVKYVTEGMRKPAFLSGEQKKAIVDLLFKTNRKVTVKQLKEDYFKKIECFDSVEISGVEDRFNASLGTYHDLLKIIKDKDFLDNEENEDILEDIVLTLTLFEDREMIEERLKTYAHLFDDKVMKQLKRRRYTGWGRLSRKLINGIRDKQSGKTILDFLKSDGFANRNFMQLIHDDSLTFKEDIQKAQVSGQGDSLHEHIANLAGSPAIKKGILQTVKVVDELVKVMGRHKPENIVIEMARENQTTQKGQKNSRERMKRIEEGIKELGSQILKEHPVENTQLQNEKLYLYYLQNGRDMYVDQELDINRLSDYDVDHIVPQSFLKDDSIDNKVLTRSDKARGKSDNVPSEEVVKKMKNYWRQLLNAKLITQRKFDNLTKAERGGLSELDKAGFIKRQLVETRQITKHVAQILDSRMNTKYDENDKLIREVKVITLKSKLVSDFRKDFQFYKVREINNYHHAHDAYLNAVVGTALIKKYPKLESEFVYGDYKVYDVRKMIAKSEQEIGKATAKYFFYSNIMNFFKTEITLANGEIRKRPLIETNGETGEIVWDKGRDFATVRKVLSMPQVNIVKKTEVQTGGFSKESILPKRNSDKLIARKKDWDPKKYGGFDSPTVAYSVLVVAKVEKGKSKKLKSVKELLGITIMERSSFEKNPIDFLEAKGYKEVKKDLIIKLPKYSLFELENGRKRMLASAGELQKGNELALPSKYVNFLYLASHYEKLKGSPEDNEQKQLFVEQHKHYLDEIIEQISEFSKRVILADANLDKVLSAYNKHRDKPIREQAENIIHLFTLTNLGAPAAFKYFDTTIDRKRYTSTKEVLDATLIHQSITGLYETRIDLSQLGGDGGEAAAKGGTLQLEEEYRLFEPESTQKQEMDIWLKNFPQAWAETGGMGTAHCQAPVLIQLKATATPISIRQYPMPHEAYQGIKPHIRRMLDQGILKPCQSPWNTPLLPVKKPGTEDYRPVQDLREVNKRVEDIHPTVPNPYNLLSTLPPSHPWYTVLDLKDAFFCLRLHSESQLLFAFEWRDPEIGLSGQLTWTRLPQGFKNSPTLFNEALHSDLADFRVRYPALVLLQYVDDLLLAAATRTECLEGTKALLETLGNKGYRASAKKAQICLQEVTYLGYSLKDGQRWLTKARKEAILSIPVPKNSRQVREFLGTAGYCRLWIPGFAELAAPLYPLTRPGTLFQWGTEQQLAFEDIKKALLSSPALGLPDITKPFELFIDENSGFAKGVLVQKLGPWKRPVAYLSKKLDTVASGWPPCLRMVAAIAILVKDAGKLTLGQPLTILTSHPVEALVRQPPNKWLSNARMTHYQAMLLDAERVHFGPTVSLNPATLLPLPSGGNHHDCLQILAETHGTRPDLTDQPLPDADLTWYTDGSSFIRNGEREAGAAVTTESEVIWAAPLPPGTSAQRAELIALTQALKMAEGKKLTVYTDSRYAFATTHVHGEIYRRRGWLTSEGKEIKNKNEILALLEALFLPKRLSIIHCPGHQKGDSPQAKGNRLADDTAKKAATETHSSLTVLPAGKRTADGSEFEKRTADGSEFESPKKKAKVE

SEQ ID NO: 1184 - protein, 2090 aa, synthetic construct
MPAAKRVKLDGGDKKYSIGLDIGTNSVGWAVITDEYKVPSKKFKVLGNTDRHSIKKNLIGALLFDSGETAEATRLKRTARRRYTRRKNRICYLQEIFSNEMAKVDDSFFHRLEESFLVEEDKKHERHPIFGNIVDEVAYHEKYPTIYHLRKKLVDSTDKADLRLIYLALAHMIKFRGHFLIEGDLNPDNSDVDKLFIQLVQTYNQLFEENPINASGVDAKAILSARLSKSRRLENLIAQLPGEKKNGLFGNLIALSLGLTPNFKSNFDLAEDAKLQLSKDTYDDDLDNLLAQIGDQYADLFLAAKNLSDAILLSDILRVNTEITKAPLSASMIKRYDEHHQDLTLLKALVRQQLPEKYKEIFFDQSKNGYAGYIDGGASQEEFYKFIKPILEKMDGTEELLVKLNREDLLRKQRTFDNGSIPHQIHLGELHAILRRQEDFYPFLKDNREKIEKILTFRIPYYVGPLARGNSRFAWMTRKSEETITPWNFEEVVDKGASAQSFIERMTNFDKNLPNEKVLPKHSLLYEYFTVYNELTKVKYVTEGMRKPAFLSGEQKKAIVDLLFKTNRKVTVKQLKEDYFKKIECFDSVEISGVEDRFNASLGTYHDLLKIIKDKDFLDNEENEDILEDIVLTLTLFEDREMIEERLKTYAHLFDDKVMKQLKRRRYTGWGRLSRKLINGIRDKQSGKTILDFLKSDGFANRNFMQLIHDDSLTFKEDIQKAQVSGQGDSLHEHIANLAGSPAIKKGILQTVKVVDELVKVMGRHKPENIVIEMARENQTTQKGQKNSRERMKRIEEGIKELGSQILKEHPVENTQLQNEKLYLYYLQNGRDMYVDQELDINRLSDYDVDHIVPQSFLKDDSIDNKVLTRSDKARGKSDNVPSEEVVKKMKNYWRQLLNAKLITQRKFDNLTKAERGGLSELDKAGFIKRQLVETRQITKHVAQILDSRMNTKYDENDKLIREVKVITLKSKLVSDFRKDFQFYKVREINNYHHAHDAYLNAVVGTALIKKYPKLESEFVYGDYKVYDVRKMIAKSEQEIGKATAKYFFYSNIMNFFKTEITLANGEIRKRPLIETNGETGEIVWDKGRDFATVRKVLSMPQVNIVKKTEVQTGGFSKESILPKRNSDKLIARKKDWDPKKYGGFDSPTVAYSVLVVAKVEKGKSKKLKSVKELLGITIMERSSFEKNPIDFLEAKGYKEVKKDLIIKLPKYSLFELENGRKRMLASAGELQKGNELALPSKYVNFLYLASHYEKLKGSPEDNEQKQLFVEQHKHYLDEIIEQISEFSKRVILADANLDKVLSAYNKHRDKPIREQAENIIHLFTLTNLGAPAAFKYFDTTIDRKRYTSTKEVLDATLIHQSITGLYETRIDLSQLGGDGGGGSGGGGGTLQLEEEYRLFEPESTQKQEMDIWLKNFPQAWAETGGMGTAHCQAPVLIQLKATATPISIRQYPMPHEAYQGIKPHIRRMLDQGILKPCQSPWNTPLLPVKKPGTEDYRPVQDLREVNKRVEDIHPTVPNPYNLLSTLPPSHPWYTVLDLKDAFFCLRLHSESQLLFAFEWRDPEIGLSGQLTWTRLPQGFKNSPTLFNEALHSDLADFRVRYPALVLLQYVDDLLLAAATRTECLEGTKALLETLGNKGYRASAKKAQICLQEVTYLGYSLKDGQRWLTKARKEAILSIPVPKNSRQVREFLGTAGYCRLWIPGFAELAAPLYPLTRPGTLFQWGTEQQLAFEDIKKALLSSPALGLPDITKPFELFIDENSGFAKGVLVQKLGPWKRPVAYLSKKLDTVASGWPPCLRMVAAIAILVKDAGKLTLGQPLTILTSHPVEALVRQPPNKWLSNARMTHYQAMLLDAERVHFGPTVSLNPATLLPLPSGGNHHDCLQILAETHGTRPDLTDQPLPDADLTWYTDGSSFIRNGEREAGAAVTTESEVIWAAPLPPGTSAQRAELIALTQALKMAEGKKLTVYTDSRYAFATTHVHGEIYRRRGWLTSEGKEIKNKNEILALLEALFLPKRLSIIHCPGHQKGDSPQAKGNRLADDTAKKAATETHSSLTVLPAGKRTADGSEFEKRTADGSEFESPKKKAKVE

SEQ ID NO: 1185 - protein, 2095 aa, synthetic construct
MPAAKRVKLDGGDKKYSIGLDIGTNSVGWAVITDEYKVPSKKFKVLGNTDRHSIKKNLIGALLFDSGETAEATRLKRTARRRYTRRKNRICYLQEIFSNEMAKVDDSFFHRLEESFLVEEDKKHERHPIFGNIVDEVAYHEKYPTIYHLRKKLVDSTDKADLRLIYLALAHMIKFRGHFLIEGDLNPDNSDVDKLFIQLVQTYNQLFEENPINASGVDAKAILSARLSKSRRLENLIAQLPGEKKNGLFGNLIALSLGLTPNFKSNFDLAEDAKLQLSKDTYDDDLDNLLAQIGDQYADLFLAAKNLSDAILLSDILRVNTEITKAPLSASMIKRYDEHHQDLTLLKALVRQQLPEKYKEIFFDQSKNGYAGYIDGGASQEEFYKFIKPILEKMDGTEELLVKLNREDLLRKQRTFDNGSIPHQIHLGELHAILRRQEDFYPFLKDNREKIEKILTFRIPYYVGPLARGNSRFAWMTRKSEETITPWNFEEVVDKGASAQSFIERMTNFDKNLPNEKVLPKHSLLYEYFTVYNELTKVKYVTEGMRKPAFLSGEQKKAIVDLLFKTNRKVTVKQLKEDYFKKIECFDSVEISGVEDRFNASLGTYHDLLKIIKDKDFLDNEENEDILEDIVLTLTLFEDREMIEERLKTYAHLFDDKVMKQLKRRRYTGWGRLSRKLINGIRDKQSGKTILDFLKSDGFANRNFMQLIHDDSLTFKEDIQKAQVSGQGDSLHEHIANLAGSPAIKKGILQTVKVVDELVKVMGRHKPENIVIEMARENQTTQKGQKNSRERMKRIEEGIKELGSQILKEHPVENTQLQNEKLYLYYLQNGRDMYVDQELDINRLSDYDVDHIVPQSFLKDDSIDNKVLTRSDKARGKSDNVPSEEVVKKMKNYWRQLLNAKLITQRKFDNLTKAERGGLSELDKAGFIKRQLVETRQITKHVAQILDSRMNTKYDENDKLIREVKVITLKSKLVSDFRKDFQFYKVREINNYHHAHDAYLNAVVGTALIKKYPKLESEFVYGDYKVYDVRKMIAKSEQEIGKATAKYFFYSNIMNFFKTEITLANGEIRKRPLIETNGETGEIVWDKGRDFATVRKVLSMPQVNIVKKTEVQTGGFSKESILPKRNSDKLIARKKDWDPKKYGGFDSPTVAYSVLVVAKVEKGKSKKLKSVKELLGITIMERSSFEKNPIDFLEAKGYKEVKKDLIIKLPKYSLFELENGRKRMLASAGELQKGNELALPSKYVNFLYLASHYEKLKGSPEDNEQKQLFVEQHKHYLDEIIEQISEFSKRVILADANLDKVLSAYNKHRDKPIREQAENIIHLFTLTNLGAPAAFKYFDTTIDRKRYTSTKEVLDATLIHQSITGLYETRIDLSQLGGDGGEAAAKPAPGGGGGTLQLEEEYRLFEPESTQKQEMDIWLKNFPQAWAETGGMGTAHCQAPVLIQLKATATPISIRQYPMPHEAYQGIKPHIRRMLDQGILKPCQSPWNTPLLPVKKPGTEDYRPVQDLREVNKRVEDIHPTVPNPYNLLSTLPPSHPWYTVLDLKDAFFCLRLHSESQLLFAFEWRDPEIGLSGQLTWTRLPQGFKNSPTLFNEALHSDLADFRVRYPALVLLQYVDDLLLAAATRTECLEGTKALLETLGNKGYRASAKKAQICLQEVTYLGYSLKDGQRWLTKARKEAILSIPVPKNSRQVREFLGTAGYCRLWIPGFAELAAPLYPLTRPGTLFQWGTEQQLAFEDIKKALLSSPALGLPDITKPFELFIDENSGFAKGVLVQKLGPWKRPVAYLSKKLDTVASGWPPCLRMVAAIAILVKDAGKLTLGQPLTILTSHPVEALVRQPPNKWLSNARMTHYQAMLLDAERVHFGPTVSLNPATLLPLPSGGNHHDCLQILAETHGTRPDLTDQPLPDADLTWYTDGSSFIRNGEREAGAAVTTESEVIWAAPLPPGTSAQRAELIALTQALKMAEGKKLTVYTDSRYAFATTHVHGEIYRRRGWLTSEGKEIKNKNEILALLEALFLPKRLSIIHCPGHQKGDSPQAKGNRLADDTAKKAATETHSSLTVLPAGKRTADGSEFEKRTADGSEFESPKKKAKVE

SEQ ID NO: 1186 - protein, 2095 aa, synthetic construct
MPAAKRVKLDGGDKKYSIGLDIGTNSVGWAVITDEYKVPSKKFKVLGNTDRHSIKKNLIGALLFDSGETAEATRLKRTARRRYTRRKNRICYLQEIFSNEMAKVDDSFFHRLEESFLVEEDKKHERHPIFGNIVDEVAYHEKYPTIYHLRKKLVDSTDKADLRLIYLALAHMIKFRGHFLIEGDLNPDNSDVDKLFIQLVQTYNQLFEENPINASGVDAKAILSARLSKSRRLENLIAQLPGEKKNGLFGNLIALSLGLTPNFKSNFDLAEDAKLQLSKDTYDDDLDNLLAQIGDQYADLFLAAKNLSDAILLSDILRVNTEITKAPLSASMIKRYDEHHQDLTLLKALVRQQLPEKYKEIFFDQSKNGYAGYIDGGASQEEFYKFIKPILEKMDGTEELLVKLNREDLLRKQRTFDNGSIPHQIHLGELHAILRRQEDFYPFLKDNREKIEKILTFRIPYYVGPLARGNSRFAWMTRKSEETITPWNFEEVVDKGASAQSFIERMTNFDKNLPNEKVLPKHSLLYEYFTVYNELTKVKYVTEGMRKPAFLSGEQKKAIVDLLFKTNRKVTVKQLKEDYFKKIECFDSVEISGVEDRFNASLGTYHDLLKIIKDKDFLDNEENEDILEDIVLTLTLFEDREMIEERLKTYAHLFDDKVMKQLKRRRYTGWGRLSRKLINGIRDKQSGKTILDFLKSDGFANRNFMQLIHDDSLTFKEDIQKAQVSGQGDSLHEHIANLAGSPAIKKGILQTVKVVDELVKVMGRHKPENIVIEMARENQTTQKGQKNSRERMKRIEEGIKELGSQILKEHPVENTQLQNEKLYLYYLQNGRDMYVDQELDINRLSDYDVDHIVPQSFLKDDSIDNKVLTRSDKARGKSDNVPSEEVVKKMKNYWRQLLNAKLITQRKFDNLTKAERGGLSELDKAGFIKRQLVETRQITKHVAQILDSRMNTKYDENDKLIREVKVITLKSKLVSDFRKDFQFYKVREINNYHHAHDAYLNAVVGTALIKKYPKLESEFVYGDYKVYDVRKMIAKSEQEIGKATAKYFFYSNIMNFFKTEITLANGEIRKRPLIETNGETGEIVWDKGRDFATVRKVLSMPQVNIVKKTEVQTGGFSKESILPKRNSDKLIARKKDWDPKKYGGFDSPTVAYSVLVVAKVEKGKSKKLKSVKELLGITIMERSSFEKNPIDFLEAKGYKEVKKDLIIKLPKYSLFELENGRKRMLASAGELQKGNELALPSKYVNFLYLASHYEKLKGSPEDNEQKQLFVEQHKHYLDEIIEQISEFSKRVILADANLDKVLSAYNKHRDKPIREQAENIIHLFTLTNLGAPAAFKYFDTTIDRKRYTSTKEVLDATLIHQSITGLYETRIDLSQLGGDGGGGGPAPEAAAKGGTLQLEEEYRLFEPESTQKQEMDIWLKNFPQAWAETGGMGTAHCQAPVLIQLKATATPISIRQYPMPHEAYQGIKPHIRRMLDQGILKPCQSPWNTPLLPVKKPGTEDYRPVQDLREVNKRVEDIHPTVPNPYNLLSTLPPSHPWYTVLDLKDAFFCLRLHSESQLLFAFEWRDPEIGLSGQLTWTRLPQGFKNSPTLFNEALHSDLADFRVRYPALVLLQYVDDLLLAAATRTECLEGTKALLETLGNKGYRASAKKAQICLQEVTYLGYSLKDGQRWLTKARKEAILSIPVPKNSRQVREFLGTAGYCRLWIPGFAELAAPLYPLTRPGTLFQWGTEQQLAFEDIKKALLSSPALGLPDITKPFELFIDENSGFAKGVLVQKLGPWKRPVAYLSKKLDTVASGWPPCLRMVAAIAILVKDAGKLTLGQPLTILTSHPVEALVRQPPNKWLSNARMTHYQAMLLDAERVHFGPTVSLNPATLLPLPSGGNHHDCLQILAETHGTRPDLTDQPLPDADLTWYTDGSSFIRNGEREAGAAVTTESEVIWAAPLPPGTSAQRAELIALTQALKMAEGKKLTVYTDSRYAFATTHVHGEIYRRRGWLTSEGKEIKNKNEILALLEALFLPKRLSIIHCPGHQKGDSPQAKGNRLADDTAKKAATETHSSLTVLPAGKRTADGSEFEKRTADGSEFESPKKKAKVE

SEQ ID NO: 1187 - protein, 2095 aa, synthetic construct
MPAAKRVKLDGGDKKYSIGLDIGTNSVGWAVITDEYKVPSKKFKVLGNTDRHSIKKNLIGALLFDSGETAEATRLKRTARRRYTRRKNRICYLQEIFSNEMAKVDDSFFHRLEESFLVEEDKKHERHPIFGNIVDEVAYHEKYPTIYHLRKKLVDSTDKADLRLIYLALAHMIKFRGHFLIEGDLNPDNSDVDKLFIQLVQTYNQLFEENPINASGVDAKAILSARLSKSRRLENLIAQLPGEKKNGLFGNLIALSLGLTPNFKSNFDLAEDAKLQLSKDTYDDDLDNLLAQIGDQYADLFLAAKNLSDAILLSDILRVNTEITKAPLSASMIKRYDEHHQDLTLLKALVRQQLPEKYKEIFFDQSKNGYAGYIDGGASQEEFYKFIKPILEKMDGTEELLVKLNREDLLRKQRTFDNGSIPHQIHLGELHAILRRQEDFYPFLKDNREKIEKILTFRIPYYVGPLARGNSRFAWMTRKSEETITPWNFEEVVDKGASAQSFIERMTNFDKNLPNEKVLPKHSLLYEYFTVYNELTKVKYVTEGMRKPAFLSGEQKKAIVDLLFKTNRKVTVKQLKEDYFKKIECFDSVEISGVEDRFNASLGTYHDLLKIIKDKDFLDNEENEDILEDIVLTLTLFEDREMIEERLKTYAHLFDDKVMKQLKRRRYTGWGRLSRKLINGIRDKQSGKTILDFLKSDGFANRNFMQLIHDDSLTFKEDIQKAQVSGQGDSLHEHIANLAGSPAIKKGILQTVKVVDELVKVMGRHKPENIVIEMARENQTTQKGQKNSRERMKRIEEGIKELGSQILKEHPVENTQLQNEKLYLYYLQNGRDMYVDQELDINRLSDYDVDHIVPQSFLKDDSIDNKVLTRSDKARGKSDNVPSEEVVKKMKNYWRQLLNAKLITQRKFDNLTKAERGGLSELDKAGFIKRQLVETRQITKHVAQILDSRMNTKYDENDKLIREVKVITLKSKLVSDFRKDFQFYKVREINNYHHAHDAYLNAVVGTALIKKYPKLESEFVYGDYKVYDVRKMIAKSEQEIGKATAKYFFYSNIMNFFKTEITLANGEIRKRPLIETNGETGEIVWDKGRDFATVRKVLSMPQVNIVKKTEVQTGGFSKESILPKRNSDKLIARKKDWDPKKYGGFDSPTVAYSVLVVAKVEKGKSKKLKSVKELLGITIMERSSFEKNPIDFLEAKGYKEVKKDLIIKLPKYSLFELENGRKRMLASAGELQKGNELALPSKYVNFLYLASHYEKLKGSPEDNEQKQLFVEQHKHYLDEIIEQISEFSKRVILADANLDKVLSAYNKHRDKPIREQAENIIHLFTLTNLGAPAAFKYFDTTIDRKRYTSTKEVLDATLIHQSITGLYETRIDLSQLGGDGGGGGGGSEAAAKGGTLQLEEEYRLFEPESTQKQEMDIWLKNFPQAWAETGGMGTAHCQAPVLIQLKATATPISIRQYPMPHEAYQGIKPHIRRMLDQGILKPCQSPWNTPLLPVKKPGTEDYRPVQDLREVNKRVEDIHPTVPNPYNLLSTLPPSHPWYTVLDLKDAFFCLRLHSESQLLFAFEWRDPEIGLSGQLTWTRLPQGFKNSPTLFNEALHSDLADFRVRYPALVLLQYVDDLLLAAATRTECLEGTKALLETLGNKGYRASAKKAQICLQEVTYLGYSLKDGQRWLTKARKEAILSIPVPKNSRQVREFLGTAGYCRLWIPGFAELAAPLYPLTRPGTLFQWGTEQQLAFEDIKKALLSSPALGLPDITKPFELFIDENSGFAKGVLVQKLGPWKRPVAYLSKKLDTVASGWPPCLRMVAAIAILVKDAGKLTLGQPLTILTSHPVEALVRQPPNKWLSNARMTHYQAMLLDAERVHFGPTVSLNPATLLPLPSGGNHHDCLQILAETHGTRPDLTDQPLPDADLTWYTDGSSFIRNGEREAGAAVTTESEVIWAAPLPPGTSAQRAELIALTQALKMAEGKKLTVYTDSRYAFATTHVHGEIYRRRGWLTSEGKEIKNKNEILALLEALFLPKRLSIIHCPGHQKGDSPQAKGNRLADDTAKKAATETHSSLTVLPAGKRTADGSEFEKRTADGSEFESPKKKAKVE

SEQ ID NO: 1188 - protein, 2090 aa, synthetic construct
MPAAKRVKLDGGDKKYSIGLDIGTNSVGWAVITDEYKVPSKKFKVLGNTDRHSIKKNLIGALLFDSGETAEATRLKRTARRRYTRRKNRICYLQEIFSNEMAKVDDSFFHRLEESFLVEEDKKHERHPIFGNIVDEVAYHEKYPTIYHLRKKLVDSTDKADLRLIYLALAHMIKFRGHFLIEGDLNPDNSDVDKLFIQLVQTYNQLFEENPINASGVDAKAILSARLSKSRRLENLIAQLPGEKKNGLFGNLIALSLGLTPNFKSNFDLAEDAKLQLSKDTYDDDLDNLLAQIGDQYADLFLAAKNLSDAILLSDILRVNTEITKAPLSASMIKRYDEHHQDLTLLKALVRQQLPEKYKEIFFDQSKNGYAGYIDGGASQEEFYKFIKPILEKMDGTEELLVKLNREDLLRKQRTFDNGSIPHQIHLGELHAILRRQEDFYPFLKDNREKIEKILTFRIPYYVGPLARGNSRFAWMTRKSEETITPWNFEEVVDKGASAQSFIERMTNFDKNLPNEKVLPKHSLLYEYFTVYNELTKVKYVTEGMRKPAFLSGEQKKAIVDLLFKTNRKVTVKQLKEDYFKKIECFDSVEISGVEDRFNASLGTYHDLLKIIKDKDFLDNEENEDILEDIVLTLTLFEDREMIEERLKTYAHLFDDKVMKQLKRRRYTGWGRLSRKLINGIRDKQSGKTILDFLKSDGFANRNFMQLIHDDSLTFKEDIQKAQVSGQGDSLHEHIANLAGSPAIKKGILQTVKVVDELVKVMGRHKPENIVIEMARENQTTQKGQKNSRERMKRIEEGIKELGSQILKEHPVENTQLQNEKLYLYYLQNGRDMYVDQELDINRLSDYDVDHIVPQSFLKDDSIDNKVLTRSDKARGKSDNVPSEEVVKKMKNYWRQLLNAKLITQRKFDNLTKAERGGLSELDKAGFIKRQLVETRQITKHVAQILDSRMNTKYDENDKLIREVKVITLKSKLVSDFRKDFQFYKVREINNYHHAHDAYLNAVVGTALIKKYPKLESEFVYGDYKVYDVRKMIAKSEQEIGKATAKYFFYSNIMNFFKTEITLANGEIRKRPLIETNGETGEIVWDKGRDFATVRKVLSMPQVNIVKKTEVQTGGFSKESILPKRNSDKLIARKKDWDPKKYGGFDSPTVAYSVLVVAKVEKGKSKKLKSVKELLGITIMERSSFEKNPIDFLEAKGYKEVKKDLIIKLPKYSLFELENGRKRMLASAGELQKGNELALPSKYVNFLYLASHYEKLKGSPEDNEQKQLFVEQHKHYLDEIIEQISEFSKRVILADANLDKVLSAYNKHRDKPIREQAENIIHLFTLTNLGAPAAFKYFDTTIDRKRYTSTKEVLDATLIHQSITGLYETRIDLSQLGGDGGGGGGGGGGTLQLEEEYRLFEPESTQKQEMDIWLKNFPQAWAETGGMGTAHCQAPVLIQLKATATPISIRQYPMPHEAYQGIKPHIRRMLDQGILKPCQSPWNTPLLPVKKPGTEDYRPVQDLREVNKRVEDIHPTVPNPYNLLSTLPPSHPWYTVLDLKDAFFCLRLHSESQLLFAFEWRDPEIGLSGQLTWTRLPQGFKNSPTLFNEALHSDLADFRVRYPALVLLQYVDDLLLAAATRTECLEGTKALLETLGNKGYRASAKKAQICLQEVTYLGYSLKDGQRWLTKARKEAILSIPVPKNSRQVREFLGTAGYCRLWIPGFAELAAPLYPLTRPGTLFQWGTEQQLAFEDIKKALLSSPALGLPDITKPFELFIDENSGFAKGVLVQKLGPWKRPVAYLSKKLDTVASGWPPCLRMVAAIAILVKDAGKLTLGQPLTILTSHPVEALVRQPPNKWLSNARMTHYQAMLLDAERVHFGPTVSLNPATLLPLPSGGNHHDCLQILAETHGTRPDLTDQPLPDADLTWYTDGSSFIRNGEREAGAAVTTESEVIWAAPLPPGTSAQRAELIALTQALKMAEGKKLTVYTDSRYAFATTHVHGEIYRRRGWLTSEGKEIKNKNEILALLEALFLPKRLSIIHCPGHQKGDSPQAKGNRLADDTAKKAATETHSSLTVLPAGKRTADGSEFEKRTADGSEFESPKKKAKVE

SEQ ID NO: 1189 - protein, 2093 aa, synthetic construct
MPAAKRVKLDGGDKKYSIGLDIGTNSVGWAVITDEYKVPSKKFKVLGNTDRHSIKKNLIGALLFDSGETAEATRLKRTARRRYTRRKNRICYLQEIFSNEMAKVDDSFFHRLEESFLVEEDKKHERHPIFGNIVDEVAYHEKYPTIYHLRKKLVDSTDKADLRLIYLALAHMIKFRGHFLIEGDLNPDNSDVDKLFIQLVQTYNQLFEENPINASGVDAKAILSARLSKSRRLENLIAQLPGEKKNGLFGNLIALSLGLTPNFKSNFDLAEDAKLQLSKDTYDDDLDNLLAQIGDQYADLFLAAKNLSDAILLSDILRVNTEITKAPLSASMIKRYDEHHQDLTLLKALVRQQLPEKYKEIFFDQSKNGYAGYIDGGASQEEFYKFIKPILEKMDGTEELLVKLNREDLLRKQRTFDNGSIPHQIHLGELHAILRRQEDFYPFLKDNREKIEKILTFRIPYYVGPLARGNSRFAWMTRKSEETITPWNFEEVVDKGASAQSFIERMTNFDKNLPNEKVLPKHSLLYEYFTVYNELTKVKYVTEGMRKPAFLSGEQKKAIVDLLFKTNRKVTVKQLKEDYFKKIECFDSVEISGVEDRFNASLGTYHDLLKIIKDKDFLDNEENEDILEDIVLTLTLFEDREMIEERLKTYAHLFDDKVMKQLKRRRYTGWGRLSRKLINGIRDKQSGKTILDFLKSDGFANRNFMQLIHDDSLTFKEDIQKAQVSGQGDSLHEHIANLAGSPAIKKGILQTVKVVDELVKVMGRHKPENIVIEMARENQTTQKGQKNSRERMKRIEEGIKELGSQILKEHPVENTQLQNEKLYLYYLQNGRDMYVDQELDINRLSDYDVDHIVPQSFLKDDSIDNKVLTRSDKARGKSDNVPSEEVVKKMKNYWRQLLNAKLITQRKFDNLTKAERGGLSELDKAGFIKRQLVETRQITKHVAQILDSRMNTKYDENDKLIREVKVITLKSKLVSDFRKDFQFYKVREINNYHHAHDAYLNAVVGTALIKKYPKLESEFVYGDYKVYDVRKMIAKSEQEIGKATAKYFFYSNIMNFFKTEITLANGEIRKRPLIETNGETGEIVWDKGRDFATVRKVLSMPQVNIVKKTEVQTGGFSKESILPKRNSDKLIARKKDWDPKKYGGFDSPTVAYSVLVVAKVEKGKSKKLKSVKELLGITIMERSSFEKNPIDFLEAKGYKEVKKDLIIKLPKYSLFELENGRKRMLASAGELQKGNELALPSKYVNFLYLASHYEKLKGSPEDNEQKQLFVEQHKHYLDEIIEQISEFSKRVILADANLDKVLSAYNKHRDKPIREQAENIIHLFTLTNLGAPAAFKYFDTTIDRKRYTSTKEVLDATLIHQSITGLYETRIDLSQLGGDGGGGGGSSPAPGGTLQLEEEYRLFEPESTQKQEMDIWLKNFPQAWAETGGMGTAHCQAPVLIQLKATATPISIRQYPMPHEAYQGIKPHIRRMLDQGILKPCQSPWNTPLLPVKKPGTEDYRPVQDLREVNKRVEDIHPTVPNPYNLLSTLPPSHPWYTVLDLKDAFFCLRLHSESQLLFAFEWRDPEIGLSGQLTWTRLPQGFKNSPTLFNEALHSDLADFRVRYPALVLLQYVDDLLLAAATRTECLEGTKALLETLGNKGYRASAKKAQICLQEVTYLGYSLKDGQRWLTKARKEAILSIPVPKNSRQVREFLGTAGYCRLWIPGFAELAAPLYPLTRPGTLFQWGTEQQLAFEDIKKALLSSPALGLPDITKPFELFIDENSGFAKGVLVQKLGPWKRPVAYLSKKLDTVASGWPPCLRMVAAIAILVKDAGKLTLGQPLTILTSHPVEALVRQPPNKWLSNARMTHYQAMLLDAERVHFGPTVSLNPATLLPLPSGGNHHDCLQILAETHGTRPDLTDQPLPDADLTWYTDGSSFIRNGEREAGAAVTTESEVIWAAPLPPGTSAQRAELIALTQALKMAEGKKLTVYTDSRYAFATTHVHGEIYRRRGWLTSEGKEIKNKNEILALLEALFLPKRLSIIHCPGHQKGDSPQAKGNRLADDTAKKAATETHSSLTVLPAGKRTADGSEFEKRTADGSEFESPKKKAKVE

SEQ ID NO: 1190 - protein, 2093 aa, synthetic construct
MPAAKRVKLDGGDKKYSIGLDIGTNSVGWAVITDEYKVPSKKFKVLGNTDRHSIKKNLIGALLFDSGETAEATRLKRTARRRYTRRKNRICYLQEIFSNEMAKVDDSFFHRLEESFLVEEDKKHERHPIFGNIVDEVAYHEKYPTIYHLRKKLVDSTDKADLRLIYLALAHMIKFRGHFLIEGDLNPDNSDVDKLFIQLVQTYNQLFEENPINASGVDAKAILSARLSKSRRLENLIAQLPGEKKNGLFGNLIALSLGLTPNFKSNFDLAEDAKLQLSKDTYDDDLDNLLAQIGDQYADLFLAAKNLSDAILLSDILRVNTEITKAPLSASMIKRYDEHHQDLTLLKALVRQQLPEKYKEIFFDQSKNGYAGYIDGGASQEEFYKFIKPILEKMDGTEELLVKLNREDLLRKQRTFDNGSIPHQIHLGELHAILRRQEDFYPFLKDNREKIEKILTFRIPYYVGPLARGNSRFAWMTRKSEETITPWNFEEVVDKGASAQSFIERMTNFDKNLPNEKVLPKHSLLYEYFTVYNELTKVKYVTEGMRKPAFLSGEQKKAIVDLLFKTNRKVTVKQLKEDYFKKIECFDSVEISGVEDRFNASLGTYHDLLKIIKDKDFLDNEENEDILEDIVLTLTLFEDREMIEERLKTYAHLFDDKVMKQLKRRRYTGWGRLSRKLINGIRDKQSGKTILDFLKSDGFANRNFMQLIHDDSLTFKEDIQKAQVSGQGDSLHEHIANLAGSPAIKKGILQTVKVVDELVKVMGRHKPENIVIEMARENQTTQKGQKNSRERMKRIEEGIKELGSQILKEHPVENTQLQNEKLYLYYLQNGRDMYVDQELDINRLSDYDVDHIVPQSFLKDDSIDNKVLTRSDKARGKSDNVPSEEVVKKMKNYWRQLLNAKLITQRKFDNLTKAERGGLSELDKAGFIKRQLVETRQITKHVAQILDSRMNTKYDENDKLIREVKVITLKSKLVSDFRKDFQFYKVREINNYHHAHDAYLNAVVGTALIKKYPKLESEFVYGDYKVYDVRKMIAKSEQEIGKATAKYFFYSNIMNFFKTEITLANGEIRKRPLIETNGETGEIVWDKGRDFATVRKVLSMPQVNIVKKTEVQTGGFSKESILPKRNSDKLIARKKDWDPKKYGGFDSPTVAYSVLVVAKVEKGKSKKLKSVKELLGITIMERSSFEKNPIDFLEAKGYKEVKKDLIIKLPKYSLFELENGRKRMLASAGELQKGNELALPSKYVNFLYLASHYEKLKGSPEDNEQKQLFVEQHKHYLDEIIEQISEFSKRVILADANLDKVLSAYNKHRDKPIREQAENIIHLFTLTNLGAPAAFKYFDTTIDRKRYTSTKEVLDATLIHQSITGLYETRIDLSQLGGDGGGGSGGGPAPGGTLQLEEEYRLFEPESTQKQEMDIWLKNFPQAWAETGGMGTAHCQAPVLIQLKATATPISIRQYPMPHEAYQGIKPHIRRMLDQGILKPCQSPWNTPLLPVKKPGTEDYRPVQDLREVNKRVEDIHPTVPNPYNLLSTLPPSHPWYTVLDLKDAFFCLRLHSESQLLFAFEWRDPEIGLSGQLTWTRLPQGFKNSPTLFNEALHSDLADFRVRYPALVLLQYVDDLLLAAATRTECLEGTKALLETLGNKGYRASAKKAQICLQEVTYLGYSLKDGQRWLTKARKEAILSIPVPKNSRQVREFLGTAGYCRLWIPGFAELAAPLYPLTRPGTLFQWGTEQQLAFEDIKKALLSSPALGLPDITKPFELFIDENSGFAKGVLVQKLGPWKRPVAYLSKKLDTVASGWPPCLRMVAAIAILVKDAGKLTLGQPLTILTSHPVEALVRQPPNKWLSNARMTHYQAMLLDAERVHFGPTVSLNPATLLPLPSGGNHHDCLQILAETHGTRPDLTDQPLPDADLTWYTDGSSFIRNGEREAGAAVTTESEVIWAAPLPPGTSAQRAELIALTQALKMAEGKKLTVYTDSRYAFATTHVHGEIYRRRGWLTSEGKEIKNKNEILALLEALFLPKRLSIIHCPGHQKGDSPQAKGNRLADDTAKKAATETHSSLTVLPAGKRTADGSEFEKRTADGSEFESPKKKAKVE

SEQ ID NO: 1191 - protein, 2095 aa, synthetic construct
MPAAKRVKLDGGDKKYSIGLDIGTNSVGWAVITDEYKVPSKKFKVLGNTDRHSIKKNLIGALLFDSGETAEATRLKRTARRRYTRRKNRICYLQEIFSNEMAKVDDSFFHRLEESFLVEEDKKHERHPIFGNIVDEVAYHEKYPTIYHLRKKLVDSTDKADLRLIYLALAHMIKFRGHFLIEGDLNPDNSDVDKLFIQLVQTYNQLFEENPINASGVDAKAILSARLSKSRRLENLIAQLPGEKKNGLFGNLIALSLGLTPNFKSNFDLAEDAKLQLSKDTYDDDLDNLLAQIGDQYADLFLAAKNLSDAILLSDILRVNTEITKAPLSASMIKRYDEHHQDLTLLKALVRQQLPEKYKEIFFDQSKNGYAGYIDGGASQEEFYKFIKPILEKMDGTEELLVKLNREDLLRKQRTFDNGSIPHQIHLGELHAILRRQEDFYPFLKDNREKIEKILTFRIPYYVGPLARGNSRFAWMTRKSEETITPWNFEEVVDKGASAQSFIERMTNFDKNLPNEKVLPKHSLLYEYFTVYNELTKVKYVTEGMRKPAFLSGEQKKAIVDLLFKTNRKVTVKQLKEDYFKKIECFDSVEISGVEDRFNASLGTYHDLLKIIKDKDFLDNEENEDILEDIVLTLTLFEDREMIEERLKTYAHLFDDKVMKQLKRRRYTGWGRLSRKLINGIRDKQSGKTILDFLKSDGFANRNFMQLIHDDSLTFKEDIQKAQVSGQGDSLHEHIANLAGSPAIKKGILQTVKVVDELVKVMGRHKPENIVIEMARENQTTQKGQKNSRERMKRIEEGIKELGSQILKEHPVENTQLQNEKLYLYYLQNGRDMYVDQELDINRLSDYDVDHIVPQSFLKDDSIDNKVLTRSDKARGKSDNVPSEEVVKKMKNYWRQLLNAKLITQRKFDNLTKAERGGLSELDKAGFIKRQLVETRQITKHVAQILDSRMNTKYDENDKLIREVKVITLKSKLVSDFRKDFQFYKVREINNYHHAHDAYLNAVVGTALIKKYPKLESEFVYGDYKVYDVRKMIAKSEQEIGKATAKYFFYSNIMNFFKTEITLANGEIRKRPLIETNGETGEIVWDKGRDFATVRKVLSMPQVNIVKKTEVQTGGFSKESILPKRNSDKLIARKKDWDPKKYGGFDSPTVAYSVLVVAKVEKGKSKKLKSVKELLGITIMERSSFEKNPIDFLEAKGYKEVKKDLIIKLPKYSLFELENGRKRMLASAGELQKGNELALPSKYVNFLYLASHYEKLKGSPEDNEQKQLFVEQHKHYLDEIIEQISEFSKRVILADANLDKVLSAYNKHRDKPIREQAENIIHLFTLTNLGAPAAFKYFDTTIDRKRYTSTKEVLDATLIHQSITGLYETRIDLSQLGGDGGGSSPAPEAAAKGGTLQLEEEYRLFEPESTQKQEMDIWLKNFPQAWAETGGMGTAHCQAPVLIQLKATATPISIRQYPMPHEAYQGIKPHIRRMLDQGILKPCQSPWNTPLLPVKKPGTEDYRPVQDLREVNKRVEDIHPTVPNPYNLLSTLPPSHPWYTVLDLKDAFFCLRLHSESQLLFAFEWRDPEIGLSGQLTWTRLPQGFKNSPTLFNEALHSDLADFRVRYPALVLLQYVDDLLLAAATRTECLEGTKALLETLGNKGYRASAKKAQICLQEVTYLGYSLKDGQRWLTKARKEAILSIPVPKNSRQVREFLGTAGYCRLWIPGFAELAAPLYPLTRPGTLFQWGTEQQLAFEDIKKALLSSPALGLPDITKPFELFIDENSGFAKGVLVQKLGPWKRPVAYLSKKLDTVASGWPPCLRMVAAIAILVKDAGKLTLGQPLTILTSHPVEALVRQPPNKWLSNARMTHYQAMLLDAERVHFGPTVSLNPATLLPLPSGGNHHDCLQILAETHGTRPDLTDQPLPDADLTWYTDGSSFIRNGEREAGAAVTTESEVIWAAPLPPGTSAQRAELIALTQALKMAEGKKLTVYTDSRYAFATTHVHGEIYRRRGWLTSEGKEIKNKNEILALLEALFLPKRLSIIHCPGHQKGDSPQAKGNRLADDTAKKAATETHSSLTVLPAGKRTADGSEFEKRTADGSEFESPKKKAKVE

SEQ ID NO: 1192 - protein, 2093 aa, synthetic construct
MPAAKRVKLDGGDKKYSIGLDIGTNSVGWAVITDEYKVPSKKFKVLGNTDRHSIKKNLIGALLFDSGETAEATRLKRTARRRYTRRKNRICYLQEIFSNEMAKVDDSFFHRLEESFLVEEDKKHERHPIFGNIVDEVAYHEKYPTIYHLRKKLVDSTDKADLRLIYLALAHMIKFRGHFLIEGDLNPDNSDVDKLFIQLVQTYNQLFEENPINASGVDAKAILSARLSKSRRLENLIAQLPGEKKNGLFGNLIALSLGLTPNFKSNFDLAEDAKLQLSKDTYDDDLDNLLAQIGDQYADLFLAAKNLSDAILLSDILRVNTEITKAPLSASMIKRYDEHHQDLTLLKALVRQQLPEKYKEIFFDQSKNGYAGYIDGGASQEEFYKFIKPILEKMDGTEELLVKLNREDLLRKQRTFDNGSIPHQIHLGELHAILRRQEDFYPFLKDNREKIEKILTFRIPYYVGPLARGNSRFAWMTRKSEETITPWNFEEVVDKGASAQSFIERMTNFDKNLPNEKVLPKHSLLYEYFTVYNELTKVKYVTEGMRKPAFLSGEQKKAIVDLLFKTNRKVTVKQLKEDYFKKIECFDSVEISGVEDRFNASLGTYHDLLKIIKDKDFLDNEENEDILEDIVLTLTLFEDREMIEERLKTYAHLFDDKVMKQLKRRRYTGWGRLSRKLINGIRDKQSGKTILDFLKSDGFANRNFMQLIHDDSLTFKEDIQKAQVSGQGDSLHEHIANLAGSPAIKKGILQTVKVVDELVKVMGRHKPENIVIEMARENQTTQKGQKNSRERMKRIEEGIKELGSQILKEHPVENTQLQNEKLYLYYLQNGRDMYVDQELDINRLSDYDVDHIVPQSFLKDDSIDNKVLTRSDKARGKSDNVPSEEVVKKMKNYWRQLLNAKLITQRKFDNLTKAERGGLSELDKAGFIKRQLVETRQITKHVAQILDSRMNTKYDENDKLIREVKVITLKSKLVSDFRKDFQFYKVREINNYHHAHDAYLNAVVGTALIKKYPKLESEFVYGDYKVYDVRKMIAKSEQEIGKATAKYFFYSNIMNFFKTEITLANGEIRKRPLIETNGETGEIVWDKGRDFATVRKVLSMPQVNIVKKTEVQTGGFSKESILPKRNSDKLIARKKDWDPKKYGGFDSPTVAYSVLVVAKVEKGKSKKLKSVKELLGITIMERSSFEKNPIDFLEAKGYKEVKKDLIIKLPKYSLFELENGRKRMLASAGELQKGNELALPSKYVNFLYLASHYEKLKGSPEDNEQKQLFVEQHKHYLDEIIEQISEFSKRVILADANLDKVLSAYNKHRDKPIREQAENIIHLFTLTNLGAPAAFKYFDTTIDRKRYTSTKEVLDATLIHQSITGLYETRIDLSQLGGDGGPAPGSSGGGGGTLQLEEEYRLFEPESTQKQEMDIWLKNFPQAWAETGGMGTAHCQAPVLIQLKATATPISIRQYPMPHEAYQGIKPHIRRMLDQGILKPCQSPWNTPLLPVKKPGTEDYRPVQDLREVNKRVEDIHPTVPNPYNLLSTLPPSHPWYTVLDLKDAFFCLRLHSESQLLFAFEWRDPEIGLSGQLTWTRLPQGFKNSPTLFNEALHSDLADFRVRYPALVLLQYVDDLLLAAATRTECLEGTKALLETLGNKGYRASAKKAQICLQEVTYLGYSLKDGQRWLTKARKEAILSIPVPKNSRQVREFLGTAGYCRLWIPGFAELAAPLYPLTRPGTLFQWGTEQQLAFEDIKKALLSSPALGLPDITKPFELFIDENSGFAKGVLVQKLGPWKRPVAYLSKKLDTVASGWPPCLRMVAAIAILVKDAGKLTLGQPLTILTSHPVEALVRQPPNKWLSNARMTHYQAMLLDAERVHFGPTVSLNPATLLPLPSGGNHHDCLQILAETHGTRPDLTDQPLPDADLTWYTDGSSFIRNGEREAGAAVTTESEVIWAAPLPPGTSAQRAELIALTQALKMAEGKKLTVYTDSRYAFATTHVHGEIYRRRGWLTSEGKEIKNKNEILALLEALFLPKRLSIIHCPGHQKGDSPQAKGNRLADDTAKKAATETHSSLTVLPAGKRTADGSEFEKRTADGSEFESPKKKAKVE

SEQ ID NO: 1193 - protein, 2090 aa, synthetic construct
MPAAKRVKLDGGDKKYSIGLDIGTNSVGWAVITDEYKVPSKKFKVLGNTDRHSIKKNLIGALLFDSGETAEATRLKRTARRRYTRRKNRICYLQEIFSNEMAKVDDSFFHRLEESFLVEEDKKHERHPIFGNIVDEVAYHEKYPTIYHLRKKLVDSTDKADLRLIYLALAHMIKFRGHFLIEGDLNPDNSDVDKLFIQLVQTYNQLFEENPINASGVDAKAILSARLSKSRRLENLIAQLPGEKKNGLFGNLIALSLGLTPNFKSNFDLAEDAKLQLSKDTYDDDLDNLLAQIGDQYADLFLAAKNLSDAILLSDILRVNTEITKAPLSASMIKRYDEHHQDLTLLKALVRQQLPEKYKEIFFDQSKNGYAGYIDGGASQEEFYKFIKPILEKMDGTEELLVKLNREDLLRKQRTFDNGSIPHQIHLGELHAILRRQEDFYPFLKDNREKIEKILTFRIPYYVGPLARGNSRFAWMTRKSEETITPWNFEEVVDKGASAQSFIERMTNFDKNLPNEKVLPKHSLLYEYFTVYNELTKVKYVTEGMRKPAFLSGEQKKAIVDLLFKTNRKVTVKQLKEDYFKKIECFDSVEISGVEDRFNASLGTYHDLLKIIKDKDFLDNEENEDILEDIVLTLTLFEDREMIEERLKTYAHLFDDKVMKQLKRRRYTGWGRLSRKLINGIRDKQSGKTILDFLKSDGFANRNFMQLIHDDSLTFKEDIQKAQVSGQGDSLHEHIANLAGSPAIKKGILQTVKVVDELVKVMGRHKPENIVIEMARENQTTQKGQKNSRERMKRIEEGIKELGSQILKEHPVENTQLQNEKLYLYYLQNGRDMYVDQELDINRLSDYDVDHIVPQSFLKDDSIDNKVLTRSDKARGKSDNVPSEEVVKKMKNYWRQLLNAKLITQRKFDNLTKAERGGLSELDKAGFIKRQLVETRQITKHVAQILDSRMNTKYDENDKLIREVKVITLKSKLVSDFRKDFQFYKVREINNYHHAHDAYLNAVVGTALIKKYPKLESEFVYGDYKVYDVRKMIAKSEQEIGKATAKYFFYSNIMNFFKTEITLANGEIRKRPLIETNGETGEIVWDKGRDFATVRKVLSMPQVNIVKKTEVQTGGFSKESILPKRNSDKLIARKKDWDPKKYGGFDSPTVAYSVLVVAKVEKGKSKKLKSVKELLGITIMERSSFEKNPIDFLEAKGYKEVKKDLIIKLPKYSLFELENGRKRMLASAGELQKGNELALPSKYVNFLYLASHYEKLKGSPEDNEQKQLFVEQHKHYLDEIIEQISEFSKRVILADANLDKVLSAYNKHRDKPIREQAENIIHLFTLTNLGAPAAFKYFDTTIDRKRYTSTKEVLDATLIHQSITGLYETRIDLSQLGGDGGGGSGGSGGTLQLEEEYRLFEPESTQKQEMDIWLKNFPQAWAETGGMGTAHCQAPVLIQLKATATPISIRQYPMPHEAYQGIKPHIRRMLDQGILKPCQSPWNTPLLPVKKPGTEDYRPVQDLREVNKRVEDIHPTVPNPYNLLSTLPPSHPWYTVLDLKDAFFCLRLHSESQLLFAFEWRDPEIGLSGQLTWTRLPQGFKNSPTLFNEALHSDLADFRVRYPALVLLQYVDDLLLAAATRTECLEGTKALLETLGNKGYRASAKKAQICLQEVTYLGYSLKDGQRWLTKARKEAILSIPVPKNSRQVREFLGTAGYCRLWIPGFAELAAPLYPLTRPGTLFQWGTEQQLAFEDIKKALLSSPALGLPDITKPFELFIDENSGFAKGVLVQKLGPWKRPVAYLSKKLDTVASGWPPCLRMVAAIAILVKDAGKLTLGQPLTILTSHPVEALVRQPPNKWLSNARMTHYQAMLLDAERVHFGPTVSLNPATLLPLPSGGNHHDCLQILAETHGTRPDLTDQPLPDADLTWYTDGSSFIRNGEREAGAAVTTESEVIWAAPLPPGTSAQRAELIALTQALKMAEGKKLTVYTDSRYAFATTHVHGEIYRRRGWLTSEGKEIKNKNEILALLEALFLPKRLSIIHCPGHQKGDSPQAKGNRLADDTAKKAATETHSSLTVLPAGKRTADGSEFEKRTADGSEFESPKKKAKVE

SEQ ID NO: 1194 - protein, 2093 aa, synthetic construct
MPAAKRVKLDGGDKKYSIGLDIGTNSVGWAVITDEYKVPSKKFKVLGNTDRHSIKKNLIGALLFDSGETAEATRLKRTARRRYTRRKNRICYLQEIFSNEMAKVDDSFFHRLEESFLVEEDKKHERHPIFGNIVDEVAYHEKYPTIYHLRKKLVDSTDKADLRLIYLALAHMIKFRGHFLIEGDLNPDNSDVDKLFIQLVQTYNQLFEENPINASGVDAKAILSARLSKSRRLENLIAQLPGEKKNGLFGNLIALSLGLTPNFKSNFDLAEDAKLQLSKDTYDDDLDNLLAQIGDQYADLFLAAKNLSDAILLSDILRVNTEITKAPLSASMIKRYDEHHQDLTLLKALVRQQLPEKYKEIFFDQSKNGYAGYIDGGASQEEFYKFIKPILEKMDGTEELLVKLNREDLLRKQRTFDNGSIPHQIHLGELHAILRRQEDFYPFLKDNREKIEKILTFRIPYYVGPLARGNSRFAWMTRKSEETITPWNFEEVVDKGASAQSFIERMTNFDKNLPNEKVLPKHSLLYEYFTVYNELTKVKYVTEGMRKPAFLSGEQKKAIVDLLFKTNRKVTVKQLKEDYFKKIECFDSVEISGVEDRFNASLGTYHDLLKIIKDKDFLDNEENEDILEDIVLTLTLFEDREMIEERLKTYAHLFDDKVMKQLKRRRYTGWGRLSRKLINGIRDKQSGKTILDFLKSDGFANRNFMQLIHDDSLTFKEDIQKAQVSGQGDSLHEHIANLAGSPAIKKGILQTVKVVDELVKVMGRHKPENIVIEMARENQTTQKGQKNSRERMKRIEEGIKELGSQILKEHPVENTQLQNEKLYLYYLQNGRDMYVDQELDINRLSDYDVDHIVPQSFLKDDSIDNKVLTRSDKARGKSDNVPSEEVVKKMKNYWRQLLNAKLITQRKFDNLTKAERGGLSELDKAGFIKRQLVETRQITKHVAQILDSRMNTKYDENDKLIREVKVITLKSKLVSDFRKDFQFYKVREINNYHHAHDAYLNAVVGTALIKKYPKLESEFVYGDYKVYDVRKMIAKSEQEIGKATAKYFFYSNIMNFFKTEITLANGEIRKRPLIETNGETGEIVWDKGRDFATVRKVLSMPQVNIVKKTEVQTGGFSKESILPKRNSDKLIARKKDWDPKKYGGFDSPTVAYSVLVVAKVEKGKSKKLKSVKELLGITIMERSSFEKNPIDFLEAKGYKEVKKDLIIKLPKYSLFELENGRKRMLASAGELQKGNELALPSKYVNFLYLASHYEKLKGSPEDNEQKQLFVEQHKHYLDEIIEQISEFSKRVILADANLDKVLSAYNKHRDKPIREQAENIIHLFTLTNLGAPAAFKYFDTTIDRKRYTSTKEVLDATLIHQSITGLYETRIDLSQLGGDGGGGSPAPGGGGGTLQLEEEYRLFEPESTQKQEMDIWLKNFPQAWAETGGMGTAHCQAPVLIQLKATATPISIRQYPMPHEAYQGIKPHIRRMLDQGILKPCQSPWNTPLLPVKKPGTEDYRPVQDLREVNKRVEDIHPTVPNPYNLLSTLPPSHPWYTVLDLKDAFFCLRLHSESQLLFAFEWRDPEIGLSGQLTWTRLPQGFKNSPTLFNEALHSDLADFRVRYPALVLLQYVDDLLLAAATRTECLEGTKALLETLGNKGYRASAKKAQICLQEVTYLGYSLKDGQRWLTKARKEAILSIPVPKNSRQVREFLGTAGYCRLWIPGFAELAAPLYPLTRPGTLFQWGTEQQLAFEDIKKALLSSPALGLPDITKPFELFIDENSGFAKGVLVQKLGPWKRPVAYLSKKLDTVASGWPPCLRMVAAIAILVKDAGKLTLGQPLTILTSHPVEALVRQPPNKWLSNARMTHYQAMLLDAERVHFGPTVSLNPATLLPLPSGGNHHDCLQILAETHGTRPDLTDQPLPDADLTWYTDGSSFIRNGEREAGAAVTTESEVIWAAPLPPGTSAQRAELIALTQALKMAEGKKLTVYTDSRYAFATTHVHGEIYRRRGWLTSEGKEIKNKNEILALLEALFLPKRLSIIHCPGHQKGDSPQAKGNRLADDTAKKAATETHSSLTVLPAGKRTADGSEFEKRTADGSEFESPKKKAKVE

SEQ ID NO: 1195 - protein, 2089 aa, synthetic construct
MPAAKRVKLDGGDKKYSIGLDIGTNSVGWAVITDEYKVPSKKFKVLGNTDRHSIKKNLIGALLFDSGETAEATRLKRTARRRYTRRKNRICYLQEIFSNEMAKVDDSFFHRLEESFLVEEDKKHERHPIFGNIVDEVAYHEKYPTIYHLRKKLVDSTDKADLRLIYLALAHMIKFRGHFLIEGDLNPDNSDVDKLFIQLVQTYNQLFEENPINASGVDAKAILSARLSKSRRLENLIAQLPGEKKNGLFGNLIALSLGLTPNFKSNFDLAEDAKLQLSKDTYDDDLDNLLAQIGDQYADLFLAAKNLSDAILLSDILRVNTEITKAPLSASMIKRYDEHHQDLTLLKALVRQQLPEKYKEIFFDQSKNGYAGYIDGGASQEEFYKFIKPILEKMDGTEELLVKLNREDLLRKQRTFDNGSIPHQIHLGELHAILRRQEDFYPFLKDNREKIEKILTFRIPYYVGPLARGNSRFAWMTRKSEETITPWNFEEVVDKGASAQSFIERMTNFDKNLPNEKVLPKHSLLYEYFTVYNELTKVKYVTEGMRKPAFLSGEQKKAIVDLLFKTNRKVTVKQLKEDYFKKIECFDSVEISGVEDRFNASLGTYHDLLKIIKDKDFLDNEENEDILEDIVLTLTLFEDREMIEERLKTYAHLFDDKVMKQLKRRRYTGWGRLSRKLINGIRDKQSGKTILDFLKSDGFANRNFMQLIHDDSLTFKEDIQKAQVSGQGDSLHEHIANLAGSPAIKKGILQTVKVVDELVKVMGRHKPENIVIEMARENQTTQKGQKNSRERMKRIEEGIKELGSQILKEHPVENTQLQNEKLYLYYLQNGRDMYVDQELDINRLSDYDVDHIVPQSFLKDDSIDNKVLTRSDKARGKSDNVPSEEVVKKMKNYWRQLLNAKLITQRKFDNLTKAERGGLSELDKAGFIKRQLVETRQITKHVAQILDSRMNTKYDENDKLIREVKVITLKSKLVSDFRKDFQFYKVREINNYHHAHDAYLNAVVGTALIKKYPKLESEFVYGDYKVYDVRKMIAKSEQEIGKATAKYFFYSNIMNFFKTEITLANGEIRKRPLIETNGETGEIVWDKGRDFATVRKVLSMPQVNIVKKTEVQTGGFSKESILPKRNSDKLIARKKDWDPKKYGGFDSPTVAYSVLVVAKVEKGKSKKLKSVKELLGITIMERSSFEKNPIDFLEAKGYKEVKKDLIIKLPKYSLFELENGRKRMLASAGELQKGNELALPSKYVNFLYLASHYEKLKGSPEDNEQKQLFVEQHKHYLDEIIEQISEFSKRVILADANLDKVLSAYNKHRDKPIREQAENIIHLFTLTNLGAPAAFKYFDTTIDRKRYTSTKEVLDATLIHQSITGLYETRIDLSQLGGDGGGGGGGGGTLQLEEEYRLFEPESTQKQEMDIWLKNFPQAWAETGGMGTAHCQAPVLIQLKATATPISIRQYPMPHEAYQGIKPHIRRMLDQGILKPCQSPWNTPLLPVKKPGTEDYRPVQDLREVNKRVEDIHPTVPNPYNLLSTLPPSHPWYTVLDLKDAFFCLRLHSESQLLFAFEWRDPEIGLSGQLTWTRLPQGFKNSPTLFNEALHSDLADFRVRYPALVLLQYVDDLLLAAATRTECLEGTKALLETLGNKGYRASAKKAQICLQEVTYLGYSLKDGQRWLTKARKEAILSIPVPKNSRQVREFLGTAGYCRLWIPGFAELAAPLYPLTRPGTLFQWGTEQQLAFEDIKKALLSSPALGLPDITKPFELFIDENSGFAKGVLVQKLGPWKRPVAYLSKKLDTVASGWPPCLRMVAAIAILVKDAGKLTLGQPLTILTSHPVEALVRQPPNKWLSNARMTHYQAMLLDAERVHFGPTVSLNPATLLPLPSGGNHHDCLQILAETHGTRPDLTDQPLPDADLTWYTDGSSFIRNGEREAGAAVTTESEVIWAAPLPPGTSAQRAELIALTQALKMAEGKKLTVYTDSRYAFATTHVHGEIYRRRGWLTSEGKEIKNKNEILALLEALFLPKRLSIIHCPGHQKGDSPQAKGNRLADDTAKKAATETHSSLTVLPAGKRTADGSEFEKRTADGSEFESPKKKAKVE

SEQ ID NO: 1196 - protein, 2093 aa, synthetic construct
MPAAKRVKLDGGDKKYSIGLDIGTNSVGWAVITDEYKVPSKKFKVLGNTDRHSIKKNLIGALLFDSGETAEATRLKRTARRRYTRRKNRICYLQEIFSNEMAKVDDSFFHRLEESFLVEEDKKHERHPIFGNIVDEVAYHEKYPTIYHLRKKLVDSTDKADLRLIYLALAHMIKFRGHFLIEGDLNPDNSDVDKLFIQLVQTYNQLFEENPINASGVDAKAILSARLSKSRRLENLIAQLPGEKKNGLFGNLIALSLGLTPNFKSNFDLAEDAKLQLSKDTYDDDLDNLLAQIGDQYADLFLAAKNLSDAILLSDILRVNTEITKAPLSASMIKRYDEHHQDLTLLKALVRQQLPEKYKEIFFDQSKNGYAGYIDGGASQEEFYKFIKPILEKMDGTEELLVKLNREDLLRKQRTFDNGSIPHQIHLGELHAILRRQEDFYPFLKDNREKIEKILTFRIPYYVGPLARGNSRFAWMTRKSEETITPWNFEEVVDKGASAQSFIERMTNFDKNLPNEKVLPKHSLLYEYFTVYNELTKVKYVTEGMRKPAFLSGEQKKAIVDLLFKTNRKVTVKQLKEDYFKKIECFDSVEISGVEDRFNASLGTYHDLLKIIKDKDFLDNEENEDILEDIVLTLTLFEDREMIEERLKTYAHLFDDKVMKQLKRRRYTGWGRLSRKLINGIRDKQSGKTILDFLKSDGFANRNFMQLIHDDSLTFKEDIQKAQVSGQGDSLHEHIANLAGSPAIKKGILQTVKVVDELVKVMGRHKPENIVIEMARENQTTQKGQKNSRERMKRIEEGIKELGSQILKEHPVENTQLQNEKLYLYYLQNGRDMYVDQELDINRLSDYDVDHIVPQSFLKDDSIDNKVLTRSDKARGKSDNVPSEEVVKKMKNYWRQLLNAKLITQRKFDNLTKAERGGLSELDKAGFIKRQLVETRQITKHVAQILDSRMNTKYDENDKLIREVKVITLKSKLVSDFRKDFQFYKVREINNYHHAHDAYLNAVVGTALIKKYPKLESEFVYGDYKVYDVRKMIAKSEQEIGKATAKYFFYSNIMNFFKTEITLANGEIRKRPLIETNGETGEIVWDKGRDFATVRKVLSMPQVNIVKKTEVQTGGFSKESILPKRNSDKLIARKKDWDPKKYGGFDSPTVAYSVLVVAKVEKGKSKKLKSVKELLGITIMERSSFEKNPIDFLEAKGYKEVKKDLIIKLPKYSLFELENGRKRMLASAGELQKGNELALPSKYVNFLYLASHYEKLKGSPEDNEQKQLFVEQHKHYLDEIIEQISEFSKRVILADANLDKVLSAYNKHRDKPIREQAENIIHLFTLTNLGAPAAFKYFDTTIDRKRYTSTKEVLDATLIHQSITGLYETRIDLSQLGGDGGPAPGGSGGGGGTLQLEEEYRLFEPESTQKQEMDIWLKNFPQAWAETGGMGTAHCQAPVLIQLKATATPISIRQYPMPHEAYQGIKPHIRRMLDQGILKPCQSPWNTPLLPVKKPGTEDYRPVQDLREVNKRVEDIHPTVPNPYNLLSTLPPSHPWYTVLDLKDAFFCLRLHSESQLLFAFEWRDPEIGLSGQLTWTRLPQGFKNSPTLFNEALHSDLADFRVRYPALVLLQYVDDLLLAAATRTECLEGTKALLETLGNKGYRASAKKAQICLQEVTYLGYSLKDGQRWLTKARKEAILSIPVPKNSRQVREFLGTAGYCRLWIPGFAELAAPLYPLTRPGTLFQWGTEQQLAFEDIKKALLSSPALGLPDITKPFELFIDENSGFAKGVLVQKLGPWKRPVAYLSKKLDTVASGWPPCLRMVAAIAILVKDAGKLTLGQPLTILTSHPVEALVRQPPNKWLSNARMTHYQAMLLDAERVHFGPTVSLNPATLLPLPSGGNHHDCLQILAETHGTRPDLTDQPLPDADLTWYTDGSSFIRNGEREAGAAVTTESEVIWAAPLPPGTSAQRAELIALTQALKMAEGKKLTVYTDSRYAFATTHVHGEIYRRRGWLTSEGKEIKNKNEILALLEALFLPKRLSIIHCPGHQKGDSPQAKGNRLADDTAKKAATETHSSLTVLPAGKRTADGSEFEKRTADGSEFESPKKKAKVE

SEQ ID NO: 1197 - protein, 2130 aa, synthetic construct
MPAAKRVKLDGGDKKYSIGLDIGTNSVGWAVITDEYKVPSKKFKVLGNTDRHSIKKNLIGALLFDSGETAEATRLKRTARRRYTRRKNRICYLQEIFSNEMAKVDDSFFHRLEESFLVEEDKKHERHPIFGNIVDEVAYHEKYPTIYHLRKKLVDSTDKADLRLIYLALAHMIKFRGHFLIEGDLNPDNSDVDKLFIQLVQTYNQLFEENPINASGVDAKAILSARLSKSRRLENLIAQLPGEKKNGLFGNLIALSLGLTPNFKSNFDLAEDAKLQLSKDTYDDDLDNLLAQIGDQYADLFLAAKNLSDAILLSDILRVNTEITKAPLSASMIKRYDEHHQDLTLLKALVRQQLPEKYKEIFFDQSKNGYAGYIDGGASQEEFYKFIKPILEKMDGTEELLVKLNREDLLRKQRTFDNGSIPHQIHLGELHAILRRQEDFYPFLKDNREKIEKILTFRIPYYVGPLARGNSRFAWMTRKSEETITPWNFEEVVDKGASAQSFIERMTNFDKNLPNEKVLPKHSLLYEYFTVYNELTKVKYVTEGMRKPAFLSGEQKKAIVDLLFKTNRKVTVKQLKEDYFKKIECFDSVEISGVEDRFNASLGTYHDLLKIIKDKDFLDNEENEDILEDIVLTLTLFEDREMIEERLKTYAHLFDDKVMKQLKRRRYTGWGRLSRKLINGIRDKQSGKTILDFLKSDGFANRNFMQLIHDDSLTFKEDIQKAQVSGQGDSLHEHIANLAGSPAIKKGILQTVKVVDELVKVMGRHKPENIVIEMARENQTTQKGQKNSRERMKRIEEGIKELGSQILKEHPVENTQLQNEKLYLYYLQNGRDMYVDQELDINRLSDYDVDHIVPQSFLKDDSIDNKVLTRSDKARGKSDNVPSEEVVKKMKNYWRQLLNAKLITQRKFDNLTKAERGGLSELDKAGFIKRQLVETRQITKHVAQILDSRMNTKYDENDKLIREVKVITLKSKLVSDFRKDFQFYKVREINNYHHAHDAYLNAVVGTALIKKYPKLESEFVYGDYKVYDVRKMIAKSEQEIGKATAKYFFYSNIMNFFKTEITLANGEIRKRPLIETNGETGEIVWDKGRDFATVRKVLSMPQVNIVKKTEVQTGGFSKESILPKRNSDKLIARKKDWDPKKYGGFDSPTVAYSVLVVAKVEKGKSKKLKSVKELLGITIMERSSFEKNPIDFLEAKGYKEVKKDLIIKLPKYSLFELENGRKRMLASAGELQKGNELALPSKYVNFLYLASHYEKLKGSPEDNEQKQLFVEQHKHYLDEIIEQISEFSKRVILADANLDKVLSAYNKHRDKPIREQAENIIHLFTLTNLGAPAAFKYFDTTIDRKRYTSTKEVLDATLIHQSITGLYETRIDLSQLGGDGGAEAAAKEAAAKEAAAKEAAAKALEAEAAAKEAAAKEAAAKEAAAKAGGTLQLEEEYRLFEPESTQKQEMDIWLKNFPQAWAETGGMGTAHCQAPVLIQLKATATPISIRQYPMPHEAYQGIKPHIRRMLDQGILKPCQSPWNTPLLPVKKPGTEDYRPVQDLREVNKRVEDIHPTVPNPYNLLSTLPPSHPWYTVLDLKDAFFCLRLHSESQLLFAFEWRDPEIGLSGQLTWTRLPQGFKNSPTLFNEALHSDLADFRVRYPALVLLQYVDDLLLAAATRTECLEGTKALLETLGNKGYRASAKKAQICLQEVTYLGYSLKDGQRWLTKARKEAILSIPVPKNSRQVREFLGKAGYCRLFIPGFAELAAPLYPLTRPGTLFQWGTEQQLAFEDIKKALLSSPALGLPDITKPFELFIDENSGFAKGVLVQKLGPWKRPVAYLSKKLDTVASGWPPCLRMVAAIAILVKDAGKLTLGQPLTILTSHPVEALVRQPPNKWLSNARMTHYQAMLLDAERVHFGPTVSLNPATLLPLPSGGNHHDCLQILAETHGTRPDLTDQPLPDADLTWYTDGSSFIRNGEREAGAAVTTESEVIWAAPLPPGTSAQRAELIALTQALKMAEGKKLTVYTDSRYAFATTHVHGEIYRRRGWLTSEGKEIKNKNEILALLEALFLPKRLSIIHCPGHQKGDSPQAKGNRLADDTAKKAATETHSSLTVLPAGKRTADGSEFEKRTADGSEFESPKKKAKVE

SEQ ID NO: 1198 - protein, 2104 aa, synthetic construct
MPAAKRVKLDGGDKKYSIGLDIGTNSVGWAVITDEYKVPSKKFKVLGNTDRHSIKKNLIGALLFDSGETAEATRLKRTARRRYTRRKNRICYLQEIFSNEMAKVDDSFFHRLEESFLVEEDKKHERHPIFGNIVDEVAYHEKYPTIYHLRKKLVDSTDKADLRLIYLALAHMIKFRGHFLIEGDLNPDNSDVDKLFIQLVQTYNQLFEENPINASGVDAKAILSARLSKSRRLENLIAQLPGEKKNGLFGNLIALSLGLTPNFKSNFDLAEDAKLQLSKDTYDDDLDNLLAQIGDQYADLFLAAKNLSDAILLSDILRVNTEITKAPLSASMIKRYDEHHQDLTLLKALVRQQLPEKYKEIFFDQSKNGYAGYIDGGASQEEFYKFIKPILEKMDGTEELLVKLNREDLLRKQRTFDNGSIPHQIHLGELHAILRRQEDFYPFLKDNREKIEKILTFRIPYYVGPLARGNSRFAWMTRKSEETITPWNFEEVVDKGASAQSFIERMTNFDKNLPNEKVLPKHSLLYEYFTVYNELTKVKYVTEGMRKPAFLSGEQKKAIVDLLFKTNRKVTVKQLKEDYFKKIECFDSVEISGVEDRFNASLGTYHDLLKIIKDKDFLDNEENEDILEDIVLTLTLFEDREMIEERLKTYAHLFDDKVMKQLKRRRYTGWGRLSRKLINGIRDKQSGKTILDFLKSDGFANRNFMQLIHDDSLTFKEDIQKAQVSGQGDSLHEHIANLAGSPAIKKGILQTVKVVDELVKVMGRHKPENIVIEMARENQTTQKGQKNSRERMKRIEEGIKELGSQILKEHPVENTQLQNEKLYLYYLQNGRDMYVDQELDINRLSDYDVDHIVPQSFLKDDSIDNKVLTRSDKARGKSDNVPSEEVVKKMKNYWRQLLNAKLITQRKFDNLTKAERGGLSELDKAGFIKRQLVETRQITKHVAQILDSRMNTKYDENDKLIREVKVITLKSKLVSDFRKDFQFYKVREINNYHHAHDAYLNAVVGTALIKKYPKLESEFVYGDYKVYDVRKMIAKSEQEIGKATAKYFFYSNIMNFFKTEITLANGEIRKRPLIETNGETGEIVWDKGRDFATVRKVLSMPQVNIVKKTEVQTGGFSKESILPKRNSDKLIARKKDWDPKKYGGFDSPTVAYSVLVVAKVEKGKSKKLKSVKELLGITIMERSSFEKNPIDFLEAKGYKEVKKDLIIKLPKYSLFELENGRKRMLASAGELQKGNELALPSKYVNFLYLASHYEKLKGSPEDNEQKQLFVEQHKHYLDEIIEQISEFSKRVILADANLDKVLSAYNKHRDKPIREQAENIIHLFTLTNLGAPAAFKYFDTTIDRKRYTSTKEVLDATLIHQSITGLYETRIDLSQLGGDGGEAAAKEAAAKEAAAKEAAAKGGTLQLEEEYRLFEPESTQKQEMDIWLKNFPQAWAETGGMGTAHCQAPVLIQLKATATPISIRQYPMPHEAYQGIKPHIRRMLDQGILKPCQSPWNTPLLPVKKPGTEDYRPVQDLREVNKRVEDIHPTVPNPYNLLSTLPPSHPWYTVLDLKDAFFCLRLHSESQLLFAFEWRDPEIGLSGQLTWTRLPQGFKNSPTLFNEALHSDLADFRVRYPALVLLQYVDDLLLAAATRTECLEGTKALLETLGNKGYRASAKKAQICLQEVTYLGYSLKDGQRWLTKARKEAILSIPVPKNSRQVREFLGKAGYCRLFIPGFAELAAPLYPLTRPGTLFQWGTEQQLAFEDIKKALLSSPALGLPDITKPFELFIDENSGFAKGVLVQKLGPWKRPVAYLSKKLDTVASGWPPCLRMVAAIAILVKDAGKLTLGQPLTILTSHPVEALVRQPPNKWLSNARMTHYQAMLLDAERVHFGPTVSLNPATLLPLPSGGNHHDCLQILAETHGTRPDLTDQPLPDADLTWYTDGSSFIRNGEREAGAAVTTESEVIWAAPLPPGTSAQRAELIALTQALKMAEGKKLTVYTDSRYAFATTHVHGEIYRRRGWLTSEGKEIKNKNEILALLEALFLPKRLSIIHCPGHQKGDSPQAKGNRLADDTAKKAATETHSSLTVLPAGKRTADGSEFEKRTADGSEFESPKKKAKVE

SEQ ID NO: 1199 - protein, 2114 aa, synthetic construct
MPAAKRVKLDGGDKKYSIGLDIGTNSVGWAVITDEYKVPSKKFKVLGNTDRHSIKKNLIGALLFDSGETAEATRLKRTARRRYTRRKNRICYLQEIFSNEMAKVDDSFFHRLEESFLVEEDKKHERHPIFGNIVDEVAYHEKYPTIYHLRKKLVDSTDKADLRLIYLALAHMIKFRGHFLIEGDLNPDNSDVDKLFIQLVQTYNQLFEENPINASGVDAKAILSARLSKSRRLENLIAQLPGEKKNGLFGNLIALSLGLTPNFKSNFDLAEDAKLQLSKDTYDDDLDNLLAQIGDQYADLFLAAKNLSDAILLSDILRVNTEITKAPLSASMIKRYDEHHQDLTLLKALVRQQLPEKYKEIFFDQSKNGYAGYIDGGASQEEFYKFIKPILEKMDGTEELLVKLNREDLLRKQRTFDNGSIPHQIHLGELHAILRRQEDFYPFLKDNREKIEKILTFRIPYYVGPLARGNSRFAWMTRKSEETITPWNFEEVVDKGASAQSFIERMTNFDKNLPNEKVLPKHSLLYEYFTVYNELTKVKYVTEGMRKPAFLSGEQKKAIVDLLFKTNRKVTVKQLKEDYFKKIECFDSVEISGVEDRFNASLGTYHDLLKIIKDKDFLDNEENEDILEDIVLTLTLFEDREMIEERLKTYAHLFDDKVMKQLKRRRYTGWGRLSRKLINGIRDKQSGKTILDFLKSDGFANRNFMQLIHDDSLTFKEDIQKAQVSGQGDSLHEHIANLAGSPAIKKGILQTVKVVDELVKVMGRHKPENIVIEMARENQTTQKGQKNSRERMKRIEEGIKELGSQILKEHPVENTQLQNEKLYLYYLQNGRDMYVDQELDINRLSDYDVDHIVPQSFLKDDSIDNKVLTRSDKARGKSDNVPSEEVVKKMKNYWRQLLNAKLITQRKFDNLTKAERGGLSELDKAGFIKRQLVETRQITKHVAQILDSRMNTKYDENDKLIREVKVITLKSKLVSDFRKDFQFYKVREINNYHHAHDAYLNAVVGTALIKKYPKLESEFVYGDYKVYDVRKMIAKSEQEIGKATAKYFFYSNIMNFFKTEITLANGEIRKRPLIETNGETGEIVWDKGRDFATVRKVLSMPQVNIVKKTEVQTGGFSKESILPKRNSDKLIARKKDWDPKKYGGFDSPTVAYSVLVVAKVEKGKSKKLKSVKELLGITIMERSSFEKNPIDFLEAKGYKEVKKDLIIKLPKYSLFELENGRKRMLASAGELQKGNELALPSKYVNFLYLASHYEKLKGSPEDNEQKQLFVEQHKHYLDEIIEQISEFSKRVILADANLDKVLSAYNKHRDKPIREQAENIIHLFTLTNLGAPAAFKYFDTTIDRKRYTSTKEVLDATLIHQSITGLYETRIDLSQLGGDGGEAAAKEAAAKEAAAKEAAAKEAAAKEAAAKGGTLQLEEEYRLFEPESTQKQEMDIWLKNFPQAWAETGGMGTAHCQAPVLIQLKATATPISIRQYPMPHEAYQGIKPHIRRMLDQGILKPCQSPWNTPLLPVKKPGTEDYRPVQDLREVNKRVEDIHPTVPNPYNLLSTLPPSHPWYTVLDLKDAFFCLRLHSESQLLFAFEWRDPEIGLSGQLTWTRLPQGFKNSPTLFNEALHSDLADFRVRYPALVLLQYVDDLLLAAATRTECLEGTKALLETLGNKGYRASAKKAQICLQEVTYLGYSLKDGQRWLTKARKEAILSIPVPKNSRQVREFLGKAGYCRLFIPGFAELAAPLYPLTRPGTLFQWGTEQQLAFEDIKKALLSSPALGLPDITKPFELFIDENSGFAKGVLVQKLGPWKRPVAYLSKKLDTVASGWPPCLRMVAAIAILVKDAGKLTLGQPLTILTSHPVEALVRQPPNKWLSNARMTHYQAMLLDAERVHFGPTVSLNPATLLPLPSGGNHHDCLQILAETHGTRPDLTDQPLPDADLTWYTDGSSFIRNGEREAGAAVTTESEVIWAAPLPPGTSAQRAELIALTQALKMAEGKKLTVYTDSRYAFATTHVHGEIYRRRGWLTSEGKEIKNKNEILALLEALFLPKRLSIIHCPGHQKGDSPQAKGNRLADDTAKKAATETHSSLTVLPAGKRTADGSEFEKRTADGSEFESPKKKAKVE

SEQ ID NO: 1200 - protein, 2095 aa, synthetic construct
MPAAKRVKLDGGDKKYSIGLDIGTNSVGWAVITDEYKVPSKKFKVLGNTDRHSIKKNLIGALLFDSGETAEATRLKRTARRRYTRRKNRICYLQEIFSNEMAKVDDSFFHRLEESFLVEEDKKHERHPIFGNIVDEVAYHEKYPTIYHLRKKLVDSTDKADLRLIYLALAHMIKFRGHFLIEGDLNPDNSDVDKLFIQLVQTYNQLFEENPINASGVDAKAILSARLSKSRRLENLIAQLPGEKKNGLFGNLIALSLGLTPNFKSNFDLAEDAKLQLSKDTYDDDLDNLLAQIGDQYADLFLAAKNLSDAILLSDILRVNTEITKAPLSASMIKRYDEHHQDLTLLKALVRQQLPEKYKEIFFDQSKNGYAGYIDGGASQEEFYKFIKPILEKMDGTEELLVKLNREDLLRKQRTFDNGSIPHQIHLGELHAILRRQEDFYPFLKDNREKIEKILTFRIPYYVGPLARGNSRFAWMTRKSEETITPWNFEEVVDKGASAQSFIERMTNFDKNLPNEKVLPKHSLLYEYFTVYNELTKVKYVTEGMRKPAFLSGEQKKAIVDLLFKTNRKVTVKQLKEDYFKKIECFDSVEISGVEDRFNASLGTYHDLLKIIKDKDFLDNEENEDILEDIVLTLTLFEDREMIEERLKTYAHLFDDKVMKQLKRRRYTGWGRLSRKLINGIRDKQSGKTILDFLKSDGFANRNFMQLIHDDSLTFKEDIQKAQVSGQGDSLHEHIANLAGSPAIKKGILQTVKVVDELVKVMGRHKPENIVIEMARENQTTQKGQKNSRERMKRIEEGIKELGSQILKEHPVENTQLQNEKLYLYYLQNGRDMYVDQELDINRLSDYDVDHIVPQSFLKDDSIDNKVLTRSDKARGKSDNVPSEEVVKKMKNYWRQLLNAKLITQRKFDNLTKAERGGLSELDKAGFIKRQLVETRQITKHVAQILDSRMNTKYDENDKLIREVKVITLKSKLVSDFRKDFQFYKVREINNYHHAHDAYLNAVVGTALIKKYPKLESEFVYGDYKVYDVRKMIAKSEQEIGKATAKYFFYSNIMNFFKTEITLANGEIRKRPLIETNGETGEIVWDKGRDFATVRKVLSMPQVNIVKKTEVQTGGFSKESILPKRNSDKLIARKKDWDPKKYGGFDSPTVAYSVLVVAKVEKGKSKKLKSVKELLGITIMERSSFEKNPIDFLEAKGYKEVKKDLIIKLPKYSLFELENGRKRMLASAGELQKGNELALPSKYVNFLYLASHYEKLKGSPEDNEQKQLFVEQHKHYLDEIIEQISEFSKRVILADANLDKVLSAYNKHRDKPIREQAENIIHLFTLTNLGAPAAFKYFDTTIDRKRYTSTKEVLDATLIHQSITGLYETRIDLSQLGGDGGPAPEAAAKGGGGGTLQLEEEYRLFEPESTQKQEMDIWLKNFPQAWAETGGMGTAHCQAPVLIQLKATATPISIRQYPMPHEAYQGIKPHIRRMLDQGILKPCQSPWNTPLLPVKKPGTEDYRPVQDLREVNKRVEDIHPTVPNPYNLLSTLPPSHPWYTVLDLKDAFFCLRLHSESQLLFAFEWRDPEIGLSGQLTWTRLPQGFKNSPTLFNEALHSDLADFRVRYPALVLLQYVDDLLLAAATRTECLEGTKALLETLGNKGYRASAKKAQICLQEVTYLGYSLKDGQRWLTKARKEAILSIPVPKNSRQVREFLGKAGYCRLFIPGFAELAAPLYPLTRPGTLFQWGTEQQLAFEDIKKALLSSPALGLPDITKPFELFIDENSGFAKGVLVQKLGPWKRPVAYLSKKLDTVASGWPPCLRMVAAIAILVKDAGKLTLGQPLTILTSHPVEALVRQPPNKWLSNARMTHYQAMLLDAERVHFGPTVSLNPATLLPLPSGGNHHDCLQILAETHGTRPDLTDQPLPDADLTWYTDGSSFIRNGEREAGAAVTTESEVIWAAPLPPGTSAQRAELIALTQALKMAEGKKLTVYTDSRYAFATTHVHGEIYRRRGWLTSEGKEIKNKNEILALLEALFLPKRLSIIHCPGHQKGDSPQAKGNRLADDTAKKAATETHSSLTVLPAGKRTADGSEFEKRTADGSEFESPKKKAKVE

SEQ ID NO: 1201 - protein, 2095 aa, synthetic construct
MPAAKRVKLDGGDKKYSIGLDIGTNSVGWAVITDEYKVPSKKFKVLGNTDRHSIKKNLIGALLFDSGETAEATRLKRTARRRYTRRKNRICYLQEIFSNEMAKVDDSFFHRLEESFLVEEDKKHERHPIFGNIVDEVAYHEKYPTIYHLRKKLVDSTDKADLRLIYLALAHMIKFRGHFLIEGDLNPDNSDVDKLFIQLVQTYNQLFEENPINASGVDAKAILSARLSKSRRLENLIAQLPGEKKNGLFGNLIALSLGLTPNFKSNFDLAEDAKLQLSKDTYDDDLDNLLAQIGDQYADLFLAAKNLSDAILLSDILRVNTEITKAPLSASMIKRYDEHHQDLTLLKALVRQQLPEKYKEIFFDQSKNGYAGYIDGGASQEEFYKFIKPILEKMDGTEELLVKLNREDLLRKQRTFDNGSIPHQIHLGELHAILRRQEDFYPFLKDNREKIEKILTFRIPYYVGPLARGNSRFAWMTRKSEETITPWNFEEVVDKGASAQSFIERMTNFDKNLPNEKVLPKHSLLYEYFTVYNELTKVKYVTEGMRKPAFLSGEQKKAIVDLLFKTNRKVTVKQLKEDYFKKIECFDSVEISGVEDRFNASLGTYHDLLKIIKDKDFLDNEENEDILEDIVLTLTLFEDREMIEERLKTYAHLFDDKVMKQLKRRRYTGWGRLSRKLINGIRDKQSGKTILDFLKSDGFANRNFMQLIHDDSLTFKEDIQKAQVSGQGDSLHEHIANLAGSPAIKKGILQTVKVVDELVKVMGRHKPENIVIEMARENQTTQKGQKNSRERMKRIEEGIKELGSQILKEHPVENTQLQNEKLYLYYLQNGRDMYVDQELDINRLSDYDVDHIVPQSFLKDDSIDNKVLTRSDKARGKSDNVPSEEVVKKMKNYWRQLLNAKLITQRKFDNLTKAERGGLSELDKAGFIKRQLVETRQITKHVAQILDSRMNTKYDENDKLIREVKVITLKSKLVSDFRKDFQFYKVREINNYHHAHDAYLNAVVGTALIKKYPKLESEFVYGDYKVYDVRKMIAKSEQEIGKATAKYFFYSNIMNFFKTEITLANGEIRKRPLIETNGETGEIVWDKGRDFATVRKVLSMPQVNIVKKTEVQTGGFSKESILPKRNSDKLIARKKDWDPKKYGGFDSPTVAYSVLVVAKVEKGKSKKLKSVKELLGITIMERSSFEKNPIDFLEAKGYKEVKKDLIIKLPKYSLFELENGRKRMLASAGELQKGNELALPSKYVNFLYLASHYEKLKGSPEDNEQKQLFVEQHKHYLDEIIEQISEFSKRVILADANLDKVLSAYNKHRDKPIREQAENIIHLFTLTNLGAPAAFKYFDTTIDRKRYTSTKEVLDATLIHQSITGLYETRIDLSQLGGDGGEAAAKGSSPAPGGTLQLEEEYRLFEPESTQKQEMDIWLKNFPQAWAETGGMGTAHCQAPVLIQLKATATPISIRQYPMPHEAYQGIKPHIRRMLDQGILKPCQSPWNTPLLPVKKPGTEDYRPVQDLREVNKRVEDIHPTVPNPYNLLSTLPPSHPWYTVLDLKDAFFCLRLHSESQLLFAFEWRDPEIGLSGQLTWTRLPQGFKNSPTLFNEALHSDLADFRVRYPALVLLQYVDDLLLAAATRTECLEGTKALLETLGNKGYRASAKKAQICLQEVTYLGYSLKDGQRWLTKARKEAILSIPVPKNSRQVREFLGKAGYCRLFIPGFAELAAPLYPLTRPGTLFQWGTEQQLAFEDIKKALLSSPALGLPDITKPFELFIDENSGFAKGVLVQKLGPWKRPVAYLSKKLDTVASGWPPCLRMVAAIAILVKDAGKLTLGQPLTILTSHPVEALVRQPPNKWLSNARMTHYQAMLLDAERVHFGPTVSLNPATLLPLPSGGNHHDCLQILAETHGTRPDLTDQPLPDADLTWYTDGSSFIRNGEREAGAAVTTESEVIWAAPLPPGTSAQRAELIALTQALKMAEGKKLTVYTDSRYAFATTHVHGEIYRRRGWLTSEGKEIKNKNEILALLEALFLPKRLSIIHCPGHQKGDSPQAKGNRLADDTAKKAATETHSSLTVLPAGKRTADGSEFEKRTADGSEFESPKKKAKVE

SEQ ID NO: 1202 - protein, 2109 aa, synthetic construct
MPAAKRVKLDGGDKKYSIGLDIGTNSVGWAVITDEYKVPSKKFKVLGNTDRHSIKKNLIGALLFDSGETAEATRLKRTARRRYTRRKNRICYLQEIFSNEMAKVDDSFFHRLEESFLVEEDKKHERHPIFGNIVDEVAYHEKYPTIYHLRKKLVDSTDKADLRLIYLALAHMIKFRGHFLIEGDLNPDNSDVDKLFIQLVQTYNQLFEENPINASGVDAKAILSARLSKSRRLENLIAQLPGEKKNGLFGNLIALSLGLTPNFKSNFDLAEDAKLQLSKDTYDDDLDNLLAQIGDQYADLFLAAKNLSDAILLSDILRVNTEITKAPLSASMIKRYDEHHQDLTLLKALVRQQLPEKYKEIFFDQSKNGYAGYIDGGASQEEFYKFIKPILEKMDGTEELLVKLNREDLLRKQRTFDNGSIPHQIHLGELHAILRRQEDFYPFLKDNREKIEKILTFRIPYYVGPLARGNSRFAWMTRKSEETITPWNFEEVVDKGASAQSFIERMTNFDKNLPNEKVLPKHSLLYEYFTVYNELTKVKYVTEGMRKPAFLSGEQKKAIVDLLFKTNRKVTVKQLKEDYFKKIECFDSVEISGVEDRFNASLGTYHDLLKIIKDKDFLDNEENEDILEDIVLTLTLFEDREMIEERLKTYAHLFDDKVMKQLKRRRYTGWGRLSRKLINGIRDKQSGKTILDFLKSDGFANRNFMQLIHDDSLTFKEDIQKAQVSGQGDSLHEHIANLAGSPAIKKGILQTVKVVDELVKVMGRHKPENIVIEMARENQTTQKGQKNSRERMKRIEEGIKELGSQILKEHPVENTQLQNEKLYLYYLQNGRDMYVDQELDINRLSDYDVDHIVPQSFLKDDSIDNKVLTRSDKARGKSDNVPSEEVVKKMKNYWRQLLNAKLITQRKFDNLTKAERGGLSELDKAGFIKRQLVETRQITKHVAQILDSRMNTKYDENDKLIREVKVITLKSKLVSDFRKDFQFYKVREINNYHHAHDAYLNAVVGTALIKKYPKLESEFVYGDYKVYDVRKMIAKSEQEIGKATAKYFFYSNIMNFFKTEITLANGEIRKRPLIETNGETGEIVWDKGRDFATVRKVLSMPQVNIVKKTEVQTGGFSKESILPKRNSDKLIARKKDWDPKKYGGFDSPTVAYSVLVVAKVEKGKSKKLKSVKELLGITIMERSSFEKNPIDFLEAKGYKEVKKDLIIKLPKYSLFELENGRKRMLASAGELQKGNELALPSKYVNFLYLASHYEKLKGSPEDNEQKQLFVEQHKHYLDEIIEQISEFSKRVILADANLDKVLSAYNKHRDKPIREQAENIIHLFTLTNLGAPAAFKYFDTTIDRKRYTSTKEVLDATLIHQSITGLYETRIDLSQLGGDGGGGGGSGGGGSGGGGSGGGGSGGGGSGGTLQLEEEYRLFEPESTQKQEMDIWLKNFPQAWAETGGMGTAHCQAPVLIQLKATATPISIRQYPMPHEAYQGIKPHIRRMLDQGILKPCQSPWNTPLLPVKKPGTEDYRPVQDLREVNKRVEDIHPTVPNPYNLLSTLPPSHPWYTVLDLKDAFFCLRLHSESQLLFAFEWRDPEIGLSGQLTWTRLPQGFKNSPTLFNEALHSDLADFRVRYPALVLLQYVDDLLLAAATRTECLEGTKALLETLGNKGYRASAKKAQICLQEVTYLGYSLKDGQRWLTKARKEAILSIPVPKNSRQVREFLGKAGYCRLFIPGFAELAAPLYPLTRPGTLFQWGTEQQLAFEDIKKALLSSPALGLPDITKPFELFIDENSGFAKGVLVQKLGPWKRPVAYLSKKLDTVASGWPPCLRMVAAIAILVKDAGKLTLGQPLTILTSHPVEALVRQPPNKWLSNARMTHYQAMLLDAERVHFGPTVSLNPATLLPLPSGGNHHDCLQILAETHGTRPDLTDQPLPDADLTWYTDGSSFIRNGEREAGAAVTTESEVIWAAPLPPGTSAQRAELIALTQALKMAEGKKLTVYTDSRYAFATTHVHGEIYRRRGWLTSEGKEIKNKNEILALLEALFLPKRLSIIHCPGHQKGDSPQAKGNRLADDTAKKAATETHSSLTVLPAGKRTADGSEFEKRTADGSEFESPKKKAKVE

SEQ ID NO: 1203 - protein, 2099 aa, synthetic construct
MPAAKRVKLDGGDKKYSIGLDIGTNSVGWAVITDEYKVPSKKFKVLGNTDRHSIKKNLIGALLFDSGETAEATRLKRTARRRYTRRKNRICYLQEIFSNEMAKVDDSFFHRLEESFLVEEDKKHERHPIFGNIVDEVAYHEKYPTIYHLRKKLVDSTDKADLRLIYLALAHMIKFRGHFLIEGDLNPDNSDVDKLFIQLVQTYNQLFEENPINASGVDAKAILSARLSKSRRLENLIAQLPGEKKNGLFGNLIALSLGLTPNFKSNFDLAEDAKLQLSKDTYDDDLDNLLAQIGDQYADLFLAAKNLSDAILLSDILRVNTEITKAPLSASMIKRYDEHHQDLTLLKALVRQQLPEKYKEIFFDQSKNGYAGYIDGGASQEEFYKFIKPILEKMDGTEELLVKLNREDLLRKQRTFDNGSIPHQIHLGELHAILRRQEDFYPFLKDNREKIEKILTFRIPYYVGPLARGNSRFAWMTRKSEETITPWNFEEVVDKGASAQSFIERMTNFDKNLPNEKVLPKHSLLYEYFTVYNELTKVKYVTEGMRKPAFLSGEQKKAIVDLLFKTNRKVTVKQLKEDYFKKIECFDSVEISGVEDRFNASLGTYHDLLKIIKDKDFLDNEENEDILEDIVLTLTLFEDREMIEERLKTYAHLFDDKVMKQLKRRRYTGWGRLSRKLINGIRDKQSGKTILDFLKSDGFANRNFMQLIHDDSLTFKEDIQKAQVSGQGDSLHEHIANLAGSPAIKKGILQTVKVVDELVKVMGRHKPENIVIEMARENQTTQKGQKNSRERMKRIEEGIKELGSQILKEHPVENTQLQNEKLYLYYLQNGRDMYVDQELDINRLSDYDVDHIVPQSFLKDDSIDNKVLTRSDKARGKSDNVPSEEVVKKMKNYWRQLLNAKLITQRKFDNLTKAERGGLSELDKAGFIKRQLVETRQITKHVAQILDSRMNTKYDENDKLIREVKVITLKSKLVSDFRKDFQFYKVREINNYHHAHDAYLNAVVGTALIKKYPKLESEFVYGDYKVYDVRKMIAKSEQEIGKATAKYFFYSNIMNFFKTEITLANGEIRKRPLIETNGETGEIVWDKGRDFATVRKVLSMPQVNIVKKTEVQTGGFSKESILPKRNSDKLIARKKDWDPKKYGGFDSPTVAYSVLVVAKVEKGKSKKLKSVKELLGITIMERSSFEKNPIDFLEAKGYKEVKKDLIIKLPKYSLFELENGRKRMLASAGELQKGNELALPSKYVNFLYLASHYEKLKGSPEDNEQKQLFVEQHKHYLDEIIEQISEFSKRVILADANLDKVLSAYNKHRDKPIREQAENIIHLFTLTNLGAPAAFKYFDTTIDRKRYTSTKEVLDATLIHQSITGLYETRIDLSQLGGDGGGGGGSEAAAKGGGGSGGTLQLEEEYRLFEPESTQKQEMDIWLKNFPQAWAETGGMGTAHCQAPVLIQLKATATPISIRQYPMPHEAYQGIKPHIRRMLDQGILKPCQSPWNTPLLPVKKPGTEDYRPVQDLREVNKRVEDIHPTVPNPYNLLSTLPPSHPWYTVLDLKDAFFCLRLHSESQLLFAFEWRDPEIGLSGQLTWTRLPQGFKNSPTLFNEALHSDLADFRVRYPALVLLQYVDDLLLAAATRTECLEGTKALLETLGNKGYRASAKKAQICLQEVTYLGYSLKDGQRWLTKARKEAILSIPVPKNSRQVREFLGKAGYCRLFIPGFAELAAPLYPLTRPGTLFQWGTEQQLAFEDIKKALLSSPALGLPDITKPFELFIDENSGFAKGVLVQKLGPWKRPVAYLSKKLDTVASGWPPCLRMVAAIAILVKDAGKLTLGQPLTILTSHPVEALVRQPPNKWLSNARMTHYQAMLLDAERVHFGPTVSLNPATLLPLPSGGNHHDCLQILAETHGTRPDLTDQPLPDADLTWYTDGSSFIRNGEREAGAAVTTESEVIWAAPLPPGTSAQRAELIALTQALKMAEGKKLTVYTDSRYAFATTHVHGEIYRRRGWLTSEGKEIKNKNEILALLEALFLPKRLSIIHCPGHQKGDSPQAKGNRLADDTAKKAATETHSSLTVLPAGKRTADGSEFEKRTADGSEFESPKKKAKVE

SEQ ID NO: 1204 - protein, 2092 aa, synthetic construct
MPAAKRVKLDGGDKKYSIGLDIGTNSVGWAVITDEYKVPSKKFKVLGNTDRHSIKKNLIGALLFDSGETAEATRLKRTARRRYTRRKNRICYLQEIFSNEMAKVDDSFFHRLEESFLVEEDKKHERHPIFGNIVDEVAYHEKYPTIYHLRKKLVDSTDKADLRLIYLALAHMIKFRGHFLIEGDLNPDNSDVDKLFIQLVQTYNQLFEENPINASGVDAKAILSARLSKSRRLENLIAQLPGEKKNGLFGNLIALSLGLTPNFKSNFDLAEDAKLQLSKDTYDDDLDNLLAQIGDQYADLFLAAKNLSDAILLSDILRVNTEITKAPLSASMIKRYDEHHQDLTLLKALVRQQLPEKYKEIFFDQSKNGYAGYIDGGASQEEFYKFIKPILEKMDGTEELLVKLNREDLLRKQRTFDNGSIPHQIHLGELHAILRRQEDFYPFLKDNREKIEKILTFRIPYYVGPLARGNSRFAWMTRKSEETITPWNFEEVVDKGASAQSFIERMTNFDKNLPNEKVLPKHSLLYEYFTVYNELTKVKYVTEGMRKPAFLSGEQKKAIVDLLFKTNRKVTVKQLKEDYFKKIECFDSVEISGVEDRFNASLGTYHDLLKIIKDKDFLDNEENEDILEDIVLTLTLFEDREMIEERLKTYAHLFDDKVMKQLKRRRYTGWGRLSRKLINGIRDKQSGKTILDFLKSDGFANRNFMQLIHDDSLTFKEDIQKAQVSGQGDSLHEHIANLAGSPAIKKGILQTVKVVDELVKVMGRHKPENIVIEMARENQTTQKGQKNSRERMKRIEEGIKELGSQILKEHPVENTQLQNEKLYLYYLQNGRDMYVDQELDINRLSDYDVDHIVPQSFLKDDSIDNKVLTRSDKARGKSDNVPSEEVVKKMKNYWRQLLNAKLITQRKFDNLTKAERGGLSELDKAGFIKRQLVETRQITKHVAQILDSRMNTKYDENDKLIREVKVITLKSKLVSDFRKDFQFYKVREINNYHHAHDAYLNAVVGTALIKKYPKLESEFVYGDYKVYDVRKMIAKSEQEIGKATAKYFFYSNIMNFFKTEITLANGEIRKRPLIETNGETGEIVWDKGRDFATVRKVLSMPQVNIVKKTEVQTGGFSKESILPKRNSDKLIARKKDWDPKKYGGFDSPTVAYSVLVVAKVEKGKSKKLKSVKELLGITIMERSSFEKNPIDFLEAKGYKEVKKDLIIKLPKYSLFELENGRKRMLASAGELQKGNELALPSKYVNFLYLASHYEKLKGSPEDNEQKQLFVEQHKHYLDEIIEQISEFSKRVILADANLDKVLSAYNKHRDKPIREQAENIIHLFTLTNLGAPAAFKYFDTTIDRKRYTSTKEVLDATLIHQSITGLYETRIDLSQLGGDGGGGSEAAAKGGTLQLEEEYRLFEPESTQKQEMDIWLKNFPQAWAETGGMGTAHCQAPVLIQLKATATPISIRQYPMPHEAYQGIKPHIRRMLDQGILKPCQSPWNTPLLPVKKPGTEDYRPVQDLREVNKRVEDIHPTVPNPYNLLSTLPPSHPWYTVLDLKDAFFCLRLHSESQLLFAFEWRDPEIGLSGQLTWTRLPQGFKNSPTLFNEALHSDLADFRVRYPALVLLQYVDDLLLAAATRTECLEGTKALLETLGNKGYRASAKKAQICLQEVTYLGYSLKDGQRWLTKARKEAILSIPVPKNSRQVREFLGKAGYCRLFIPGFAELAAPLYPLTRPGTLFQWGTEQQLAFEDIKKALLSSPALGLPDITKPFELFIDENSGFAKGVLVQKLGPWKRPVAYLSKKLDTVASGWPPCLRMVAAIAILVKDAGKLTLGQPLTILTSHPVEALVRQPPNKWLSNARMTHYQAMLLDAERVHFGPTVSLNPATLLPLPSGGNHHDCLQILAETHGTRPDLTDQPLPDADLTWYTDGSSFIRNGEREAGAAVTTESEVIWAAPLPPGTSAQRAELIALTQALKMAEGKKLTVYTDSRYAFATTHVHGEIYRRRGWLTSEGKEIKNKNEILALLEALFLPKRLSIIHCPGHQKGDSPQAKGNRLADDTAKKAATETHSSLTVLPAGKRTADGSEFEKRTADGSEFESPKKKAKVE

SEQ ID NO: 1205 - protein, 2100 aa, synthetic construct
MPAAKRVKLDGGDKKYSIGLDIGTNSVGWAVITDEYKVPSKKFKVLGNTDRHSIKKNLIGALLFDSGETAEATRLKRTARRRYTRRKNRICYLQEIFSNEMAKVDDSFFHRLEESFLVEEDKKHERHPIFGNIVDEVAYHEKYPTIYHLRKKLVDSTDKADLRLIYLALAHMIKFRGHFLIEGDLNPDNSDVDKLFIQLVQTYNQLFEENPINASGVDAKAILSARLSKSRRLENLIAQLPGEKKNGLFGNLIALSLGLTPNFKSNFDLAEDAKLQLSKDTYDDDLDNLLAQIGDQYADLFLAAKNLSDAILLSDILRVNTEITKAPLSASMIKRYDEHHQDLTLLKALVRQQLPEKYKEIFFDQSKNGYAGYIDGGASQEEFYKFIKPILEKMDGTEELLVKLNREDLLRKQRTFDNGSIPHQIHLGELHAILRRQEDFYPFLKDNREKIEKILTFRIPYYVGPLARGNSRFAWMTRKSEETITPWNFEEVVDKGASAQSFIERMTNFDKNLPNEKVLPKHSLLYEYFTVYNELTKVKYVTEGMRKPAFLSGEQKKAIVDLLFKTNRKVTVKQLKEDYFKKIECFDSVEISGVEDRFNASLGTYHDLLKIIKDKDFLDNEENEDILEDIVLTLTLFEDREMIEERLKTYAHLFDDKVMKQLKRRRYTGWGRLSRKLINGIRDKQSGKTILDFLKSDGFANRNFMQLIHDDSLTFKEDIQKAQVSGQGDSLHEHIANLAGSPAIKKGILQTVKVVDELVKVMGRHKPENIVIEMARENQTTQKGQKNSRERMKRIEEGIKELGSQILKEHPVENTQLQNEKLYLYYLQNGRDMYVDQELDINRLSDYDVDHIVPQSFLKDDSIDNKVLTRSDKARGKSDNVPSEEVVKKMKNYWRQLLNAKLITQRKFDNLTKAERGGLSELDKAGFIKRQLVETRQITKHVAQILDSRMNTKYDENDKLIREVKVITLKSKLVSDFRKDFQFYKVREINNYHHAHDAYLNAVVGTALIKKYPKLESEFVYGDYKVYDVRKMIAKSEQEIGKATAKYFFYSNIMNFFKTEITLANGEIRKRPLIETNGETGEIVWDKGRDFATVRKVLSMPQVNIVKKTEVQTGGFSKESILPKRNSDKLIARKKDWDPKKYGGFDSPTVAYSVLVVAKVEKGKSKKLKSVKELLGITIMERSSFEKNPIDFLEAKGYKEVKKDLIIKLPKYSLFELENGRKRMLASAGELQKGNELALPSKYVNFLYLASHYEKLKGSPEDNEQKQLFVEQHKHYLDEIIEQISEFSKRVILADANLDKVLSAYNKHRDKPIREQAENIIHLFTLTNLGAPAAFKYFDTTIDRKRYTSTKEVLDATLIHQSITGLYETRIDLSQLGGDGGSGSETPGTSESATPESGGTLQLEEEYRLFEPESTQKQEMDIWLKNFPQAWAETGGMGTAHCQAPVLIQLKATATPISIRQYPMPHEAYQGIKPHIRRMLDQGILKPCQSPWNTPLLPVKKPGTEDYRPVQDLREVNKRVEDIHPTVPNPYNLLSTLPPSHPWYTVLDLKDAFFCLRLHSESQLLFAFEWRDPEIGLSGQLTWTRLPQGFKNSPTLFNEALHSDLADFRVRYPALVLLQYVDDLLLAAATRTECLEGTKALLETLGNKGYRASAKKAQICLQEVTYLGYSLKDGQRWLTKARKEAILSIPVPKNSRQVREFLGKAGYCRLFIPGFAELAAPLYPLTRPGTLFQWGTEQQLAFEDIKKALLSSPALGLPDITKPFELFIDENSGFAKGVLVQKLGPWKRPVAYLSKKLDTVASGWPPCLRMVAAIAILVKDAGKLTLGQPLTILTSHPVEALVRQPPNKWLSNARMTHYQAMLLDAERVHFGPTVSLNPATLLPLPSGGNHHDCLQILAETHGTRPDLTDQPLPDADLTWYTDGSSFIRNGEREAGAAVTTESEVIWAAPLPPGTSAQRAELIALTQALKMAEGKKLTVYTDSRYAFATTHVHGEIYRRRGWLTSEGKEIKNKNEILALLEALFLPKRLSIIHCPGHQKGDSPQAKGNRLADDTAKKAATETHSSLTVLPAGKRTADGSEFEKRTADGSEFESPKKKAKVE

SEQ ID NO: 1206 - protein, 2094 aa, synthetic construct
MPAAKRVKLDGGDKKYSIGLDIGTNSVGWAVITDEYKVPSKKFKVLGNTDRHSIKKNLIGALLFDSGETAEATRLKRTARRRYTRRKNRICYLQEIFSNEMAKVDDSFFHRLEESFLVEEDKKHERHPIFGNIVDEVAYHEKYPTIYHLRKKLVDSTDKADLRLIYLALAHMIKFRGHFLIEGDLNPDNSDVDKLFIQLVQTYNQLFEENPINASGVDAKAILSARLSKSRRLENLIAQLPGEKKNGLFGNLIALSLGLTPNFKSNFDLAEDAKLQLSKDTYDDDLDNLLAQIGDQYADLFLAAKNLSDAILLSDILRVNTEITKAPLSASMIKRYDEHHQDLTLLKALVRQQLPEKYKEIFFDQSKNGYAGYIDGGASQEEFYKFIKPILEKMDGTEELLVKLNREDLLRKQRTFDNGSIPHQIHLGELHAILRRQEDFYPFLKDNREKIEKILTFRIPYYVGPLARGNSRFAWMTRKSEETITPWNFEEVVDKGASAQSFIERMTNFDKNLPNEKVLPKHSLLYEYFTVYNELTKVKYVTEGMRKPAFLSGEQKKAIVDLLFKTNRKVTVKQLKEDYFKKIECFDSVEISGVEDRFNASLGTYHDLLKIIKDKDFLDNEENEDILEDIVLTLTLFEDREMIEERLKTYAHLFDDKVMKQLKRRRYTGWGRLSRKLINGIRDKQSGKTILDFLKSDGFANRNFMQLIHDDSLTFKEDIQKAQVSGQGDSLHEHIANLAGSPAIKKGILQTVKVVDELVKVMGRHKPENIVIEMARENQTTQKGQKNSRERMKRIEEGIKELGSQILKEHPVENTQLQNEKLYLYYLQNGRDMYVDQELDINRLSDYDVDHIVPQSFLKDDSIDNKVLTRSDKARGKSDNVPSEEVVKKMKNYWRQLLNAKLITQRKFDNLTKAERGGLSELDKAGFIKRQLVETRQITKHVAQILDSRMNTKYDENDKLIREVKVITLKSKLVSDFRKDFQFYKVREINNYHHAHDAYLNAVVGTALIKKYPKLESEFVYGDYKVYDVRKMIAKSEQEIGKATAKYFFYSNIMNFFKTEITLANGEIRKRPLIETNGETGEIVWDKGRDFATVRKVLSMPQVNIVKKTEVQTGGFSKESILPKRNSDKLIARKKDWDPKKYGGFDSPTVAYSVLVVAKVEKGKSKKLKSVKELLGITIMERSSFEKNPIDFLEAKGYKEVKKDLIIKLPKYSLFELENGRKRMLASAGELQKGNELALPSKYVNFLYLASHYEKLKGSPEDNEQKQLFVEQHKHYLDEIIEQISEFSKRVILADANLDKVLSAYNKHRDKPIREQAENIIHLFTLTNLGAPAAFKYFDTTIDRKRYTSTKEVLDATLIHQSITGLYETRIDLSQLGGDGGEAAAKEAAAKGGTLQLEEEYRLFEPESTQKQEMDIWLKNFPQAWAETGGMGTAHCQAPVLIQLKATATPISIRQYPMPHEAYQGIKPHIRRMLDQGILKPCQSPWNTPLLPVKKPGTEDYRPVQDLREVNKRVEDIHPTVPNPYNLLSTLPPSHPWYTVLDLKDAFFCLRLHSESQLLFAFEWRDPEIGLSGQLTWTRLPQGFKNSPTLFNEALHSDLADFRVRYPALVLLQYVDDLLLAAATRTECLEGTKALLETLGNKGYRASAKKAQICLQEVTYLGYSLKDGQRWLTKARKEAILSIPVPKNSRQVREFLGKAGYCRLFIPGFAELAAPLYPLTRPGTLFQWGTEQQLAFEDIKKALLSSPALGLPDITKPFELFIDENSGFAKGVLVQKLGPWKRPVAYLSKKLDTVASGWPPCLRMVAAIAILVKDAGKLTLGQPLTILTSHPVEALVRQPPNKWLSNARMTHYQAMLLDAERVHFGPTVSLNPATLLPLPSGGNHHDCLQILAETHGTRPDLTDQPLPDADLTWYTDGSSFIRNGEREAGAAVTTESEVIWAAPLPPGTSAQRAELIALTQALKMAEGKKLTVYTDSRYAFATTHVHGEIYRRRGWLTSEGKEIKNKNEILALLEALFLPKRLSIIHCPGHQKGDSPQAKGNRLADDTAKKAATETHSSLTVLPAGKRTADGSEFEKRTADGSEFESPKKKAKVE

SEQ ID NO: 1207 - protein, 2096 aa, synthetic construct
MPAAKRVKLDGGDKKYSIGLDIGTNSVGWAVITDEYKVPSKKFKVLGNTDRHSIKKNLIGALLFDSGETAEATRLKRTARRRYTRRKNRICYLQEIFSNEMAKVDDSFFHRLEESFLVEEDKKHERHPIFGNIVDEVAYHEKYPTIYHLRKKLVDSTDKADLRLIYLALAHMIKFRGHFLIEGDLNPDNSDVDKLFIQLVQTYNQLFEENPINASGVDAKAILSARLSKSRRLENLIAQLPGEKKNGLFGNLIALSLGLTPNFKSNFDLAEDAKLQLSKDTYDDDLDNLLAQIGDQYADLFLAAKNLSDAILLSDILRVNTEITKAPLSASMIKRYDEHHQDLTLLKALVRQQLPEKYKEIFFDQSKNGYAGYIDGGASQEEFYKFIKPILEKMDGTEELLVKLNREDLLRKQRTFDNGSIPHQIHLGELHAILRRQEDFYPFLKDNREKIEKILTFRIPYYVGPLARGNSRFAWMTRKSEETITPWNFEEVVDKGASAQSFIERMTNFDKNLPNEKVLPKHSLLYEYFTVYNELTKVKYVTEGMRKPAFLSGEQKKAIVDLLFKTNRKVTVKQLKEDYFKKIECFDSVEISGVEDRFNASLGTYHDLLKIIKDKDFLDNEENEDILEDIVLTLTLFEDREMIEERLKTYAHLFDDKVMKQLKRRRYTGWGRLSRKLINGIRDKQSGKTILDFLKSDGFANRNFMQLIHDDSLTFKEDIQKAQVSGQGDSLHEHIANLAGSPAIKKGILQTVKVVDELVKVMGRHKPENIVIEMARENQTTQKGQKNSRERMKRIEEGIKELGSQILKEHPVENTQLQNEKLYLYYLQNGRDMYVDQELDINRLSDYDVDHIVPQSFLKDDSIDNKVLTRSDKARGKSDNVPSEEVVKKMKNYWRQLLNAKLITQRKFDNLTKAERGGLSELDKAGFIKRQLVETRQITKHVAQILDSRMNTKYDENDKLIREVKVITLKSKLVSDFRKDFQFYKVREINNYHHAHDAYLNAVVGTALIKKYPKLESEFVYGDYKVYDVRKMIAKSEQEIGKATAKYFFYSNIMNFFKTEITLANGEIRKRPLIETNGETGEIVWDKGRDFATVRKVLSMPQVNIVKKTEVQTGGFSKESILPKRNSDKLIARKKDWDPKKYGGFDSPTVAYSVLVVAKVEKGKSKKLKSVKELLGITIMERSSFEKNPIDFLEAKGYKEVKKDLIIKLPKYSLFELENGRKRMLASAGELQKGNELALPSKYVNFLYLASHYEKLKGSPEDNEQKQLFVEQHKHYLDEIIEQISEFSKRVILADANLDKVLSAYNKHRDKPIREQAENIIHLFTLTNLGAPAAFKYFDTTIDRKRYTSTKEVLDATLIHQSITGLYETRIDLSQLGGDGGGGSGGSGGSGGSGGTLQLEEEYRLFEPESTQKQEMDIWLKNFPQAWAETGGMGTAHCQAPVLIQLKATATPISIRQYPMPHEAYQGIKPHIRRMLDQGILKPCQSPWNTPLLPVKKPGTEDYRPVQDLREVNKRVEDIHPTVPNPYNLLSTLPPSHPWYTVLDLKDAFFCLRLHSESQLLFAFEWRDPEIGLSGQLTWTRLPQGFKNSPTLFNEALHSDLADFRVRYPALVLLQYVDDLLLAAATRTECLEGTKALLETLGNKGYRASAKKAQICLQEVTYLGYSLKDGQRWLTKARKEAILSIPVPKNSRQVREFLGKAGYCRLFIPGFAELAAPLYPLTRPGTLFQWGTEQQLAFEDIKKALLSSPALGLPDITKPFELFIDENSGFAKGVLVQKLGPWKRPVAYLSKKLDTVASGWPPCLRMVAAIAILVKDAGKLTLGQPLTILTSHPVEALVRQPPNKWLSNARMTHYQAMLLDAERVHFGPTVSLNPATLLPLPSGGNHHDCLQILAETHGTRPDLTDQPLPDADLTWYTDGSSFIRNGEREAGAAVTTESEVIWAAPLPPGTSAQRAELIALTQALKMAEGKKLTVYTDSRYAFATTHVHGEIYRRRGWLTSEGKEIKNKNEILALLEALFLPKRLSIIHCPGHQKGDSPQAKGNRLADDTAKKAATETHSSLTVLPAGKRTADGSEFEKRTADGSEFESPKKKAKVE

SEQ ID NO: 1208 - protein, 2095 aa, synthetic construct
MPAAKRVKLDGGDKKYSIGLDIGTNSVGWAVITDEYKVPSKKFKVLGNTDRHSIKKNLIGALLFDSGETAEATRLKRTARRRYTRRKNRICYLQEIFSNEMAKVDDSFFHRLEESFLVEEDKKHERHPIFGNIVDEVAYHEKYPTIYHLRKKLVDSTDKADLRLIYLALAHMIKFRGHFLIEGDLNPDNSDVDKLFIQLVQTYNQLFEENPINASGVDAKAILSARLSKSRRLENLIAQLPGEKKNGLFGNLIALSLGLTPNFKSNFDLAEDAKLQLSKDTYDDDLDNLLAQIGDQYADLFLAAKNLSDAILLSDILRVNTEITKAPLSASMIKRYDEHHQDLTLLKALVRQQLPEKYKEIFFDQSKNGYAGYIDGGASQEEFYKFIKPILEKMDGTEELLVKLNREDLLRKQRTFDNGSIPHQIHLGELHAILRRQEDFYPFLKDNREKIEKILTFRIPYYVGPLARGNSRFAWMTRKSEETITPWNFEEVVDKGASAQSFIERMTNFDKNLPNEKVLPKHSLLYEYFTVYNELTKVKYVTEGMRKPAFLSGEQKKAIVDLLFKTNRKVTVKQLKEDYFKKIECFDSVEISGVEDRFNASLGTYHDLLKIIKDKDFLDNEENEDILEDIVLTLTLFEDREMIEERLKTYAHLFDDKVMKQLKRRRYTGWGRLSRKLINGIRDKQSGKTILDFLKSDGFANRNFMQLIHDDSLTFKEDIQKAQVSGQGDSLHEHIANLAGSPAIKKGILQTVKVVDELVKVMGRHKPENIVIEMARENQTTQKGQKNSRERMKRIEEGIKELGSQILKEHPVENTQLQNEKLYLYYLQNGRDMYVDQELDINRLSDYDVDHIVPQSFLKDDSIDNKVLTRSDKARGKSDNVPSEEVVKKMKNYWRQLLNAKLITQRKFDNLTKAERGGLSELDKAGFIKRQLVETRQITKHVAQILDSRMNTKYDENDKLIREVKVITLKSKLVSDFRKDFQFYKVREINNYHHAHDAYLNAVVGTALIKKYPKLESEFVYGDYKVYDVRKMIAKSEQEIGKATAKYFFYSNIMNFFKTEITLANGEIRKRPLIETNGETGEIVWDKGRDFATVRKVLSMPQVNIVKKTEVQTGGFSKESILPKRNSDKLIARKKDWDPKKYGGFDSPTVAYSVLVVAKVEKGKSKKLKSVKELLGITIMERSSFEKNPIDFLEAKGYKEVKKDLIIKLPKYSLFELENGRKRMLASAGELQKGNELALPSKYVNFLYLASHYEKLKGSPEDNEQKQLFVEQHKHYLDEIIEQISEFSKRVILADANLDKVLSAYNKHRDKPIREQAENIIHLFTLTNLGAPAAFKYFDTTIDRKRYTSTKEVLDATLIHQSITGLYETRIDLSQLGGDGGPAPEAAAKGSSGGTLQLEEEYRLFEPESTQKQEMDIWLKNFPQAWAETGGMGTAHCQAPVLIQLKATATPISIRQYPMPHEAYQGIKPHIRRMLDQGILKPCQSPWNTPLLPVKKPGTEDYRPVQDLREVNKRVEDIHPTVPNPYNLLSTLPPSHPWYTVLDLKDAFFCLRLHSESQLLFAFEWRDPEIGLSGQLTWTRLPQGFKNSPTLFNEALHSDLADFRVRYPALVLLQYVDDLLLAAATRTECLEGTKALLETLGNKGYRASAKKAQICLQEVTYLGYSLKDGQRWLTKARKEAILSIPVPKNSRQVREFLGKAGYCRLFIPGFAELAAPLYPLTRPGTLFQWGTEQQLAFEDIKKALLSSPALGLPDITKPFELFIDENSGFAKGVLVQKLGPWKRPVAYLSKKLDTVASGWPPCLRMVAAIAILVKDAGKLTLGQPLTILTSHPVEALVRQPPNKWLSNARMTHYQAMLLDAERVHFGPTVSLNPATLLPLPSGGNHHDCLQILAETHGTRPDLTDQPLPDADLTWYTDGSSFIRNGEREAGAAVTTESEVIWAAPLPPGTSAQRAELIALTQALKMAEGKKLTVYTDSRYAFATTHVHGEIYRRRGWLTSEGKEIKNKNEILALLEALFLPKRLSIIHCPGHQKGDSPQAKGNRLADDTAKKAATETHSSLTVLPAGKRTADGSEFEKRTADGSEFESPKKKAKVE

SEQ ID NO: 1209 - protein, 2114 aa, synthetic construct
MPAAKRVKLDGGDKKYSIGLDIGTNSVGWAVITDEYKVPSKKFKVLGNTDRHSIKKNLIGALLFDSGETAEATRLKRTARRRYTRRKNRICYLQEIFSNEMAKVDDSFFHRLEESFLVEEDKKHERHPIFGNIVDEVAYHEKYPTIYHLRKKLVDSTDKADLRLIYLALAHMIKFRGHFLIEGDLNPDNSDVDKLFIQLVQTYNQLFEENPINASGVDAKAILSARLSKSRRLENLIAQLPGEKKNGLFGNLIALSLGLTPNFKSNFDLAEDAKLQLSKDTYDDDLDNLLAQIGDQYADLFLAAKNLSDAILLSDILRVNTEITKAPLSASMIKRYDEHHQDLTLLKALVRQQLPEKYKEIFFDQSKNGYAGYIDGGASQEEFYKFIKPILEKMDGTEELLVKLNREDLLRKQRTFDNGSIPHQIHLGELHAILRRQEDFYPFLKDNREKIEKILTFRIPYYVGPLARGNSRFAWMTRKSEETITPWNFEEVVDKGASAQSFIERMTNFDKNLPNEKVLPKHSLLYEYFTVYNELTKVKYVTEGMRKPAFLSGEQKKAIVDLLFKTNRKVTVKQLKEDYFKKIECFDSVEISGVEDRFNASLGTYHDLLKIIKDKDFLDNEENEDILEDIVLTLTLFEDREMIEERLKTYAHLFDDKVMKQLKRRRYTGWGRLSRKLINGIRDKQSGKTILDFLKSDGFANRNFMQLIHDDSLTFKEDIQKAQVSGQGDSLHEHIANLAGSPAIKKGILQTVKVVDELVKVMGRHKPENIVIEMARENQTTQKGQKNSRERMKRIEEGIKELGSQILKEHPVENTQLQNEKLYLYYLQNGRDMYVDQELDINRLSDYDVDHIVPQSFLKDDSIDNKVLTRSDKARGKSDNVPSEEVVKKMKNYWRQLLNAKLITQRKFDNLTKAERGGLSELDKAGFIKRQLVETRQITKHVAQILDSRMNTKYDENDKLIREVKVITLKSKLVSDFRKDFQFYKVREINNYHHAHDAYLNAVVGTALIKKYPKLESEFVYGDYKVYDVRKMIAKSEQEIGKATAKYFFYSNIMNFFKTEITLANGEIRKRPLIETNGETGEIVWDKGRDFATVRKVLSMPQVNIVKKTEVQTGGFSKESILPKRNSDKLIARKKDWDPKKYGGFDSPTVAYSVLVVAKVEKGKSKKLKSVKELLGITIMERSSFEKNPIDFLEAKGYKEVKKDLIIKLPKYSLFELENGRKRMLASAGELQKGNELALPSKYVNFLYLASHYEKLKGSPEDNEQKQLFVEQHKHYLDEIIEQISEFSKRVILADANLDKVLSAYNKHRDKPIREQAENIIHLFTLTNLGAPAAFKYFDTTIDRKRYTSTKEVLDATLIHQSITGLYETRIDLSQLGGDGGGGGGSGGGGSGGGGSGGGGSGGGGSGGGGSGGTLQLEEEYRLFEPESTQKQEMDIWLKNFPQAWAETGGMGTAHCQAPVLIQLKATATPISIRQYPMPHEAYQGIKPHIRRMLDQGILKPCQSPWNTPLLPVKKPGTEDYRPVQDLREVNKRVEDIHPTVPNPYNLLSTLPPSHPWYTVLDLKDAFFCLRLHSESQLLFAFEWRDPEIGLSGQLTWTRLPQGFKNSPTLFNEALHSDLADFRVRYPALVLLQYVDDLLLAAATRTECLEGTKALLETLGNKGYRASAKKAQICLQEVTYLGYSLKDGQRWLTKARKEAILSIPVPKNSRQVREFLGKAGYCRLFIPGFAELAAPLYPLTRPGTLFQWGTEQQLAFEDIKKALLSSPALGLPDITKPFELFIDENSGFAKGVLVQKLGPWKRPVAYLSKKLDTVASGWPPCLRMVAAIAILVKDAGKLTLGQPLTILTSHPVEALVRQPPNKWLSNARMTHYQAMLLDAERVHFGPTVSLNPATLLPLPSGGNHHDCLQILAETHGTRPDLTDQPLPDADLTWYTDGSSFIRNGEREAGAAVTTESEVIWAAPLPPGTSAQRAELIALTQALKMAEGKKLTVYTDSRYAFATTHVHGEIYRRRGWLTSEGKEIKNKNEILALLEALFLPKRLSIIHCPGHQKGDSPQAKGNRLADDTAKKAATETHSSLTVLPAGKRTADGSEFEKRTADGSEFESPKKKAKVE

SEQ ID NO: 1210 - protein, 2095 aa, synthetic construct
MPAAKRVKLDGGDKKYSIGLDIGTNSVGWAVITDEYKVPSKKFKVLGNTDRHSIKKNLIGALLFDSGETAEATRLKRTARRRYTRRKNRICYLQEIFSNEMAKVDDSFFHRLEESFLVEEDKKHERHPIFGNIVDEVAYHEKYPTIYHLRKKLVDSTDKADLRLIYLALAHMIKFRGHFLIEGDLNPDNSDVDKLFIQLVQTYNQLFEENPINASGVDAKAILSARLSKSRRLENLIAQLPGEKKNGLFGNLIALSLGLTPNFKSNFDLAEDAKLQLSKDTYDDDLDNLLAQIGDQYADLFLAAKNLSDAILLSDILRVNTEITKAPLSASMIKRYDEHHQDLTLLKALVRQQLPEKYKEIFFDQSKNGYAGYIDGGASQEEFYKFIKPILEKMDGTEELLVKLNREDLLRKQRTFDNGSIPHQIHLGELHAILRRQEDFYPFLKDNREKIEKILTFRIPYYVGPLARGNSRFAWMTRKSEETITPWNFEEVVDKGASAQSFIERMTNFDKNLPNEKVLPKHSLLYEYFTVYNELTKVKYVTEGMRKPAFLSGEQKKAIVDLLFKTNRKVTVKQLKEDYFKKIECFDSVEISGVEDRFNASLGTYHDLLKIIKDKDFLDNEENEDILEDIVLTLTLFEDREMIEERLKTYAHLFDDKVMKQLKRRRYTGWGRLSRKLINGIRDKQSGKTILDFLKSDGFANRNFMQLIHDDSLTFKEDIQKAQVSGQGDSLHEHIANLAGSPAIKKGILQTVKVVDELVKVMGRHKPENIVIEMARENQTTQKGQKNSRERMKRIEEGIKELGSQILKEHPVENTQLQNEKLYLYYLQNGRDMYVDQELDINRLSDYDVDHIVPQSFLKDDSIDNKVLTRSDKARGKSDNVPSEEVVKKMKNYWRQLLNAKLITQRKFDNLTKAERGGLSELDKAGFIKRQLVETRQITKHVAQILDSRMNTKYDENDKLIREVKVITLKSKLVSDFRKDFQFYKVREINNYHHAHDAYLNAVVGTALIKKYPKLESEFVYGDYKVYDVRKMIAKSEQEIGKATAKYFFYSNIMNFFKTEITLANGEIRKRPLIETNGETGEIVWDKGRDFATVRKVLSMPQVNIVKKTEVQTGGFSKESILPKRNSDKLIARKKDWDPKKYGGFDSPTVAYSVLVVAKVEKGKSKKLKSVKELLGITIMERSSFEKNPIDFLEAKGYKEVKKDLIIKLPKYSLFELENGRKRMLASAGELQKGNELALPSKYVNFLYLASHYEKLKGSPEDNEQKQLFVEQHKHYLDEIIEQISEFSKRVILADANLDKVLSAYNKHRDKPIREQAENIIHLFTLTNLGAPAAFKYFDTTIDRKRYTSTKEVLDATLIHQSITGLYETRIDLSQLGGDGGEAAAKGSSGGGGGTLQLEEEYRLFEPESTQKQEMDIWLKNFPQAWAETGGMGTAHCQAPVLIQLKATATPISIRQYPMPHEAYQGIKPHIRRMLDQGILKPCQSPWNTPLLPVKKPGTEDYRPVQDLREVNKRVEDIHPTVPNPYNLLSTLPPSHPWYTVLDLKDAFFCLRLHSESQLLFAFEWRDPEIGLSGQLTWTRLPQGFKNSPTLFNEALHSDLADFRVRYPALVLLQYVDDLLLAAATRTECLEGTKALLETLGNKGYRASAKKAQICLQEVTYLGYSLKDGQRWLTKARKEAILSIPVPKNSRQVREFLGKAGYCRLFIPGFAELAAPLYPLTRPGTLFQWGTEQQLAFEDIKKALLSSPALGLPDITKPFELFIDENSGFAKGVLVQKLGPWKRPVAYLSKKLDTVASGWPPCLRMVAAIAILVKDAGKLTLGQPLTILTSHPVEALVRQPPNKWLSNARMTHYQAMLLDAERVHFGPTVSLNPATLLPLPSGGNHHDCLQILAETHGTRPDLTDQPLPDADLTWYTDGSSFIRNGEREAGAAVTTESEVIWAAPLPPGTSAQRAELIALTQALKMAEGKKLTVYTDSRYAFATTHVHGEIYRRRGWLTSEGKEIKNKNEILALLEALFLPKRLSIIHCPGHQKGDSPQAKGNRLADDTAKKAATETHSSLTVLPAGKRTADGSEFEKRTADGSEFESPKKKAKVE

SEQ ID NO: 1211 - protein, 2090 aa, synthetic construct
MPAAKRVKLDGGDKKYSIGLDIGTNSVGWAVITDEYKVPSKKFKVLGNTDRHSIKKNLIGALLFDSGETAEATRLKRTARRRYTRRKNRICYLQEIFSNEMAKVDDSFFHRLEESFLVEEDKKHERHPIFGNIVDEVAYHEKYPTIYHLRKKLVDSTDKADLRLIYLALAHMIKFRGHFLIEGDLNPDNSDVDKLFIQLVQTYNQLFEENPINASGVDAKAILSARLSKSRRLENLIAQLPGEKKNGLFGNLIALSLGLTPNFKSNFDLAEDAKLQLSKDTYDDDLDNLLAQIGDQYADLFLAAKNLSDAILLSDILRVNTEITKAPLSASMIKRYDEHHQDLTLLKALVRQQLPEKYKEIFFDQSKNGYAGYIDGGASQEEFYKFIKPILEKMDGTEELLVKLNREDLLRKQRTFDNGSIPHQIHLGELHAILRRQEDFYPFLKDNREKIEKILTFRIPYYVGPLARGNSRFAWMTRKSEETITPWNFEEVVDKGASAQSFIERMTNFDKNLPNEKVLPKHSLLYEYFTVYNELTKVKYVTEGMRKPAFLSGEQKKAIVDLLFKTNRKVTVKQLKEDYFKKIECFDSVEISGVEDRFNASLGTYHDLLKIIKDKDFLDNEENEDILEDIVLTLTLFEDREMIEERLKTYAHLFDDKVMKQLKRRRYTGWGRLSRKLINGIRDKQSGKTILDFLKSDGFANRNFMQLIHDDSLTFKEDIQKAQVSGQGDSLHEHIANLAGSPAIKKGILQTVKVVDELVKVMGRHKPENIVIEMARENQTTQKGQKNSRERMKRIEEGIKELGSQILKEHPVENTQLQNEKLYLYYLQNGRDMYVDQELDINRLSDYDVDHIVPQSFLKDDSIDNKVLTRSDKARGKSDNVPSEEVVKKMKNYWRQLLNAKLITQRKFDNLTKAERGGLSELDKAGFIKRQLVETRQITKHVAQILDSRMNTKYDENDKLIREVKVITLKSKLVSDFRKDFQFYKVREINNYHHAHDAYLNAVVGTALIKKYPKLESEFVYGDYKVYDVRKMIAKSEQEIGKATAKYFFYSNIMNFFKTEITLANGEIRKRPLIETNGETGEIVWDKGRDFATVRKVLSMPQVNIVKKTEVQTGGFSKESILPKRNSDKLIARKKDWDPKKYGGFDSPTVAYSVLVVAKVEKGKSKKLKSVKELLGITIMERSSFEKNPIDFLEAKGYKEVKKDLIIKLPKYSLFELENGRKRMLASAGELQKGNELALPSKYVNFLYLASHYEKLKGSPEDNEQKQLFVEQHKHYLDEIIEQISEFSKRVILADANLDKVLSAYNKHRDKPIREQAENIIHLFTLTNLGAPAAFKYFDTTIDRKRYTSTKEVLDATLIHQSITGLYETRIDLSQLGGDGGGGGGGGGGTLQLEEEYRLFEPESTQKQEMDIWLKNFPQAWAETGGMGTAHCQAPVLIQLKATATPISIRQYPMPHEAYQGIKPHIRRMLDQGILKPCQSPWNTPLLPVKKPGTEDYRPVQDLREVNKRVEDIHPTVPNPYNLLSTLPPSHPWYTVLDLKDAFFCLRLHSESQLLFAFEWRDPEIGLSGQLTWTRLPQGFKNSPTLFNEALHSDLADFRVRYPALVLLQYVDDLLLAAATRTECLEGTKALLETLGNKGYRASAKKAQICLQEVTYLGYSLKDGQRWLTKARKEAILSIPVPKNSRQVREFLGKAGYCRLFIPGFAELAAPLYPLTRPGTLFQWGTEQQLAFEDIKKALLSSPALGLPDITKPFELFIDENSGFAKGVLVQKLGPWKRPVAYLSKKLDTVASGWPPCLRMVAAIAILVKDAGKLTLGQPLTILTSHPVEALVRQPPNKWLSNARMTHYQAMLLDAERVHFGPTVSLNPATLLPLPSGGNHHDCLQILAETHGTRPDLTDQPLPDADLTWYTDGSSFIRNGEREAGAAVTTESEVIWAAPLPPGTSAQRAELIALTQALKMAEGKKLTVYTDSRYAFATTHVHGEIYRRRGWLTSEGKEIKNKNEILALLEALFLPKRLSIIHCPGHQKGDSPQAKGNRLADDTAKKAATETHSSLTVLPAGKRTADGSEFEKRTADGSEFESPKKKAKVE

SEQ ID NO: 1212 - protein, 2102 aa, synthetic construct
MPAAKRVKLDGGDKKYSIGLDIGTNSVGWAVITDEYKVPSKKFKVLGNTDRHSIKKNLIGALLFDSGETAEATRLKRTARRRYTRRKNRICYLQEIFSNEMAKVDDSFFHRLEESFLVEEDKKHERHPIFGNIVDEVAYHEKYPTIYHLRKKLVDSTDKADLRLIYLALAHMIKFRGHFLIEGDLNPDNSDVDKLFIQLVQTYNQLFEENPINASGVDAKAILSARLSKSRRLENLIAQLPGEKKNGLFGNLIALSLGLTPNFKSNFDLAEDAKLQLSKDTYDDDLDNLLAQIGDQYADLFLAAKNLSDAILLSDILRVNTEITKAPLSASMIKRYDEHHQDLTLLKALVRQQLPEKYKEIFFDQSKNGYAGYIDGGASQEEFYKFIKPILEKMDGTEELLVKLNREDLLRKQRTFDNGSIPHQIHLGELHAILRRQEDFYPFLKDNREKIEKILTFRIPYYVGPLARGNSRFAWMTRKSEETITPWNFEEVVDKGASAQSFIERMTNFDKNLPNEKVLPKHSLLYEYFTVYNELTKVKYVTEGMRKPAFLSGEQKKAIVDLLFKTNRKVTVKQLKEDYFKKIECFDSVEISGVEDRFNASLGTYHDLLKIIKDKDFLDNEENEDILEDIVLTLTLFEDREMIEERLKTYAHLFDDKVMKQLKRRRYTGWGRLSRKLINGIRDKQSGKTILDFLKSDGFANRNFMQLIHDDSLTFKEDIQKAQVSGQGDSLHEHIANLAGSPAIKKGILQTVKVVDELVKVMGRHKPENIVIEMARENQTTQKGQKNSRERMKRIEEGIKELGSQILKEHPVENTQLQNEKLYLYYLQNGRDMYVDQELDINRLSDYDVDHIVPQSFLKDDSIDNKVLTRSDKARGKSDNVPSEEVVKKMKNYWRQLLNAKLITQRKFDNLTKAERGGLSELDKAGFIKRQLVETRQITKHVAQILDSRMNTKYDENDKLIREVKVITLKSKLVSDFRKDFQFYKVREINNYHHAHDAYLNAVVGTALIKKYPKLESEFVYGDYKVYDVRKMIAKSEQEIGKATAKYFFYSNIMNFFKTEITLANGEIRKRPLIETNGETGEIVWDKGRDFATVRKVLSMPQVNIVKKTEVQTGGFSKESILPKRNSDKLIARKKDWDPKKYGGFDSPTVAYSVLVVAKVEKGKSKKLKSVKELLGITIMERSSFEKNPIDFLEAKGYKEVKKDLIIKLPKYSLFELENGRKRMLASAGELQKGNELALPSKYVNFLYLASHYEKLKGSPEDNEQKQLFVEQHKHYLDEIIEQISEFSKRVILADANLDKVLSAYNKHRDKPIREQAENIIHLFTLTNLGAPAAFKYFDTTIDRKRYTSTKEVLDATLIHQSITGLYETRIDLSQLGGDGGGSSGSSGSSGSSGSSGSSGGTLQLEEEYRLFEPESTQKQEMDIWLKNFPQAWAETGGMGTAHCQAPVLIQLKATATPISIRQYPMPHEAYQGIKPHIRRMLDQGILKPCQSPWNTPLLPVKKPGTEDYRPVQDLREVNKRVEDIHPTVPNPYNLLSTLPPSHPWYTVLDLKDAFFCLRLHSESQLLFAFEWRDPEIGLSGQLTWTRLPQGFKNSPTLFNEALHSDLADFRVRYPALVLLQYVDDLLLAAATRTECLEGTKALLETLGNKGYRASAKKAQICLQEVTYLGYSLKDGQRWLTKARKEAILSIPVPKNSRQVREFLGKAGYCRLFIPGFAELAAPLYPLTRPGTLFQWGTEQQLAFEDIKKALLSSPALGLPDITKPFELFIDENSGFAKGVLVQKLGPWKRPVAYLSKKLDTVASGWPPCLRMVAAIAILVKDAGKLTLGQPLTILTSHPVEALVRQPPNKWLSNARMTHYQAMLLDAERVHFGPTVSLNPATLLPLPSGGNHHDCLQILAETHGTRPDLTDQPLPDADLTWYTDGSSFIRNGEREAGAAVTTESEVIWAAPLPPGTSAQRAELIALTQALKMAEGKKLTVYTDSRYAFATTHVHGEIYRRRGWLTSEGKEIKNKNEILALLEALFLPKRLSIIHCPGHQKGDSPQAKGNRLADDTAKKAATETHSSLTVLPAGKRTADGSEFEKRTADGSEFESPKKKAKVE

SEQ ID NO: 1213 - protein, 2099 aa, synthetic construct
MPAAKRVKLDGGDKKYSIGLDIGTNSVGWAVITDEYKVPSKKFKVLGNTDRHSIKKNLIGALLFDSGETAEATRLKRTARRRYTRRKNRICYLQEIFSNEMAKVDDSFFHRLEESFLVEEDKKHERHPIFGNIVDEVAYHEKYPTIYHLRKKLVDSTDKADLRLIYLALAHMIKFRGHFLIEGDLNPDNSDVDKLFIQLVQTYNQLFEENPINASGVDAKAILSARLSKSRRLENLIAQLPGEKKNGLFGNLIALSLGLTPNFKSNFDLAEDAKLQLSKDTYDDDLDNLLAQIGDQYADLFLAAKNLSDAILLSDILRVNTEITKAPLSASMIKRYDEHHQDLTLLKALVRQQLPEKYKEIFFDQSKNGYAGYIDGGASQEEFYKFIKPILEKMDGTEELLVKLNREDLLRKQRTFDNGSIPHQIHLGELHAILRRQEDFYPFLKDNREKIEKILTFRIPYYVGPLARGNSRFAWMTRKSEETITPWNFEEVVDKGASAQSFIERMTNFDKNLPNEKVLPKHSLLYEYFTVYNELTKVKYVTEGMRKPAFLSGEQKKAIVDLLFKTNRKVTVKQLKEDYFKKIECFDSVEISGVEDRFNASLGTYHDLLKIIKDKDFLDNEENEDILEDIVLTLTLFEDREMIEERLKTYAHLFDDKVMKQLKRRRYTGWGRLSRKLINGIRDKQSGKTILDFLKSDGFANRNFMQLIHDDSLTFKEDIQKAQVSGQGDSLHEHIANLAGSPAIKKGILQTVKVVDELVKVMGRHKPENIVIEMARENQTTQKGQKNSRERMKRIEEGIKELGSQILKEHPVENTQLQNEKLYLYYLQNGRDMYVDQELDINRLSDYDVDHIVPQSFLKDDSIDNKVLTRSDKARGKSDNVPSEEVVKKMKNYWRQLLNAKLITQRKFDNLTKAERGGLSELDKAGFIKRQLVETRQITKHVAQILDSRMNTKYDENDKLIREVKVITLKSKLVSDFRKDFQFYKVREINNYHHAHDAYLNAVVGTALIKKYPKLESEFVYGDYKVYDVRKMIAKSEQEIGKATAKYFFYSNIMNFFKTEITLANGEIRKRPLIETNGETGEIVWDKGRDFATVRKVLSMPQVNIVKKTEVQTGGFSKESILPKRNSDKLIARKKDWDPKKYGGFDSPTVAYSVLVVAKVEKGKSKKLKSVKELLGITIMERSSFEKNPIDFLEAKGYKEVKKDLIIKLPKYSLFELENGRKRMLASAGELQKGNELALPSKYVNFLYLASHYEKLKGSPEDNEQKQLFVEQHKHYLDEIIEQISEFSKRVILADANLDKVLSAYNKHRDKPIREQAENIIHLFTLTNLGAPAAFKYFDTTIDRKRYTSTKEVLDATLIHQSITGLYETRIDLSQLGGDGGEAAAKEAAAKEAAAKGGTLQLEEEYRLFEPESTQKQEMDIWLKNFPQAWAETGGMGTAHCQAPVLIQLKATATPISIRQYPMPHEAYQGIKPHIRRMLDQGILKPCQSPWNTPLLPVKKPGTEDYRPVQDLREVNKRVEDIHPTVPNPYNLLSTLPPSHPWYTVLDLKDAFFCLRLHSESQLLFAFEWRDPEIGLSGQLTWTRLPQGFKNSPTLFNEALHSDLADFRVRYPALVLLQYVDDLLLAAATRTECLEGTKALLETLGNKGYRASAKKAQICLQEVTYLGYSLKDGQRWLTKARKEAILSIPVPKNSRQVREFLGKAGYCRLFIPGFAELAAPLYPLTRPGTLFQWGTEQQLAFEDIKKALLSSPALGLPDITKPFELFIDENSGFAKGVLVQKLGPWKRPVAYLSKKLDTVASGWPPCLRMVAAIAILVKDAGKLTLGQPLTILTSHPVEALVRQPPNKWLSNARMTHYQAMLLDAERVHFGPTVSLNPATLLPLPSGGNHHDCLQILAETHGTRPDLTDQPLPDADLTWYTDGSSFIRNGEREAGAAVTTESEVIWAAPLPPGTSAQRAELIALTQALKMAEGKKLTVYTDSRYAFATTHVHGEIYRRRGWLTSEGKEIKNKNEILALLEALFLPKRLSIIHCPGHQKGDSPQAKGNRLADDTAKKAATETHSSLTVLPAGKRTADGSEFEKRTADGSEFESPKKKAKVE

SEQ ID NO: 1214 - protein, 2095 aa, synthetic construct
MPAAKRVKLDGGDKKYSIGLDIGTNSVGWAVITDEYKVPSKKFKVLGNTDRHSIKKNLIGALLFDSGETAEATRLKRTARRRYTRRKNRICYLQEIFSNEMAKVDDSFFHRLEESFLVEEDKKHERHPIFGNIVDEVAYHEKYPTIYHLRKKLVDSTDKADLRLIYLALAHMIKFRGHFLIEGDLNPDNSDVDKLFIQLVQTYNQLFEENPINASGVDAKAILSARLSKSRRLENLIAQLPGEKKNGLFGNLIALSLGLTPNFKSNFDLAEDAKLQLSKDTYDDDLDNLLAQIGDQYADLFLAAKNLSDAILLSDILRVNTEITKAPLSASMIKRYDEHHQDLTLLKALVRQQLPEKYKEIFFDQSKNGYAGYIDGGASQEEFYKFIKPILEKMDGTEELLVKLNREDLLRKQRTFDNGSIPHQIHLGELHAILRRQEDFYPFLKDNREKIEKILTFRIPYYVGPLARGNSRFAWMTRKSEETITPWNFEEVVDKGASAQSFIERMTNFDKNLPNEKVLPKHSLLYEYFTVYNELTKVKYVTEGMRKPAFLSGEQKKAIVDLLFKTNRKVTVKQLKEDYFKKIECFDSVEISGVEDRFNASLGTYHDLLKIIKDKDFLDNEENEDILEDIVLTLTLFEDREMIEERLKTYAHLFDDKVMKQLKRRRYTGWGRLSRKLINGIRDKQSGKTILDFLKSDGFANRNFMQLIHDDSLTFKEDIQKAQVSGQGDSLHEHIANLAGSPAIKKGILQTVKVVDELVKVMGRHKPENIVIEMARENQTTQKGQKNSRERMKRIEEGIKELGSQILKEHPVENTQLQNEKLYLYYLQNGRDMYVDQELDINRLSDYDVDHIVPQSFLKDDSIDNKVLTRSDKARGKSDNVPSEEVVKKMKNYWRQLLNAKLITQRKFDNLTKAERGGLSELDKAGFIKRQLVETRQITKHVAQILDSRMNTKYDENDKLIREVKVITLKSKLVSDFRKDFQFYKVREINNYHHAHDAYLNAVVGTALIKKYPKLESEFVYGDYKVYDVRKMIAKSEQEIGKATAKYFFYSNIMNFFKTEITLANGEIRKRPLIETNGETGEIVWDKGRDFATVRKVLSMPQVNIVKKTEVQTGGFSKESILPKRNSDKLIARKKDWDPKKYGGFDSPTVAYSVLVVAKVEKGKSKKLKSVKELLGITIMERSSFEKNPIDFLEAKGYKEVKKDLIIKLPKYSLFELENGRKRMLASAGELQKGNELALPSKYVNFLYLASHYEKLKGSPEDNEQKQLFVEQHKHYLDEIIEQISEFSKRVILADANLDKVLSAYNKHRDKPIREQAENIIHLFTLTNLGAPAAFKYFDTTIDRKRYTSTKEVLDATLIHQSITGLYETRIDLSQLGGDGGPAPGSSEAAAKGGTLQLEEEYRLFEPESTQKQEMDIWLKNFPQAWAETGGMGTAHCQAPVLIQLKATATPISIRQYPMPHEAYQGIKPHIRRMLDQGILKPCQSPWNTPLLPVKKPGTEDYRPVQDLREVNKRVEDIHPTVPNPYNLLSTLPPSHPWYTVLDLKDAFFCLRLHSESQLLFAFEWRDPEIGLSGQLTWTRLPQGFKNSPTLFNEALHSDLADFRVRYPALVLLQYVDDLLLAAATRTECLEGTKALLETLGNKGYRASAKKAQICLQEVTYLGYSLKDGQRWLTKARKEAILSIPVPKNSRQVREFLGKAGYCRLFIPGFAELAAPLYPLTRPGTLFQWGTEQQLAFEDIKKALLSSPALGLPDITKPFELFIDENSGFAKGVLVQKLGPWKRPVAYLSKKLDTVASGWPPCLRMVAAIAILVKDAGKLTLGQPLTILTSHPVEALVRQPPNKWLSNARMTHYQAMLLDAERVHFGPTVSLNPATLLPLPSGGNHHDCLQILAETHGTRPDLTDQPLPDADLTWYTDGSSFIRNGEREAGAAVTTESEVIWAAPLPPGTSAQRAELIALTQALKMAEGKKLTVYTDSRYAFATTHVHGEIYRRRGWLTSEGKEIKNKNEILALLEALFLPKRLSIIHCPGHQKGDSPQAKGNRLADDTAKKAATETHSSLTVLPAGKRTADGSEFEKRTADGSEFESPKKKAKVE

SEQ ID NO: 1215 - protein, 2092 aa, synthetic construct
MPAAKRVKLDGGDKKYSIGLDIGTNSVGWAVITDEYKVPSKKFKVLGNTDRHSIKKNLIGALLFDSGETAEATRLKRTARRRYTRRKNRICYLQEIFSNEMAKVDDSFFHRLEESFLVEEDKKHERHPIFGNIVDEVAYHEKYPTIYHLRKKLVDSTDKADLRLIYLALAHMIKFRGHFLIEGDLNPDNSDVDKLFIQLVQTYNQLFEENPINASGVDAKAILSARLSKSRRLENLIAQLPGEKKNGLFGNLIALSLGLTPNFKSNFDLAEDAKLQLSKDTYDDDLDNLLAQIGDQYADLFLAAKNLSDAILLSDILRVNTEITKAPLSASMIKRYDEHHQDLTLLKALVRQQLPEKYKEIFFDQSKNGYAGYIDGGASQEEFYKFIKPILEKMDGTEELLVKLNREDLLRKQRTFDNGSIPHQIHLGELHAILRRQEDFYPFLKDNREKIEKILTFRIPYYVGPLARGNSRFAWMTRKSEETITPWNFEEVVDKGASAQSFIERMTNFDKNLPNEKVLPKHSLLYEYFTVYNELTKVKYVTEGMRKPAFLSGEQKKAIVDLLFKTNRKVTVKQLKEDYFKKIECFDSVEISGVEDRFNASLGTYHDLLKIIKDKDFLDNEENEDILEDIVLTLTLFEDREMIEERLKTYAHLFDDKVMKQLKRRRYTGWGRLSRKLINGIRDKQSGKTILDFLKSDGFANRNFMQLIHDDSLTFKEDIQKAQVSGQGDSLHEHIANLAGSPAIKKGILQTVKVVDELVKVMGRHKPENIVIEMARENQTTQKGQKNSRERMKRIEEGIKELGSQILKEHPVENTQLQNEKLYLYYLQNGRDMYVDQELDINRLSDYDVDHIVPQSFLKDDSIDNKVLTRSDKARGKSDNVPSEEVVKKMKNYWRQLLNAKLITQRKFDNLTKAERGGLSELDKAGFIKRQLVETRQITKHVAQILDSRMNTKYDENDKLIREVKVITLKSKLVSDFRKDFQFYKVREINNYHHAHDAYLNAVVGTALIKKYPKLESEFVYGDYKVYDVRKMIAKSEQEIGKATAKYFFYSNIMNFFKTEITLANGEIRKRPLIETNGETGEIVWDKGRDFATVRKVLSMPQVNIVKKTEVQTGGFSKESILPKRNSDKLIARKKDWDPKKYGGFDSPTVAYSVLVVAKVEKGKSKKLKSVKELLGITIMERSSFEKNPIDFLEAKGYKEVKKDLIIKLPKYSLFELENGRKRMLASAGELQKGNELALPSKYVNFLYLASHYEKLKGSPEDNEQKQLFVEQHKHYLDEIIEQISEFSKRVILADANLDKVLSAYNKHRDKPIREQAENIIHLFTLTNLGAPAAFKYFDTTIDRKRYTSTKEVLDATLIHQSITGLYETRIDLSQLGGDGGGGGGGGGGGGTLQLEEEYRLFEPESTQKQEMDIWLKNFPQAWAETGGMGTAHCQAPVLIQLKATATPISIRQYPMPHEAYQGIKPHIRRMLDQGILKPCQSPWNTPLLPVKKPGTEDYRPVQDLREVNKRVEDIHPTVPNPYNLLSTLPPSHPWYTVLDLKDAFFCLRLHSESQLLFAFEWRDPEIGLSGQLTWTRLPQGFKNSPTLFNEALHSDLADFRVRYPALVLLQYVDDLLLAAATRTECLEGTKALLETLGNKGYRASAKKAQICLQEVTYLGYSLKDGQRWLTKARKEAILSIPVPKNSRQVREFLGKAGYCRLFIPGFAELAAPLYPLTRPGTLFQWGTEQQLAFEDIKKALLSSPALGLPDITKPFELFIDENSGFAKGVLVQKLGPWKRPVAYLSKKLDTVASGWPPCLRMVAAIAILVKDAGKLTLGQPLTILTSHPVEALVRQPPNKWLSNARMTHYQAMLLDAERVHFGPTVSLNPATLLPLPSGGNHHDCLQILAETHGTRPDLTDQPLPDADLTWYTDGSSFIRNGEREAGAAVTTESEVIWAAPLPPGTSAQRAELIALTQALKMAEGKKLTVYTDSRYAFATTHVHGEIYRRRGWLTSEGKEIKNKNEILALLEALFLPKRLSIIHCPGHQKGDSPQAKGNRLADDTAKKAATETHSSLTVLPAGKRTADGSEFEKRTADGSEFESPKKKAKVE

SEQ ID NO: 1216 - protein, 2093 aa, synthetic construct
MPAAKRVKLDGGDKKYSIGLDIGTNSVGWAVITDEYKVPSKKFKVLGNTDRHSIKKNLIGALLFDSGETAEATRLKRTARRRYTRRKNRICYLQEIFSNEMAKVDDSFFHRLEESFLVEEDKKHERHPIFGNIVDEVAYHEKYPTIYHLRKKLVDSTDKADLRLIYLALAHMIKFRGHFLIEGDLNPDNSDVDKLFIQLVQTYNQLFEENPINASGVDAKAILSARLSKSRRLENLIAQLPGEKKNGLFGNLIALSLGLTPNFKSNFDLAEDAKLQLSKDTYDDDLDNLLAQIGDQYADLFLAAKNLSDAILLSDILRVNTEITKAPLSASMIKRYDEHHQDLTLLKALVRQQLPEKYKEIFFDQSKNGYAGYIDGGASQEEFYKFIKPILEKMDGTEELLVKLNREDLLRKQRTFDNGSIPHQIHLGELHAILRRQEDFYPFLKDNREKIEKILTFRIPYYVGPLARGNSRFAWMTRKSEETITPWNFEEVVDKGASAQSFIERMTNFDKNLPNEKVLPKHSLLYEYFTVYNELTKVKYVTEGMRKPAFLSGEQKKAIVDLLFKTNRKVTVKQLKEDYFKKIECFDSVEISGVEDRFNASLGTYHDLLKIIKDKDFLDNEENEDILEDIVLTLTLFEDREMIEERLKTYAHLFDDKVMKQLKRRRYTGWGRLSRKLINGIRDKQSGKTILDFLKSDGFANRNFMQLIHDDSLTFKEDIQKAQVSGQGDSLHEHIANLAGSPAIKKGILQTVKVVDELVKVMGRHKPENIVIEMARENQTTQKGQKNSRERMKRIEEGIKELGSQILKEHPVENTQLQNEKLYLYYLQNGRDMYVDQELDINRLSDYDVDHIVPQSFLKDDSIDNKVLTRSDKARGKSDNVPSEEVVKKMKNYWRQLLNAKLITQRKFDNLTKAERGGLSELDKAGFIKRQLVETRQITKHVAQILDSRMNTKYDENDKLIREVKVITLKSKLVSDFRKDFQFYKVREINNYHHAHDAYLNAVVGTALIKKYPKLESEFVYGDYKVYDVRKMIAKSEQEIGKATAKYFFYSNIMNFFKTEITLANGEIRKRPLIETNGETGEIVWDKGRDFATVRKVLSMPQVNIVKKTEVQTGGFSKESILPKRNSDKLIARKKDWDPKKYGGFDSPTVAYSVLVVAKVEKGKSKKLKSVKELLGITIMERSSFEKNPIDFLEAKGYKEVKKDLIIKLPKYSLFELENGRKRMLASAGELQKGNELALPSKYVNFLYLASHYEKLKGSPEDNEQKQLFVEQHKHYLDEIIEQISEFSKRVILADANLDKVLSAYNKHRDKPIREQAENIIHLFTLTNLGAPAAFKYFDTTIDRKRYTSTKEVLDATLIHQSITGLYETRIDLSQLGGDGGPAPAPAPAPGGTLQLEEEYRLFEPESTQKQEMDIWLKNFPQAWAETGGMGTAHCQAPVLIQLKATATPISIRQYPMPHEAYQGIKPHIRRMLDQGILKPCQSPWNTPLLPVKKPGTEDYRPVQDLREVNKRVEDIHPTVPNPYNLLSTLPPSHPWYTVLDLKDAFFCLRLHSESQLLFAFEWRDPEIGLSGQLTWTRLPQGFKNSPTLFNEALHSDLADFRVRYPALVLLQYVDDLLLAAATRTECLEGTKALLETLGNKGYRASAKKAQICLQEVTYLGYSLKDGQRWLTKARKEAILSIPVPKNSRQVREFLGKAGYCRLFIPGFAELAAPLYPLTRPGTLFQWGTEQQLAFEDIKKALLSSPALGLPDITKPFELFIDENSGFAKGVLVQKLGPWKRPVAYLSKKLDTVASGWPPCLRMVAAIAILVKDAGKLTLGQPLTILTSHPVEALVRQPPNKWLSNARMTHYQAMLLDAERVHFGPTVSLNPATLLPLPSGGNHHDCLQILAETHGTRPDLTDQPLPDADLTWYTDGSSFIRNGEREAGAAVTTESEVIWAAPLPPGTSAQRAELIALTQALKMAEGKKLTVYTDSRYAFATTHVHGEIYRRRGWLTSEGKEIKNKNEILALLEALFLPKRLSIIHCPGHQKGDSPQAKGNRLADDTAKKAATETHSSLTVLPAGKRTADGSEFEKRTADGSEFESPKKKAKVE

SEQ ID NO: 1217 - protein, 2089 aa, synthetic construct
MPAAKRVKLDGGDKKYSIGLDIGTNSVGWAVITDEYKVPSKKFKVLGNTDRHSIKKNLIGALLFDSGETAEATRLKRTARRRYTRRKNRICYLQEIFSNEMAKVDDSFFHRLEESFLVEEDKKHERHPIFGNIVDEVAYHEKYPTIYHLRKKLVDSTDKADLRLIYLALAHMIKFRGHFLIEGDLNPDNSDVDKLFIQLVQTYNQLFEENPINASGVDAKAILSARLSKSRRLENLIAQLPGEKKNGLFGNLIALSLGLTPNFKSNFDLAEDAKLQLSKDTYDDDLDNLLAQIGDQYADLFLAAKNLSDAILLSDILRVNTEITKAPLSASMIKRYDEHHQDLTLLKALVRQQLPEKYKEIFFDQSKNGYAGYIDGGASQEEFYKFIKPILEKMDGTEELLVKLNREDLLRKQRTFDNGSIPHQIHLGELHAILRRQEDFYPFLKDNREKIEKILTFRIPYYVGPLARGNSRFAWMTRKSEETITPWNFEEVVDKGASAQSFIERMTNFDKNLPNEKVLPKHSLLYEYFTVYNELTKVKYVTEGMRKPAFLSGEQKKAIVDLLFKTNRKVTVKQLKEDYFKKIECFDSVEISGVEDRFNASLGTYHDLLKIIKDKDFLDNEENEDILEDIVLTLTLFEDREMIEERLKTYAHLFDDKVMKQLKRRRYTGWGRLSRKLINGIRDKQSGKTILDFLKSDGFANRNFMQLIHDDSLTFKEDIQKAQVSGQGDSLHEHIANLAGSPAIKKGILQTVKVVDELVKVMGRHKPENIVIEMARENQTTQKGQKNSRERMKRIEEGIKELGSQILKEHPVENTQLQNEKLYLYYLQNGRDMYVDQELDINRLSDYDVDHIVPQSFLKDDSIDNKVLTRSDKARGKSDNVPSEEVVKKMKNYWRQLLNAKLITQRKFDNLTKAERGGLSELDKAGFIKRQLVETRQITKHVAQILDSRMNTKYDENDKLIREVKVITLKSKLVSDFRKDFQFYKVREINNYHHAHDAYLNAVVGTALIKKYPKLESEFVYGDYKVYDVRKMIAKSEQEIGKATAKYFFYSNIMNFFKTEITLANGEIRKRPLIETNGETGEIVWDKGRDFATVRKVLSMPQVNIVKKTEVQTGGFSKESILPKRNSDKLIARKKDWDPKKYGGFDSPTVAYSVLVVAKVEKGKSKKLKSVKELLGITIMERSSFEKNPIDFLEAKGYKEVKKDLIIKLPKYSLFELENGRKRMLASAGELQKGNELALPSKYVNFLYLASHYEKLKGSPEDNEQKQLFVEQHKHYLDEIIEQISEFSKRVILADANLDKVLSAYNKHRDKPIREQAENIIHLFTLTNLGAPAAFKYFDTTIDRKRYTSTKEVLDATLIHQSITGLYETRIDLSQLGGDGGGGGGGGGTLQLEEEYRLFEPESTQKQEMDIWLKNFPQAWAETGGMGTAHCQAPVLIQLKATATPISIRQYPMPHEAYQGIKPHIRRMLDQGILKPCQSPWNTPLLPVKKPGTEDYRPVQDLREVNKRVEDIHPTVPNPYNLLSTLPPSHPWYTVLDLKDAFFCLRLHSESQLLFAFEWRDPEIGLSGQLTWTRLPQGFKNSPTLFNEALHSDLADFRVRYPALVLLQYVDDLLLAAATRTECLEGTKALLETLGNKGYRASAKKAQICLQEVTYLGYSLKDGQRWLTKARKEAILSIPVPKNSRQVREFLGKAGYCRLFIPGFAELAAPLYPLTRPGTLFQWGTEQQLAFEDIKKALLSSPALGLPDITKPFELFIDENSGFAKGVLVQKLGPWKRPVAYLSKKLDTVASGWPPCLRMVAAIAILVKDAGKLTLGQPLTILTSHPVEALVRQPPNKWLSNARMTHYQAMLLDAERVHFGPTVSLNPATLLPLPSGGNHHDCLQILAETHGTRPDLTDQPLPDADLTWYTDGSSFIRNGEREAGAAVTTESEVIWAAPLPPGTSAQRAELIALTQALKMAEGKKLTVYTDSRYAFATTHVHGEIYRRRGWLTSEGKEIKNKNEILALLEALFLPKRLSIIHCPGHQKGDSPQAKGNRLADDTAKKAATETHSSLTVLPAGKRTADGSEFEKRTADGSEFESPKKKAKVE

SEQ ID NO: 1218 - protein, 2095 aa, synthetic construct
MPAAKRVKLDGGDKKYSIGLDIGTNSVGWAVITDEYKVPSKKFKVLGNTDRHSIKKNLIGALLFDSGETAEATRLKRTARRRYTRRKNRICYLQEIFSNEMAKVDDSFFHRLEESFLVEEDKKHERHPIFGNIVDEVAYHEKYPTIYHLRKKLVDSTDKADLRLIYLALAHMIKFRGHFLIEGDLNPDNSDVDKLFIQLVQTYNQLFEENPINASGVDAKAILSARLSKSRRLENLIAQLPGEKKNGLFGNLIALSLGLTPNFKSNFDLAEDAKLQLSKDTYDDDLDNLLAQIGDQYADLFLAAKNLSDAILLSDILRVNTEITKAPLSASMIKRYDEHHQDLTLLKALVRQQLPEKYKEIFFDQSKNGYAGYIDGGASQEEFYKFIKPILEKMDGTEELLVKLNREDLLRKQRTFDNGSIPHQIHLGELHAILRRQEDFYPFLKDNREKIEKILTFRIPYYVGPLARGNSRFAWMTRKSEETITPWNFEEVVDKGASAQSFIERMTNFDKNLPNEKVLPKHSLLYEYFTVYNELTKVKYVTEGMRKPAFLSGEQKKAIVDLLFKTNRKVTVKQLKEDYFKKIECFDSVEISGVEDRFNASLGTYHDLLKIIKDKDFLDNEENEDILEDIVLTLTLFEDREMIEERLKTYAHLFDDKVMKQLKRRRYTGWGRLSRKLINGIRDKQSGKTILDFLKSDGFANRNFMQLIHDDSLTFKEDIQKAQVSGQGDSLHEHIANLAGSPAIKKGILQTVKVVDELVKVMGRHKPENIVIEMARENQTTQKGQKNSRERMKRIEEGIKELGSQILKEHPVENTQLQNEKLYLYYLQNGRDMYVDQELDINRLSDYDVDHIVPQSFLKDDSIDNKVLTRSDKARGKSDNVPSEEVVKKMKNYWRQLLNAKLITQRKFDNLTKAERGGLSELDKAGFIKRQLVETRQITKHVAQILDSRMNTKYDENDKLIREVKVITLKSKLVSDFRKDFQFYKVREINNYHHAHDAYLNAVVGTALIKKYPKLESEFVYGDYKVYDVRKMIAKSEQEIGKATAKYFFYSNIMNFFKTEITLANGEIRKRPLIETNGETGEIVWDKGRDFATVRKVLSMPQVNIVKKTEVQTGGFSKESILPKRNSDKLIARKKDWDPKKYGGFDSPTVAYSVLVVAKVEKGKSKKLKSVKELLGITIMERSSFEKNPIDFLEAKGYKEVKKDLIIKLPKYSLFELENGRKRMLASAGELQKGNELALPSKYVNFLYLASHYEKLKGSPEDNEQKQLFVEQHKHYLDEIIEQISEFSKRVILADANLDKVLSAYNKHRDKPIREQAENIIHLFTLTNLGAPAAFKYFDTTIDRKRYTSTKEVLDATLIHQSITGLYETRIDLSQLGGDGGGSSEAAAKPAPGGTLQLEEEYRLFEPESTQKQEMDIWLKNFPQAWAETGGMGTAHCQAPVLIQLKATATPISIRQYPMPHEAYQGIKPHIRRMLDQGILKPCQSPWNTPLLPVKKPGTEDYRPVQDLREVNKRVEDIHPTVPNPYNLLSTLPPSHPWYTVLDLKDAFFCLRLHSESQLLFAFEWRDPEIGLSGQLTWTRLPQGFKNSPTLFNEALHSDLADFRVRYPALVLLQYVDDLLLAAATRTECLEGTKALLETLGNKGYRASAKKAQICLQEVTYLGYSLKDGQRWLTKARKEAILSIPVPKNSRQVREFLGKAGYCRLFIPGFAELAAPLYPLTRPGTLFQWGTEQQLAFEDIKKALLSSPALGLPDITKPFELFIDENSGFAKGVLVQKLGPWKRPVAYLSKKLDTVASGWPPCLRMVAAIAILVKDAGKLTLGQPLTILTSHPVEALVRQPPNKWLSNARMTHYQAMLLDAERVHFGPTVSLNPATLLPLPSGGNHHDCLQILAETHGTRPDLTDQPLPDADLTWYTDGSSFIRNGEREAGAAVTTESEVIWAAPLPPGTSAQRAELIALTQALKMAEGKKLTVYTDSRYAFATTHVHGEIYRRRGWLTSEGKEIKNKNEILALLEALFLPKRLSIIHCPGHQKGDSPQAKGNRLADDTAKKAATETHSSLTVLPAGKRTADGSEFEKRTADGSEFESPKKKAKVE

SEQ ID NO: 1219 - protein, 2097 aa, synthetic construct
MPAAKRVKLDGGDKKYSIGLDIGTNSVGWAVITDEYKVPSKKFKVLGNTDRHSIKKNLIGALLFDSGETAEATRLKRTARRRYTRRKNRICYLQEIFSNEMAKVDDSFFHRLEESFLVEEDKKHERHPIFGNIVDEVAYHEKYPTIYHLRKKLVDSTDKADLRLIYLALAHMIKFRGHFLIEGDLNPDNSDVDKLFIQLVQTYNQLFEENPINASGVDAKAILSARLSKSRRLENLIAQLPGEKKNGLFGNLIALSLGLTPNFKSNFDLAEDAKLQLSKDTYDDDLDNLLAQIGDQYADLFLAAKNLSDAILLSDILRVNTEITKAPLSASMIKRYDEHHQDLTLLKALVRQQLPEKYKEIFFDQSKNGYAGYIDGGASQEEFYKFIKPILEKMDGTEELLVKLNREDLLRKQRTFDNGSIPHQIHLGELHAILRRQEDFYPFLKDNREKIEKILTFRIPYYVGPLARGNSRFAWMTRKSEETITPWNFEEVVDKGASAQSFIERMTNFDKNLPNEKVLPKHSLLYEYFTVYNELTKVKYVTEGMRKPAFLSGEQKKAIVDLLFKTNRKVTVKQLKEDYFKKIECFDSVEISGVEDRFNASLGTYHDLLKIIKDKDFLDNEENEDILEDIVLTLTLFEDREMIEERLKTYAHLFDDKVMKQLKRRRYTGWGRLSRKLINGIRDKQSGKTILDFLKSDGFANRNFMQLIHDDSLTFKEDIQKAQVSGQGDSLHEHIANLAGSPAIKKGILQTVKVVDELVKVMGRHKPENIVIEMARENQTTQKGQKNSRERMKRIEEGIKELGSQILKEHPVENTQLQNEKLYLYYLQNGRDMYVDQELDINRLSDYDVDHIVPQSFLKDDSIDNKVLTRSDKARGKSDNVPSEEVVKKMKNYWRQLLNAKLITQRKFDNLTKAERGGLSELDKAGFIKRQLVETRQITKHVAQILDSRMNTKYDENDKLIREVKVITLKSKLVSDFRKDFQFYKVREINNYHHAHDAYLNAVVGTALIKKYPKLESEFVYGDYKVYDVRKMIAKSEQEIGKATAKYFFYSNIMNFFKTEITLANGEIRKRPLIETNGETGEIVWDKGRDFATVRKVLSMPQVNIVKKTEVQTGGFSKESILPKRNSDKLIARKKDWDPKKYGGFDSPTVAYSVLVVAKVEKGKSKKLKSVKELLGITIMERSSFEKNPIDFLEAKGYKEVKKDLIIKLPKYSLFELENGRKRMLASAGELQKGNELALPSKYVNFLYLASHYEKLKGSPEDNEQKQLFVEQHKHYLDEIIEQISEFSKRVILADANLDKVLSAYNKHRDKPIREQAENIIHLFTLTNLGAPAAFKYFDTTIDRKRYTSTKEVLDATLIHQSITGLYETRIDLSQLGGDGGPAPAPAPAPAPAPGGTLQLEEEYRLFEPESTQKQEMDIWLKNFPQAWAETGGMGTAHCQAPVLIQLKATATPISIRQYPMPHEAYQGIKPHIRRMLDQGILKPCQSPWNTPLLPVKKPGTEDYRPVQDLREVNKRVEDIHPTVPNPYNLLSTLPPSHPWYTVLDLKDAFFCLRLHSESQLLFAFEWRDPEIGLSGQLTWTRLPQGFKNSPTLFNEALHSDLADFRVRYPALVLLQYVDDLLLAAATRTECLEGTKALLETLGNKGYRASAKKAQICLQEVTYLGYSLKDGQRWLTKARKEAILSIPVPKNSRQVREFLGKAGYCRLFIPGFAELAAPLYPLTRPGTLFQWGTEQQLAFEDIKKALLSSPALGLPDITKPFELFIDENSGFAKGVLVQKLGPWKRPVAYLSKKLDTVASGWPPCLRMVAAIAILVKDAGKLTLGQPLTILTSHPVEALVRQPPNKWLSNARMTHYQAMLLDAERVHFGPTVSLNPATLLPLPSGGNHHDCLQILAETHGTRPDLTDQPLPDADLTWYTDGSSFIRNGEREAGAAVTTESEVIWAAPLPPGTSAQRAELIALTQALKMAEGKKLTVYTDSRYAFATTHVHGEIYRRRGWLTSEGKEIKNKNEILALLEALFLPKRLSIIHCPGHQKGDSPQAKGNRLADDTAKKAATETHSSLTVLPAGKRTADGSEFEKRTADGSEFESPKKKAKVE

SEQ ID NO: 1220 - protein, 2095 aa, synthetic construct
MPAAKRVKLDGGDKKYSIGLDIGTNSVGWAVITDEYKVPSKKFKVLGNTDRHSIKKNLIGALLFDSGETAEATRLKRTARRRYTRRKNRICYLQEIFSNEMAKVDDSFFHRLEESFLVEEDKKHERHPIFGNIVDEVAYHEKYPTIYHLRKKLVDSTDKADLRLIYLALAHMIKFRGHFLIEGDLNPDNSDVDKLFIQLVQTYNQLFEENPINASGVDAKAILSARLSKSRRLENLIAQLPGEKKNGLFGNLIALSLGLTPNFKSNFDLAEDAKLQLSKDTYDDDLDNLLAQIGDQYADLFLAAKNLSDAILLSDILRVNTEITKAPLSASMIKRYDEHHQDLTLLKALVRQQLPEKYKEIFFDQSKNGYAGYIDGGASQEEFYKFIKPILEKMDGTEELLVKLNREDLLRKQRTFDNGSIPHQIHLGELHAILRRQEDFYPFLKDNREKIEKILTFRIPYYVGPLARGNSRFAWMTRKSEETITPWNFEEVVDKGASAQSFIERMTNFDKNLPNEKVLPKHSLLYEYFTVYNELTKVKYVTEGMRKPAFLSGEQKKAIVDLLFKTNRKVTVKQLKEDYFKKIECFDSVEISGVEDRFNASLGTYHDLLKIIKDKDFLDNEENEDILEDIVLTLTLFEDREMIEERLKTYAHLFDDKVMKQLKRRRYTGWGRLSRKLINGIRDKQSGKTILDFLKSDGFANRNFMQLIHDDSLTFKEDIQKAQVSGQGDSLHEHIANLAGSPAIKKGILQTVKVVDELVKVMGRHKPENIVIEMARENQTTQKGQKNSRERMKRIEEGIKELGSQILKEHPVENTQLQNEKLYLYYLQNGRDMYVDQELDINRLSDYDVDHIVPQSFLKDDSIDNKVLTRSDKARGKSDNVPSEEVVKKMKNYWRQLLNAKLITQRKFDNLTKAERGGLSELDKAGFIKRQLVETRQITKHVAQILDSRMNTKYDENDKLIREVKVITLKSKLVSDFRKDFQFYKVREINNYHHAHDAYLNAVVGTALIKKYPKLESEFVYGDYKVYDVRKMIAKSEQEIGKATAKYFFYSNIMNFFKTEITLANGEIRKRPLIETNGETGEIVWDKGRDFATVRKVLSMPQVNIVKKTEVQTGGFSKESILPKRNSDKLIARKKDWDPKKYGGFDSPTVAYSVLVVAKVEKGKSKKLKSVKELLGITIMERSSFEKNPIDFLEAKGYKEVKKDLIIKLPKYSLFELENGRKRMLASAGELQKGNELALPSKYVNFLYLASHYEKLKGSPEDNEQKQLFVEQHKHYLDEIIEQISEFSKRVILADANLDKVLSAYNKHRDKPIREQAENIIHLFTLTNLGAPAAFKYFDTTIDRKRYTSTKEVLDATLIHQSITGLYETRIDLSQLGGDGGGGSGSSEAAAKGGTLQLEEEYRLFEPESTQKQEMDIWLKNFPQAWAETGGMGTAHCQAPVLIQLKATATPISIRQYPMPHEAYQGIKPHIRRMLDQGILKPCQSPWNTPLLPVKKPGTEDYRPVQDLREVNKRVEDIHPTVPNPYNLLSTLPPSHPWYTVLDLKDAFFCLRLHSESQLLFAFEWRDPEIGLSGQLTWTRLPQGFKNSPTLFNEALHSDLADFRVRYPALVLLQYVDDLLLAAATRTECLEGTKALLETLGNKGYRASAKKAQICLQEVTYLGYSLKDGQRWLTKARKEAILSIPVPKNSRQVREFLGKAGYCRLFIPGFAELAAPLYPLTRPGTLFQWGTEQQLAFEDIKKALLSSPALGLPDITKPFELFIDENSGFAKGVLVQKLGPWKRPVAYLSKKLDTVASGWPPCLRMVAAIAILVKDAGKLTLGQPLTILTSHPVEALVRQPPNKWLSNARMTHYQAMLLDAERVHFGPTVSLNPATLLPLPSGGNHHDCLQILAETHGTRPDLTDQPLPDADLTWYTDGSSFIRNGEREAGAAVTTESEVIWAAPLPPGTSAQRAELIALTQALKMAEGKKLTVYTDSRYAFATTHVHGEIYRRRGWLTSEGKEIKNKNEILALLEALFLPKRLSIIHCPGHQKGDSPQAKGNRLADDTAKKAATETHSSLTVLPAGKRTADGSEFEKRTADGSEFESPKKKAKVE

SEQ ID NO: 1221 - protein, 2095 aa, synthetic construct
MPAAKRVKLDGGDKKYSIGLDIGTNSVGWAVITDEYKVPSKKFKVLGNTDRHSIKKNLIGALLFDSGETAEATRLKRTARRRYTRRKNRICYLQEIFSNEMAKVDDSFFHRLEESFLVEEDKKHERHPIFGNIVDEVAYHEKYPTIYHLRKKLVDSTDKADLRLIYLALAHMIKFRGHFLIEGDLNPDNSDVDKLFIQLVQTYNQLFEENPINASGVDAKAILSARLSKSRRLENLIAQLPGEKKNGLFGNLIALSLGLTPNFKSNFDLAEDAKLQLSKDTYDDDLDNLLAQIGDQYADLFLAAKNLSDAILLSDILRVNTEITKAPLSASMIKRYDEHHQDLTLLKALVRQQLPEKYKEIFFDQSKNGYAGYIDGGASQEEFYKFIKPILEKMDGTEELLVKLNREDLLRKQRTFDNGSIPHQIHLGELHAILRRQEDFYPFLKDNREKIEKILTFRIPYYVGPLARGNSRFAWMTRKSEETITPWNFEEVVDKGASAQSFIERMTNFDKNLPNEKVLPKHSLLYEYFTVYNELTKVKYVTEGMRKPAFLSGEQKKAIVDLLFKTNRKVTVKQLKEDYFKKIECFDSVEISGVEDRFNASLGTYHDLLKIIKDKDFLDNEENEDILEDIVLTLTLFEDREMIEERLKTYAHLFDDKVMKQLKRRRYTGWGRLSRKLINGIRDKQSGKTILDFLKSDGFANRNFMQLIHDDSLTFKEDIQKAQVSGQGDSLHEHIANLAGSPAIKKGILQTVKVVDELVKVMGRHKPENIVIEMARENQTTQKGQKNSRERMKRIEEGIKELGSQILKEHPVENTQLQNEKLYLYYLQNGRDMYVDQELDINRLSDYDVDHIVPQSFLKDDSIDNKVLTRSDKARGKSDNVPSEEVVKKMKNYWRQLLNAKLITQRKFDNLTKAERGGLSELDKAGFIKRQLVETRQITKHVAQILDSRMNTKYDENDKLIREVKVITLKSKLVSDFRKDFQFYKVREINNYHHAHDAYLNAVVGTALIKKYPKLESEFVYGDYKVYDVRKMIAKSEQEIGKATAKYFFYSNIMNFFKTEITLANGEIRKRPLIETNGETGEIVWDKGRDFATVRKVLSMPQVNIVKKTEVQTGGFSKESILPKRNSDKLIARKKDWDPKKYGGFDSPTVAYSVLVVAKVEKGKSKKLKSVKELLGITIMERSSFEKNPIDFLEAKGYKEVKKDLIIKLPKYSLFELENGRKRMLASAGELQKGNELALPSKYVNFLYLASHYEKLKGSPEDNEQKQLFVEQHKHYLDEIIEQISEFSKRVILADANLDKVLSAYNKHRDKPIREQAENIIHLFTLTNLGAPAAFKYFDTTIDRKRYTSTKEVLDATLIHQSITGLYETRIDLSQLGGDGGGGGPAPEAAAKGGTLQLEEEYRLFEPESTQKQEMDIWLKNFPQAWAETGGMGTAHCQAPVLIQLKATATPISIRQYPMPHEAYQGIKPHIRRMLDQGILKPCQSPWNTPLLPVKKPGTEDYRPVQDLREVNKRVEDIHPTVPNPYNLLSTLPPSHPWYTVLDLKDAFFCLRLHSESQLLFAFEWRDPEIGLSGQLTWTRLPQGFKNSPTLFNEALHSDLADFRVRYPALVLLQYVDDLLLAAATRTECLEGTKALLETLGNKGYRASAKKAQICLQEVTYLGYSLKDGQRWLTKARKEAILSIPVPKNSRQVREFLGKAGYCRLFIPGFAELAAPLYPLTRPGTLFQWGTEQQLAFEDIKKALLSSPALGLPDITKPFELFIDENSGFAKGVLVQKLGPWKRPVAYLSKKLDTVASGWPPCLRMVAAIAILVKDAGKLTLGQPLTILTSHPVEALVRQPPNKWLSNARMTHYQAMLLDAERVHFGPTVSLNPATLLPLPSGGNHHDCLQILAETHGTRPDLTDQPLPDADLTWYTDGSSFIRNGEREAGAAVTTESEVIWAAPLPPGTSAQRAELIALTQALKMAEGKKLTVYTDSRYAFATTHVHGEIYRRRGWLTSEGKEIKNKNEILALLEALFLPKRLSIIHCPGHQKGDSPQAKGNRLADDTAKKAATETHSSLTVLPAGKRTADGSEFEKRTADGSEFESPKKKAKVE

SEQ ID NO: 1222 - protein, 2117 aa, synthetic construct
MPAAKRVKLDGGDKKYSIGLDIGTNSVGWAVITDEYKVPSKKFKVLGNTDRHSIKKNLIGALLFDSGETAEATRLKRTARRRYTRRKNRICYLQEIFSNEMAKVDDSFFHRLEESFLVEEDKKHERHPIFGNIVDEVAYHEKYPTIYHLRKKLVDSTDKADLRLIYLALAHMIKFRGHFLIEGDLNPDNSDVDKLFIQLVQTYNQLFEENPINASGVDAKAILSARLSKSRRLENLIAQLPGEKKNGLFGNLIALSLGLTPNFKSNFDLAEDAKLQLSKDTYDDDLDNLLAQIGDQYADLFLAAKNLSDAILLSDILRVNTEITKAPLSASMIKRYDEHHQDLTLLKALVRQQLPEKYKEIFFDQSKNGYAGYIDGGASQEEFYKFIKPILEKMDGTEELLVKLNREDLLRKQRTFDNGSIPHQIHLGELHAILRRQEDFYPFLKDNREKIEKILTFRIPYYVGPLARGNSRFAWMTRKSEETITPWNFEEVVDKGASAQSFIERMTNFDKNLPNEKVLPKHSLLYEYFTVYNELTKVKYVTEGMRKPAFLSGEQKKAIVDLLFKTNRKVTVKQLKEDYFKKIECFDSVEISGVEDRFNASLGTYHDLLKIIKDKDFLDNEENEDILEDIVLTLTLFEDREMIEERLKTYAHLFDDKVMKQLKRRRYTGWGRLSRKLINGIRDKQSGKTILDFLKSDGFANRNFMQLIHDDSLTFKEDIQKAQVSGQGDSLHEHIANLAGSPAIKKGILQTVKVVDELVKVMGRHKPENIVIEMARENQTTQKGQKNSRERMKRIEEGIKELGSQILKEHPVENTQLQNEKLYLYYLQNGRDMYVDQELDINRLSDYDVDHIVPQSFLKDDSIDNKVLTRSDKARGKSDNVPSEEVVKKMKNYWRQLLNAKLITQRKFDNLTKAERGGLSELDKAGFIKRQLVETRQITKHVAQILDSRMNTKYDENDKLIREVKVITLKSKLVSDFRKDFQFYKVREINNYHHAHDAYLNAVVGTALIKKYPKLESEFVYGDYKVYDVRKMIAKSEQEIGKATAKYFFYSNIMNFFKTEITLANGEIRKRPLIETNGETGEIVWDKGRDFATVRKVLSMPQVNIVKKTEVQTGGFSKESILPKRNSDKLIARKKDWDPKKYGGFDSPTVAYSVLVVAKVEKGKSKKLKSVKELLGITIMERSSFEKNPIDFLEAKGYKEVKKDLIIKLPKYSLFELENGRKRMLASAGELQKGNELALPSKYVNFLYLASHYEKLKGSPEDNEQKQLFVEQHKHYLDEIIEQISEFSKRVILADANLDKVLSAYNKHRDKPIREQAENIIHLFTLTNLGAPAAFKYFDTTIDRKRYTSTKEVLDATLIHQSITGLYETRIDLSQLGGDGGSGGSSGGSSGSETPGTSESATPESSGGSSGGSSGGTLQLEEEYRLFEPESTQKQEMDIWLKNFPQAWAETGGMGTAHCQAPVLIQLKATATPISIRQYPMPHEAYQGIKPHIRRMLDQGILKPCQSPWNTPLLPVKKPGTEDYRPVQDLREVNKRVEDIHPTVPNPYNLLSTLPPSHPWYTVLDLKDAFFCLRLHSESQLLFAFEWRDPEIGLSGQLTWTRLPQGFKNSPTLFNEALHSDLADFRVRYPALVLLQYVDDLLLAAATRTECLEGTKALLETLGNKGYRASAKKAQICLQEVTYLGYSLKDGQRWLTKARKEAILSIPVPKNSRQVREFLGKAGYCRLFIPGFAELAAPLYPLTRPGTLFQWGTEQQLAFEDIKKALLSSPALGLPDITKPFELFIDENSGFAKGVLVQKLGPWKRPVAYLSKKLDTVASGWPPCLRMVAAIAILVKDAGKLTLGQPLTILTSHPVEALVRQPPNKWLSNARMTHYQAMLLDAERVHFGPTVSLNPATLLPLPSGGNHHDCLQILAETHGTRPDLTDQPLPDADLTWYTDGSSFIRNGEREAGAAVTTESEVIWAAPLPPGTSAQRAELIALTQALKMAEGKKLTVYTDSRYAFATTHVHGEIYRRRGWLTSEGKEIKNKNEILALLEALFLPKRLSIIHCPGHQKGDSPQAKGNRLADDTAKKAATETHSSLTVLPAGKRTADGSEFEKRTADGSEFESPKKKAKVE

SEQ ID NO: 1223 - protein, 2087 aa, synthetic construct
MPAAKRVKLDGGDKKYSIGLDIGTNSVGWAVITDEYKVPSKKFKVLGNTDRHSIKKNLIGALLFDSGETAEATRLKRTARRRYTRRKNRICYLQEIFSNEMAKVDDSFFHRLEESFLVEEDKKHERHPIFGNIVDEVAYHEKYPTIYHLRKKLVDSTDKADLRLIYLALAHMIKFRGHFLIEGDLNPDNSDVDKLFIQLVQTYNQLFEENPINASGVDAKAILSARLSKSRRLENLIAQLPGEKKNGLFGNLIALSLGLTPNFKSNFDLAEDAKLQLSKDTYDDDLDNLLAQIGDQYADLFLAAKNLSDAILLSDILRVNTEITKAPLSASMIKRYDEHHQDLTLLKALVRQQLPEKYKEIFFDQSKNGYAGYIDGGASQEEFYKFIKPILEKMDGTEELLVKLNREDLLRKQRTFDNGSIPHQIHLGELHAILRRQEDFYPFLKDNREKIEKILTFRIPYYVGPLARGNSRFAWMTRKSEETITPWNFEEVVDKGASAQSFIERMTNFDKNLPNEKVLPKHSLLYEYFTVYNELTKVKYVTEGMRKPAFLSGEQKKAIVDLLFKTNRKVTVKQLKEDYFKKIECFDSVEISGVEDRFNASLGTYHDLLKIIKDKDFLDNEENEDILEDIVLTLTLFEDREMIEERLKTYAHLFDDKVMKQLKRRRYTGWGRLSRKLINGIRDKQSGKTILDFLKSDGFANRNFMQLIHDDSLTFKEDIQKAQVSGQGDSLHEHIANLAGSPAIKKGILQTVKVVDELVKVMGRHKPENIVIEMARENQTTQKGQKNSRERMKRIEEGIKELGSQILKEHPVENTQLQNEKLYLYYLQNGRDMYVDQELDINRLSDYDVDHIVPQSFLKDDSIDNKVLTRSDKARGKSDNVPSEEVVKKMKNYWRQLLNAKLITQRKFDNLTKAERGGLSELDKAGFIKRQLVETRQITKHVAQILDSRMNTKYDENDKLIREVKVITLKSKLVSDFRKDFQFYKVREINNYHHAHDAYLNAVVGTALIKKYPKLESEFVYGDYKVYDVRKMIAKSEQEIGKATAKYFFYSNIMNFFKTEITLANGEIRKRPLIETNGETGEIVWDKGRDFATVRKVLSMPQVNIVKKTEVQTGGFSKESILPKRNSDKLIARKKDWDPKKYGGFDSPTVAYSVLVVAKVEKGKSKKLKSVKELLGITIMERSSFEKNPIDFLEAKGYKEVKKDLIIKLPKYSLFELENGRKRMLASAGELQKGNELALPSKYVNFLYLASHYEKLKGSPEDNEQKQLFVEQHKHYLDEIIEQISEFSKRVILADANLDKVLSAYNKHRDKPIREQAENIIHLFTLTNLGAPAAFKYFDTTIDRKRYTSTKEVLDATLIHQSITGLYETRIDLSQLGGDGGPAPGGTLQLEEEYRLFEPESTQKQEMDIWLKNFPQAWAETGGMGTAHCQAPVLIQLKATATPISIRQYPMPHEAYQGIKPHIRRMLDQGILKPCQSPWNTPLLPVKKPGTEDYRPVQDLREVNKRVEDIHPTVPNPYNLLSTLPPSHPWYTVLDLKDAFFCLRLHSESQLLFAFEWRDPEIGLSGQLTWTRLPQGFKNSPTLFNEALHSDLADFRVRYPALVLLQYVDDLLLAAATRTECLEGTKALLETLGNKGYRASAKKAQICLQEVTYLGYSLKDGQRWLTKARKEAILSIPVPKNSRQVREFLGKAGYCRLFIPGFAELAAPLYPLTRPGTLFQWGTEQQLAFEDIKKALLSSPALGLPDITKPFELFIDENSGFAKGVLVQKLGPWKRPVAYLSKKLDTVASGWPPCLRMVAAIAILVKDAGKLTLGQPLTILTSHPVEALVRQPPNKWLSNARMTHYQAMLLDAERVHFGPTVSLNPATLLPLPSGGNHHDCLQILAETHGTRPDLTDQPLPDADLTWYTDGSSFIRNGEREAGAAVTTESEVIWAAPLPPGTSAQRAELIALTQALKMAEGKKLTVYTDSRYAFATTHVHGEIYRRRGWLTSEGKEIKNKNEILALLEALFLPKRLSIIHCPGHQKGDSPQAKGNRLADDTAKKAATETHSSLTVLPAGKRTADGSEFEKRTADGSEFESPKKKAKVE

SEQ ID NO: 1224 - protein, 2093 aa, synthetic construct
MPAAKRVKLDGGDKKYSIGLDIGTNSVGWAVITDEYKVPSKKFKVLGNTDRHSIKKNLIGALLFDSGETAEATRLKRTARRRYTRRKNRICYLQEIFSNEMAKVDDSFFHRLEESFLVEEDKKHERHPIFGNIVDEVAYHEKYPTIYHLRKKLVDSTDKADLRLIYLALAHMIKFRGHFLIEGDLNPDNSDVDKLFIQLVQTYNQLFEENPINASGVDAKAILSARLSKSRRLENLIAQLPGEKKNGLFGNLIALSLGLTPNFKSNFDLAEDAKLQLSKDTYDDDLDNLLAQIGDQYADLFLAAKNLSDAILLSDILRVNTEITKAPLSASMIKRYDEHHQDLTLLKALVRQQLPEKYKEIFFDQSKNGYAGYIDGGASQEEFYKFIKPILEKMDGTEELLVKLNREDLLRKQRTFDNGSIPHQIHLGELHAILRRQEDFYPFLKDNREKIEKILTFRIPYYVGPLARGNSRFAWMTRKSEETITPWNFEEVVDKGASAQSFIERMTNFDKNLPNEKVLPKHSLLYEYFTVYNELTKVKYVTEGMRKPAFLSGEQKKAIVDLLFKTNRKVTVKQLKEDYFKKIECFDSVEISGVEDRFNASLGTYHDLLKIIKDKDFLDNEENEDILEDIVLTLTLFEDREMIEERLKTYAHLFDDKVMKQLKRRRYTGWGRLSRKLINGIRDKQSGKTILDFLKSDGFANRNFMQLIHDDSLTFKEDIQKAQVSGQGDSLHEHIANLAGSPAIKKGILQTVKVVDELVKVMGRHKPENIVIEMARENQTTQKGQKNSRERMKRIEEGIKELGSQILKEHPVENTQLQNEKLYLYYLQNGRDMYVDQELDINRLSDYDVDHIVPQSFLKDDSIDNKVLTRSDKARGKSDNVPSEEVVKKMKNYWRQLLNAKLITQRKFDNLTKAERGGLSELDKAGFIKRQLVETRQITKHVAQILDSRMNTKYDENDKLIREVKVITLKSKLVSDFRKDFQFYKVREINNYHHAHDAYLNAVVGTALIKKYPKLESEFVYGDYKVYDVRKMIAKSEQEIGKATAKYFFYSNIMNFFKTEITLANGEIRKRPLIETNGETGEIVWDKGRDFATVRKVLSMPQVNIVKKTEVQTGGFSKESILPKRNSDKLIARKKDWDPKKYGGFDSPTVAYSVLVVAKVEKGKSKKLKSVKELLGITIMERSSFEKNPIDFLEAKGYKEVKKDLIIKLPKYSLFELENGRKRMLASAGELQKGNELALPSKYVNFLYLASHYEKLKGSPEDNEQKQLFVEQHKHYLDEIIEQISEFSKRVILADANLDKVLSAYNKHRDKPIREQAENIIHLFTLTNLGAPAAFKYFDTTIDRKRYTSTKEVLDATLIHQSITGLYETRIDLSQLGGDGGGSSPAPGGGGGTLQLEEEYRLFEPESTQKQEMDIWLKNFPQAWAETGGMGTAHCQAPVLIQLKATATPISIRQYPMPHEAYQGIKPHIRRMLDQGILKPCQSPWNTPLLPVKKPGTEDYRPVQDLREVNKRVEDIHPTVPNPYNLLSTLPPSHPWYTVLDLKDAFFCLRLHSESQLLFAFEWRDPEIGLSGQLTWTRLPQGFKNSPTLFNEALHSDLADFRVRYPALVLLQYVDDLLLAAATRTECLEGTKALLETLGNKGYRASAKKAQICLQEVTYLGYSLKDGQRWLTKARKEAILSIPVPKNSRQVREFLGKAGYCRLFIPGFAELAAPLYPLTRPGTLFQWGTEQQLAFEDIKKALLSSPALGLPDITKPFELFIDENSGFAKGVLVQKLGPWKRPVAYLSKKLDTVASGWPPCLRMVAAIAILVKDAGKLTLGQPLTILTSHPVEALVRQPPNKWLSNARMTHYQAMLLDAERVHFGPTVSLNPATLLPLPSGGNHHDCLQILAETHGTRPDLTDQPLPDADLTWYTDGSSFIRNGEREAGAAVTTESEVIWAAPLPPGTSAQRAELIALTQALKMAEGKKLTVYTDSRYAFATTHVHGEIYRRRGWLTSEGKEIKNKNEILALLEALFLPKRLSIIHCPGHQKGDSPQAKGNRLADDTAKKAATETHSSLTVLPAGKRTADGSEFEKRTADGSEFESPKKKAKVE

SEQ ID NO: 1225 - protein, 2095 aa, synthetic construct
MPAAKRVKLDGGDKKYSIGLDIGTNSVGWAVITDEYKVPSKKFKVLGNTDRHSIKKNLIGALLFDSGETAEATRLKRTARRRYTRRKNRICYLQEIFSNEMAKVDDSFFHRLEESFLVEEDKKHERHPIFGNIVDEVAYHEKYPTIYHLRKKLVDSTDKADLRLIYLALAHMIKFRGHFLIEGDLNPDNSDVDKLFIQLVQTYNQLFEENPINASGVDAKAILSARLSKSRRLENLIAQLPGEKKNGLFGNLIALSLGLTPNFKSNFDLAEDAKLQLSKDTYDDDLDNLLAQIGDQYADLFLAAKNLSDAILLSDILRVNTEITKAPLSASMIKRYDEHHQDLTLLKALVRQQLPEKYKEIFFDQSKNGYAGYIDGGASQEEFYKFIKPILEKMDGTEELLVKLNREDLLRKQRTFDNGSIPHQIHLGELHAILRRQEDFYPFLKDNREKIEKILTFRIPYYVGPLARGNSRFAWMTRKSEETITPWNFEEVVDKGASAQSFIERMTNFDKNLPNEKVLPKHSLLYEYFTVYNELTKVKYVTEGMRKPAFLSGEQKKAIVDLLFKTNRKVTVKQLKEDYFKKIECFDSVEISGVEDRFNASLGTYHDLLKIIKDKDFLDNEENEDILEDIVLTLTLFEDREMIEERLKTYAHLFDDKVMKQLKRRRYTGWGRLSRKLINGIRDKQSGKTILDFLKSDGFANRNFMQLIHDDSLTFKEDIQKAQVSGQGDSLHEHIANLAGSPAIKKGILQTVKVVDELVKVMGRHKPENIVIEMARENQTTQKGQKNSRERMKRIEEGIKELGSQILKEHPVENTQLQNEKLYLYYLQNGRDMYVDQELDINRLSDYDVDHIVPQSFLKDDSIDNKVLTRSDKARGKSDNVPSEEVVKKMKNYWRQLLNAKLITQRKFDNLTKAERGGLSELDKAGFIKRQLVETRQITKHVAQILDSRMNTKYDENDKLIREVKVITLKSKLVSDFRKDFQFYKVREINNYHHAHDAYLNAVVGTALIKKYPKLESEFVYGDYKVYDVRKMIAKSEQEIGKATAKYFFYSNIMNFFKTEITLANGEIRKRPLIETNGETGEIVWDKGRDFATVRKVLSMPQVNIVKKTEVQTGGFSKESILPKRNSDKLIARKKDWDPKKYGGFDSPTVAYSVLVVAKVEKGKSKKLKSVKELLGITIMERSSFEKNPIDFLEAKGYKEVKKDLIIKLPKYSLFELENGRKRMLASAGELQKGNELALPSKYVNFLYLASHYEKLKGSPEDNEQKQLFVEQHKHYLDEIIEQISEFSKRVILADANLDKVLSAYNKHRDKPIREQAENIIHLFTLTNLGAPAAFKYFDTTIDRKRYTSTKEVLDATLIHQSITGLYETRIDLSQLGGDGGGSSPAPEAAAKGGTLQLEEEYRLFEPESTQKQEMDIWLKNFPQAWAETGGMGTAHCQAPVLIQLKATATPISIRQYPMPHEAYQGIKPHIRRMLDQGILKPCQSPWNTPLLPVKKPGTEDYRPVQDLREVNKRVEDIHPTVPNPYNLLSTLPPSHPWYTVLDLKDAFFCLRLHSESQLLFAFEWRDPEIGLSGQLTWTRLPQGFKNSPTLFNEALHSDLADFRVRYPALVLLQYVDDLLLAAATRTECLEGTKALLETLGNKGYRASAKKAQICLQEVTYLGYSLKDGQRWLTKARKEAILSIPVPKNSRQVREFLGKAGYCRLFIPGFAELAAPLYPLTRPGTLFQWGTEQQLAFEDIKKALLSSPALGLPDITKPFELFIDENSGFAKGVLVQKLGPWKRPVAYLSKKLDTVASGWPPCLRMVAAIAILVKDAGKLTLGQPLTILTSHPVEALVRQPPNKWLSNARMTHYQAMLLDAERVHFGPTVSLNPATLLPLPSGGNHHDCLQILAETHGTRPDLTDQPLPDADLTWYTDGSSFIRNGEREAGAAVTTESEVIWAAPLPPGTSAQRAELIALTQALKMAEGKKLTVYTDSRYAFATTHVHGEIYRRRGWLTSEGKEIKNKNEILALLEALFLPKRLSIIHCPGHQKGDSPQAKGNRLADDTAKKAATETHSSLTVLPAGKRTADGSEFEKRTADGSEFESPKKKAKVE

SEQ ID NO: 1226 - protein, 2087 aa, synthetic construct
MPAAKRVKLDGGDKKYSIGLDIGTNSVGWAVITDEYKVPSKKFKVLGNTDRHSIKKNLIGALLFDSGETAEATRLKRTARRRYTRRKNRICYLQEIFSNEMAKVDDSFFHRLEESFLVEEDKKHERHPIFGNIVDEVAYHEKYPTIYHLRKKLVDSTDKADLRLIYLALAHMIKFRGHFLIEGDLNPDNSDVDKLFIQLVQTYNQLFEENPINASGVDAKAILSARLSKSRRLENLIAQLPGEKKNGLFGNLIALSLGLTPNFKSNFDLAEDAKLQLSKDTYDDDLDNLLAQIGDQYADLFLAAKNLSDAILLSDILRVNTEITKAPLSASMIKRYDEHHQDLTLLKALVRQQLPEKYKEIFFDQSKNGYAGYIDGGASQEEFYKFIKPILEKMDGTEELLVKLNREDLLRKQRTFDNGSIPHQIHLGELHAILRRQEDFYPFLKDNREKIEKILTFRIPYYVGPLARGNSRFAWMTRKSEETITPWNFEEVVDKGASAQSFIERMTNFDKNLPNEKVLPKHSLLYEYFTVYNELTKVKYVTEGMRKPAFLSGEQKKAIVDLLFKTNRKVTVKQLKEDYFKKIECFDSVEISGVEDRFNASLGTYHDLLKIIKDKDFLDNEENEDILEDIVLTLTLFEDREMIEERLKTYAHLFDDKVMKQLKRRRYTGWGRLSRKLINGIRDKQSGKTILDFLKSDGFANRNFMQLIHDDSLTFKEDIQKAQVSGQGDSLHEHIANLAGSPAIKKGILQTVKVVDELVKVMGRHKPENIVIEMARENQTTQKGQKNSRERMKRIEEGIKELGSQILKEHPVENTQLQNEKLYLYYLQNGRDMYVDQELDINRLSDYDVDHIVPQSFLKDDSIDNKVLTRSDKARGKSDNVPSEEVVKKMKNYWRQLLNAKLITQRKFDNLTKAERGGLSELDKAGFIKRQLVETRQITKHVAQILDSRMNTKYDENDKLIREVKVITLKSKLVSDFRKDFQFYKVREINNYHHAHDAYLNAVVGTALIKKYPKLESEFVYGDYKVYDVRKMIAKSEQEIGKATAKYFFYSNIMNFFKTEITLANGEIRKRPLIETNGETGEIVWDKGRDFATVRKVLSMPQVNIVKKTEVQTGGFSKESILPKRNSDKLIARKKDWDPKKYGGFDSPTVAYSVLVVAKVEKGKSKKLKSVKELLGITIMERSSFEKNPIDFLEAKGYKEVKKDLIIKLPKYSLFELENGRKRMLASAGELQKGNELALPSKYVNFLYLASHYEKLKGSPEDNEQKQLFVEQHKHYLDEIIEQISEFSKRVILADANLDKVLSAYNKHRDKPIREQAENIIHLFTLTNLGAPAAFKYFDTTIDRKRYTSTKEVLDATLIHQSITGLYETRIDLSQLGGDGGGSSGGTLQLEEEYRLFEPESTQKQEMDIWLKNFPQAWAETGGMGTAHCQAPVLIQLKATATPISIRQYPMPHEAYQGIKPHIRRMLDQGILKPCQSPWNTPLLPVKKPGTEDYRPVQDLREVNKRVEDIHPTVPNPYNLLSTLPPSHPWYTVLDLKDAFFCLRLHSESQLLFAFEWRDPEIGLSGQLTWTRLPQGFKNSPTLFNEALHSDLADFRVRYPALVLLQYVDDLLLAAATRTECLEGTKALLETLGNKGYRASAKKAQICLQEVTYLGYSLKDGQRWLTKARKEAILSIPVPKNSRQVREFLGKAGYCRLFIPGFAELAAPLYPLTRPGTLFQWGTEQQLAFEDIKKALLSSPALGLPDITKPFELFIDENSGFAKGVLVQKLGPWKRPVAYLSKKLDTVASGWPPCLRMVAAIAILVKDAGKLTLGQPLTILTSHPVEALVRQPPNKWLSNARMTHYQAMLLDAERVHFGPTVSLNPATLLPLPSGGNHHDCLQILAETHGTRPDLTDQPLPDADLTWYTDGSSFIRNGEREAGAAVTTESEVIWAAPLPPGTSAQRAELIALTQALKMAEGKKLTVYTDSRYAFATTHVHGEIYRRRGWLTSEGKEIKNKNEILALLEALFLPKRLSIIHCPGHQKGDSPQAKGNRLADDTAKKAATETHSSLTVLPAGKRTADGSEFEKRTADGSEFESPKKKAKVE

SEQ ID NO: 1227 - protein, 2095 aa, synthetic construct
MPAAKRVKLDGGDKKYSIGLDIGTNSVGWAVITDEYKVPSKKFKVLGNTDRHSIKKNLIGALLFDSGETAEATRLKRTARRRYTRRKNRICYLQEIFSNEMAKVDDSFFHRLEESFLVEEDKKHERHPIFGNIVDEVAYHEKYPTIYHLRKKLVDSTDKADLRLIYLALAHMIKFRGHFLIEGDLNPDNSDVDKLFIQLVQTYNQLFEENPINASGVDAKAILSARLSKSRRLENLIAQLPGEKKNGLFGNLIALSLGLTPNFKSNFDLAEDAKLQLSKDTYDDDLDNLLAQIGDQYADLFLAAKNLSDAILLSDILRVNTEITKAPLSASMIKRYDEHHQDLTLLKALVRQQLPEKYKEIFFDQSKNGYAGYIDGGASQEEFYKFIKPILEKMDGTEELLVKLNREDLLRKQRTFDNGSIPHQIHLGELHAILRRQEDFYPFLKDNREKIEKILTFRIPYYVGPLARGNSRFAWMTRKSEETITPWNFEEVVDKGASAQSFIERMTNFDKNLPNEKVLPKHSLLYEYFTVYNELTKVKYVTEGMRKPAFLSGEQKKAIVDLLFKTNRKVTVKQLKEDYFKKIECFDSVEISGVEDRFNASLGTYHDLLKIIKDKDFLDNEENEDILEDIVLTLTLFEDREMIEERLKTYAHLFDDKVMKQLKRRRYTGWGRLSRKLINGIRDKQSGKTILDFLKSDGFANRNFMQLIHDDSLTFKEDIQKAQVSGQGDSLHEHIANLAGSPAIKKGILQTVKVVDELVKVMGRHKPENIVIEMARENQTTQKGQKNSRERMKRIEEGIKELGSQILKEHPVENTQLQNEKLYLYYLQNGRDMYVDQELDINRLSDYDVDHIVPQSFLKDDSIDNKVLTRSDKARGKSDNVPSEEVVKKMKNYWRQLLNAKLITQRKFDNLTKAERGGLSELDKAGFIKRQLVETRQITKHVAQILDSRMNTKYDENDKLIREVKVITLKSKLVSDFRKDFQFYKVREINNYHHAHDAYLNAVVGTALIKKYPKLESEFVYGDYKVYDVRKMIAKSEQEIGKATAKYFFYSNIMNFFKTEITLANGEIRKRPLIETNGETGEIVWDKGRDFATVRKVLSMPQVNIVKKTEVQTGGFSKESILPKRNSDKLIARKKDWDPKKYGGFDSPTVAYSVLVVAKVEKGKSKKLKSVKELLGITIMERSSFEKNPIDFLEAKGYKEVKKDLIIKLPKYSLFELENGRKRMLASAGELQKGNELALPSKYVNFLYLASHYEKLKGSPEDNEQKQLFVEQHKHYLDEIIEQISEFSKRVILADANLDKVLSAYNKHRDKPIREQAENIIHLFTLTNLGAPAAFKYFDTTIDRKRYTSTKEVLDATLIHQSITGLYETRIDLSQLGGDGGGSSGGGEAAAKGGTLQLEEEYRLFEPESTQKQEMDIWLKNFPQAWAETGGMGTAHCQAPVLIQLKATATPISIRQYPMPHEAYQGIKPHIRRMLDQGILKPCQSPWNTPLLPVKKPGTEDYRPVQDLREVNKRVEDIHPTVPNPYNLLSTLPPSHPWYTVLDLKDAFFCLRLHSESQLLFAFEWRDPEIGLSGQLTWTRLPQGFKNSPTLFNEALHSDLADFRVRYPALVLLQYVDDLLLAAATRTECLEGTKALLETLGNKGYRASAKKAQICLQEVTYLGYSLKDGQRWLTKARKEAILSIPVPKNSRQVREFLGKAGYCRLFIPGFAELAAPLYPLTRPGTLFQWGTEQQLAFEDIKKALLSSPALGLPDITKPFELFIDENSGFAKGVLVQKLGPWKRPVAYLSKKLDTVASGWPPCLRMVAAIAILVKDAGKLTLGQPLTILTSHPVEALVRQPPNKWLSNARMTHYQAMLLDAERVHFGPTVSLNPATLLPLPSGGNHHDCLQILAETHGTRPDLTDQPLPDADLTWYTDGSSFIRNGEREAGAAVTTESEVIWAAPLPPGTSAQRAELIALTQALKMAEGKKLTVYTDSRYAFATTHVHGEIYRRRGWLTSEGKEIKNKNEILALLEALFLPKRLSIIHCPGHQKGDSPQAKGNRLADDTAKKAATETHSSLTVLPAGKRTADGSEFEKRTADGSEFESPKKKAKVE

SEQ ID NO: 1228 - protein, 2090 aa, synthetic construct
MPAAKRVKLDGGDKKYSIGLDIGTNSVGWAVITDEYKVPSKKFKVLGNTDRHSIKKNLIGALLFDSGETAEATRLKRTARRRYTRRKNRICYLQEIFSNEMAKVDDSFFHRLEESFLVEEDKKHERHPIFGNIVDEVAYHEKYPTIYHLRKKLVDSTDKADLRLIYLALAHMIKFRGHFLIEGDLNPDNSDVDKLFIQLVQTYNQLFEENPINASGVDAKAILSARLSKSRRLENLIAQLPGEKKNGLFGNLIALSLGLTPNFKSNFDLAEDAKLQLSKDTYDDDLDNLLAQIGDQYADLFLAAKNLSDAILLSDILRVNTEITKAPLSASMIKRYDEHHQDLTLLKALVRQQLPEKYKEIFFDQSKNGYAGYIDGGASQEEFYKFIKPILEKMDGTEELLVKLNREDLLRKQRTFDNGSIPHQIHLGELHAILRRQEDFYPFLKDNREKIEKILTFRIPYYVGPLARGNSRFAWMTRKSEETITPWNFEEVVDKGASAQSFIERMTNFDKNLPNEKVLPKHSLLYEYFTVYNELTKVKYVTEGMRKPAFLSGEQKKAIVDLLFKTNRKVTVKQLKEDYFKKIECFDSVEISGVEDRFNASLGTYHDLLKIIKDKDFLDNEENEDILEDIVLTLTLFEDREMIEERLKTYAHLFDDKVMKQLKRRRYTGWGRLSRKLINGIRDKQSGKTILDFLKSDGFANRNFMQLIHDDSLTFKEDIQKAQVSGQGDSLHEHIANLAGSPAIKKGILQTVKVVDELVKVMGRHKPENIVIEMARENQTTQKGQKNSRERMKRIEEGIKELGSQILKEHPVENTQLQNEKLYLYYLQNGRDMYVDQELDINRLSDYDVDHIVPQSFLKDDSIDNKVLTRSDKARGKSDNVPSEEVVKKMKNYWRQLLNAKLITQRKFDNLTKAERGGLSELDKAGFIKRQLVETRQITKHVAQILDSRMNTKYDENDKLIREVKVITLKSKLVSDFRKDFQFYKVREINNYHHAHDAYLNAVVGTALIKKYPKLESEFVYGDYKVYDVRKMIAKSEQEIGKATAKYFFYSNIMNFFKTEITLANGEIRKRPLIETNGETGEIVWDKGRDFATVRKVLSMPQVNIVKKTEVQTGGFSKESILPKRNSDKLIARKKDWDPKKYGGFDSPTVAYSVLVVAKVEKGKSKKLKSVKELLGITIMERSSFEKNPIDFLEAKGYKEVKKDLIIKLPKYSLFELENGRKRMLASAGELQKGNELALPSKYVNFLYLASHYEKLKGSPEDNEQKQLFVEQHKHYLDEIIEQISEFSKRVILADANLDKVLSAYNKHRDKPIREQAENIIHLFTLTNLGAPAAFKYFDTTIDRKRYTSTKEVLDATLIHQSITGLYETRIDLSQLGGDGGPAPGGSGGTLQLEEEYRLFEPESTQKQEMDIWLKNFPQAWAETGGMGTAHCQAPVLIQLKATATPISIRQYPMPHEAYQGIKPHIRRMLDQGILKPCQSPWNTPLLPVKKPGTEDYRPVQDLREVNKRVEDIHPTVPNPYNLLSTLPPSHPWYTVLDLKDAFFCLRLHSESQLLFAFEWRDPEIGLSGQLTWTRLPQGFKNSPTLFNEALHSDLADFRVRYPALVLLQYVDDLLLAAATRTECLEGTKALLETLGNKGYRASAKKAQICLQEVTYLGYSLKDGQRWLTKARKEAILSIPVPKNSRQVREFLGKAGYCRLFIPGFAELAAPLYPLTRPGTLFQWGTEQQLAFEDIKKALLSSPALGLPDITKPFELFIDENSGFAKGVLVQKLGPWKRPVAYLSKKLDTVASGWPPCLRMVAAIAILVKDAGKLTLGQPLTILTSHPVEALVRQPPNKWLSNARMTHYQAMLLDAERVHFGPTVSLNPATLLPLPSGGNHHDCLQILAETHGTRPDLTDQPLPDADLTWYTDGSSFIRNGEREAGAAVTTESEVIWAAPLPPGTSAQRAELIALTQALKMAEGKKLTVYTDSRYAFATTHVHGEIYRRRGWLTSEGKEIKNKNEILALLEALFLPKRLSIIHCPGHQKGDSPQAKGNRLADDTAKKAATETHSSLTVLPAGKRTADGSEFEKRTADGSEFESPKKKAKVE

SEQ ID NO: 1229 - protein, 2090 aa, synthetic construct
MPAAKRVKLDGGDKKYSIGLDIGTNSVGWAVITDEYKVPSKKFKVLGNTDRHSIKKNLIGALLFDSGETAEATRLKRTARRRYTRRKNRICYLQEIFSNEMAKVDDSFFHRLEESFLVEEDKKHERHPIFGNIVDEVAYHEKYPTIYHLRKKLVDSTDKADLRLIYLALAHMIKFRGHFLIEGDLNPDNSDVDKLFIQLVQTYNQLFEENPINASGVDAKAILSARLSKSRRLENLIAQLPGEKKNGLFGNLIALSLGLTPNFKSNFDLAEDAKLQLSKDTYDDDLDNLLAQIGDQYADLFLAAKNLSDAILLSDILRVNTEITKAPLSASMIKRYDEHHQDLTLLKALVRQQLPEKYKEIFFDQSKNGYAGYIDGGASQEEFYKFIKPILEKMDGTEELLVKLNREDLLRKQRTFDNGSIPHQIHLGELHAILRRQEDFYPFLKDNREKIEKILTFRIPYYVGPLARGNSRFAWMTRKSEETITPWNFEEVVDKGASAQSFIERMTNFDKNLPNEKVLPKHSLLYEYFTVYNELTKVKYVTEGMRKPAFLSGEQKKAIVDLLFKTNRKVTVKQLKEDYFKKIECFDSVEISGVEDRFNASLGTYHDLLKIIKDKDFLDNEENEDILEDIVLTLTLFEDREMIEERLKTYAHLFDDKVMKQLKRRRYTGWGRLSRKLINGIRDKQSGKTILDFLKSDGFANRNFMQLIHDDSLTFKEDIQKAQVSGQGDSLHEHIANLAGSPAIKKGILQTVKVVDELVKVMGRHKPENIVIEMARENQTTQKGQKNSRERMKRIEEGIKELGSQILKEHPVENTQLQNEKLYLYYLQNGRDMYVDQELDINRLSDYDVDHIVPQSFLKDDSIDNKVLTRSDKARGKSDNVPSEEVVKKMKNYWRQLLNAKLITQRKFDNLTKAERGGLSELDKAGFIKRQLVETRQITKHVAQILDSRMNTKYDENDKLIREVKVITLKSKLVSDFRKDFQFYKVREINNYHHAHDAYLNAVVGTALIKKYPKLESEFVYGDYKVYDVRKMIAKSEQEIGKATAKYFFYSNIMNFFKTEITLANGEIRKRPLIETNGETGEIVWDKGRDFATVRKVLSMPQVNIVKKTEVQTGGFSKESILPKRNSDKLIARKKDWDPKKYGGFDSPTVAYSVLVVAKVEKGKSKKLKSVKELLGITIMERSSFEKNPIDFLEAKGYKEVKKDLIIKLPKYSLFELENGRKRMLASAGELQKGNELALPSKYVNFLYLASHYEKLKGSPEDNEQKQLFVEQHKHYLDEIIEQISEFSKRVILADANLDKVLSAYNKHRDKPIREQAENIIHLFTLTNLGAPAAFKYFDTTIDRKRYTSTKEVLDATLIHQSITGLYETRIDLSQLGGDGGGGGPAPGGTLQLEEEYRLFEPESTQKQEMDIWLKNFPQAWAETGGMGTAHCQAPVLIQLKATATPISIRQYPMPHEAYQGIKPHIRRMLDQGILKPCQSPWNTPLLPVKKPGTEDYRPVQDLREVNKRVEDIHPTVPNPYNLLSTLPPSHPWYTVLDLKDAFFCLRLHSESQLLFAFEWRDPEIGLSGQLTWTRLPQGFKNSPTLFNEALHSDLADFRVRYPALVLLQYVDDLLLAAATRTECLEGTKALLETLGNKGYRASAKKAQICLQEVTYLGYSLKDGQRWLTKARKEAILSIPVPKNSRQVREFLGKAGYCRLFIPGFAELAAPLYPLTRPGTLFQWGTEQQLAFEDIKKALLSSPALGLPDITKPFELFIDENSGFAKGVLVQKLGPWKRPVAYLSKKLDTVASGWPPCLRMVAAIAILVKDAGKLTLGQPLTILTSHPVEALVRQPPNKWLSNARMTHYQAMLLDAERVHFGPTVSLNPATLLPLPSGGNHHDCLQILAETHGTRPDLTDQPLPDADLTWYTDGSSFIRNGEREAGAAVTTESEVIWAAPLPPGTSAQRAELIALTQALKMAEGKKLTVYTDSRYAFATTHVHGEIYRRRGWLTSEGKEIKNKNEILALLEALFLPKRLSIIHCPGHQKGDSPQAKGNRLADDTAKKAATETHSSLTVLPAGKRTADGSEFEKRTADGSEFESPKKKAKVE

SEQ ID NO: 1230 - protein, 2092 aa, synthetic construct
MPAAKRVKLDGGDKKYSIGLDIGTNSVGWAVITDEYKVPSKKFKVLGNTDRHSIKKNLIGALLFDSGETAEATRLKRTARRRYTRRKNRICYLQEIFSNEMAKVDDSFFHRLEESFLVEEDKKHERHPIFGNIVDEVAYHEKYPTIYHLRKKLVDSTDKADLRLIYLALAHMIKFRGHFLIEGDLNPDNSDVDKLFIQLVQTYNQLFEENPINASGVDAKAILSARLSKSRRLENLIAQLPGEKKNGLFGNLIALSLGLTPNFKSNFDLAEDAKLQLSKDTYDDDLDNLLAQIGDQYADLFLAAKNLSDAILLSDILRVNTEITKAPLSASMIKRYDEHHQDLTLLKALVRQQLPEKYKEIFFDQSKNGYAGYIDGGASQEEFYKFIKPILEKMDGTEELLVKLNREDLLRKQRTFDNGSIPHQIHLGELHAILRRQEDFYPFLKDNREKIEKILTFRIPYYVGPLARGNSRFAWMTRKSEETITPWNFEEVVDKGASAQSFIERMTNFDKNLPNEKVLPKHSLLYEYFTVYNELTKVKYVTEGMRKPAFLSGEQKKAIVDLLFKTNRKVTVKQLKEDYFKKIECFDSVEISGVEDRFNASLGTYHDLLKIIKDKDFLDNEENEDILEDIVLTLTLFEDREMIEERLKTYAHLFDDKVMKQLKRRRYTGWGRLSRKLINGIRDKQSGKTILDFLKSDGFANRNFMQLIHDDSLTFKEDIQKAQVSGQGDSLHEHIANLAGSPAIKKGILQTVKVVDELVKVMGRHKPENIVIEMARENQTTQKGQKNSRERMKRIEEGIKELGSQILKEHPVENTQLQNEKLYLYYLQNGRDMYVDQELDINRLSDYDVDHIVPQSFLKDDSIDNKVLTRSDKARGKSDNVPSEEVVKKMKNYWRQLLNAKLITQRKFDNLTKAERGGLSELDKAGFIKRQLVETRQITKHVAQILDSRMNTKYDENDKLIREVKVITLKSKLVSDFRKDFQFYKVREINNYHHAHDAYLNAVVGTALIKKYPKLESEFVYGDYKVYDVRKMIAKSEQEIGKATAKYFFYSNIMNFFKTEITLANGEIRKRPLIETNGETGEIVWDKGRDFATVRKVLSMPQVNIVKKTEVQTGGFSKESILPKRNSDKLIARKKDWDPKKYGGFDSPTVAYSVLVVAKVEKGKSKKLKSVKELLGITIMERSSFEKNPIDFLEAKGYKEVKKDLIIKLPKYSLFELENGRKRMLASAGELQKGNELALPSKYVNFLYLASHYEKLKGSPEDNEQKQLFVEQHKHYLDEIIEQISEFSKRVILADANLDKVLSAYNKHRDKPIREQAENIIHLFTLTNLGAPAAFKYFDTTIDRKRYTSTKEVLDATLIHQSITGLYETRIDLSQLGGDGGPAPEAAAKGGTLQLEEEYRLFEPESTQKQEMDIWLKNFPQAWAETGGMGTAHCQAPVLIQLKATATPISIRQYPMPHEAYQGIKPHIRRMLDQGILKPCQSPWNTPLLPVKKPGTEDYRPVQDLREVNKRVEDIHPTVPNPYNLLSTLPPSHPWYTVLDLKDAFFCLRLHSESQLLFAFEWRDPEIGLSGQLTWTRLPQGFKNSPTLFNEALHSDLADFRVRYPALVLLQYVDDLLLAAATRTECLEGTKALLETLGNKGYRASAKKAQICLQEVTYLGYSLKDGQRWLTKARKEAILSIPVPKNSRQVREFLGKAGYCRLFIPGFAELAAPLYPLTRPGTLFQWGTEQQLAFEDIKKALLSSPALGLPDITKPFELFIDENSGFAKGVLVQKLGPWKRPVAYLSKKLDTVASGWPPCLRMVAAIAILVKDAGKLTLGQPLTILTSHPVEALVRQPPNKWLSNARMTHYQAMLLDAERVHFGPTVSLNPATLLPLPSGGNHHDCLQILAETHGTRPDLTDQPLPDADLTWYTDGSSFIRNGEREAGAAVTTESEVIWAAPLPPGTSAQRAELIALTQALKMAEGKKLTVYTDSRYAFATTHVHGEIYRRRGWLTSEGKEIKNKNEILALLEALFLPKRLSIIHCPGHQKGDSPQAKGNRLADDTAKKAATETHSSLTVLPAGKRTADGSEFEKRTADGSEFESPKKKAKVE

SEQ ID NO: 1231 - protein, 2099 aa, synthetic construct
MPAAKRVKLDGGDKKYSIGLDIGTNSVGWAVITDEYKVPSKKFKVLGNTDRHSIKKNLIGALLFDSGETAEATRLKRTARRRYTRRKNRICYLQEIFSNEMAKVDDSFFHRLEESFLVEEDKKHERHPIFGNIVDEVAYHEKYPTIYHLRKKLVDSTDKADLRLIYLALAHMIKFRGHFLIEGDLNPDNSDVDKLFIQLVQTYNQLFEENPINASGVDAKAILSARLSKSRRLENLIAQLPGEKKNGLFGNLIALSLGLTPNFKSNFDLAEDAKLQLSKDTYDDDLDNLLAQIGDQYADLFLAAKNLSDAILLSDILRVNTEITKAPLSASMIKRYDEHHQDLTLLKALVRQQLPEKYKEIFFDQSKNGYAGYIDGGASQEEFYKFIKPILEKMDGTEELLVKLNREDLLRKQRTFDNGSIPHQIHLGELHAILRRQEDFYPFLKDNREKIEKILTFRIPYYVGPLARGNSRFAWMTRKSEETITPWNFEEVVDKGASAQSFIERMTNFDKNLPNEKVLPKHSLLYEYFTVYNELTKVKYVTEGMRKPAFLSGEQKKAIVDLLFKTNRKVTVKQLKEDYFKKIECFDSVEISGVEDRFNASLGTYHDLLKIIKDKDFLDNEENEDILEDIVLTLTLFEDREMIEERLKTYAHLFDDKVMKQLKRRRYTGWGRLSRKLINGIRDKQSGKTILDFLKSDGFANRNFMQLIHDDSLTFKEDIQKAQVSGQGDSLHEHIANLAGSPAIKKGILQTVKVVDELVKVMGRHKPENIVIEMARENQTTQKGQKNSRERMKRIEEGIKELGSQILKEHPVENTQLQNEKLYLYYLQNGRDMYVDQELDINRLSDYDVDHIVPQSFLKDDSIDNKVLTRSDKARGKSDNVPSEEVVKKMKNYWRQLLNAKLITQRKFDNLTKAERGGLSELDKAGFIKRQLVETRQITKHVAQILDSRMNTKYDENDKLIREVKVITLKSKLVSDFRKDFQFYKVREINNYHHAHDAYLNAVVGTALIKKYPKLESEFVYGDYKVYDVRKMIAKSEQEIGKATAKYFFYSNIMNFFKTEITLANGEIRKRPLIETNGETGEIVWDKGRDFATVRKVLSMPQVNIVKKTEVQTGGFSKESILPKRNSDKLIARKKDWDPKKYGGFDSPTVAYSVLVVAKVEKGKSKKLKSVKELLGITIMERSSFEKNPIDFLEAKGYKEVKKDLIIKLPKYSLFELENGRKRMLASAGELQKGNELALPSKYVNFLYLASHYEKLKGSPEDNEQKQLFVEQHKHYLDEIIEQISEFSKRVILADANLDKVLSAYNKHRDKPIREQAENIIHLFTLTNLGAPAAFKYFDTTIDRKRYTSTKEVLDATLIHQSITGLYETRIDLSQLGGDGGGGGGSGGGGSGGGGSGGTLQLEEEYRLFEPESTQKQEMDIWLKNFPQAWAETGGMGTAHCQAPVLIQLKATATPISIRQYPMPHEAYQGIKPHIRRMLDQGILKPCQSPWNTPLLPVKKPGTEDYRPVQDLREVNKRVEDIHPTVPNPYNLLSTLPPSHPWYTVLDLKDAFFCLRLHSESQLLFAFEWRDPEIGLSGQLTWTRLPQGFKNSPTLFNEALHSDLADFRVRYPALVLLQYVDDLLLAAATRTECLEGTKALLETLGNKGYRASAKKAQICLQEVTYLGYSLKDGQRWLTKARKEAILSIPVPKNSRQVREFLGKAGYCRLFIPGFAELAAPLYPLTRPGTLFQWGTEQQLAFEDIKKALLSSPALGLPDITKPFELFIDENSGFAKGVLVQKLGPWKRPVAYLSKKLDTVASGWPPCLRMVAAIAILVKDAGKLTLGQPLTILTSHPVEALVRQPPNKWLSNARMTHYQAMLLDAERVHFGPTVSLNPATLLPLPSGGNHHDCLQILAETHGTRPDLTDQPLPDADLTWYTDGSSFIRNGEREAGAAVTTESEVIWAAPLPPGTSAQRAELIALTQALKMAEGKKLTVYTDSRYAFATTHVHGEIYRRRGWLTSEGKEIKNKNEILALLEALFLPKRLSIIHCPGHQKGDSPQAKGNRLADDTAKKAATETHSSLTVLPAGKRTADGSEFEKRTADGSEFESPKKKAKVE

SEQ ID NO: 1232 - protein, 2095 aa, synthetic construct
MPAAKRVKLDGGDKKYSIGLDIGTNSVGWAVITDEYKVPSKKFKVLGNTDRHSIKKNLIGALLFDSGETAEATRLKRTARRRYTRRKNRICYLQEIFSNEMAKVDDSFFHRLEESFLVEEDKKHERHPIFGNIVDEVAYHEKYPTIYHLRKKLVDSTDKADLRLIYLALAHMIKFRGHFLIEGDLNPDNSDVDKLFIQLVQTYNQLFEENPINASGVDAKAILSARLSKSRRLENLIAQLPGEKKNGLFGNLIALSLGLTPNFKSNFDLAEDAKLQLSKDTYDDDLDNLLAQIGDQYADLFLAAKNLSDAILLSDILRVNTEITKAPLSASMIKRYDEHHQDLTLLKALVRQQLPEKYKEIFFDQSKNGYAGYIDGGASQEEFYKFIKPILEKMDGTEELLVKLNREDLLRKQRTFDNGSIPHQIHLGELHAILRRQEDFYPFLKDNREKIEKILTFRIPYYVGPLARGNSRFAWMTRKSEETITPWNFEEVVDKGASAQSFIERMTNFDKNLPNEKVLPKHSLLYEYFTVYNELTKVKYVTEGMRKPAFLSGEQKKAIVDLLFKTNRKVTVKQLKEDYFKKIECFDSVEISGVEDRFNASLGTYHDLLKIIKDKDFLDNEENEDILEDIVLTLTLFEDREMIEERLKTYAHLFDDKVMKQLKRRRYTGWGRLSRKLINGIRDKQSGKTILDFLKSDGFANRNFMQLIHDDSLTFKEDIQKAQVSGQGDSLHEHIANLAGSPAIKKGILQTVKVVDELVKVMGRHKPENIVIEMARENQTTQKGQKNSRERMKRIEEGIKELGSQILKEHPVENTQLQNEKLYLYYLQNGRDMYVDQELDINRLSDYDVDHIVPQSFLKDDSIDNKVLTRSDKARGKSDNVPSEEVVKKMKNYWRQLLNAKLITQRKFDNLTKAERGGLSELDKAGFIKRQLVETRQITKHVAQILDSRMNTKYDENDKLIREVKVITLKSKLVSDFRKDFQFYKVREINNYHHAHDAYLNAVVGTALIKKYPKLESEFVYGDYKVYDVRKMIAKSEQEIGKATAKYFFYSNIMNFFKTEITLANGEIRKRPLIETNGETGEIVWDKGRDFATVRKVLSMPQVNIVKKTEVQTGGFSKESILPKRNSDKLIARKKDWDPKKYGGFDSPTVAYSVLVVAKVEKGKSKKLKSVKELLGITIMERSSFEKNPIDFLEAKGYKEVKKDLIIKLPKYSLFELENGRKRMLASAGELQKGNELALPSKYVNFLYLASHYEKLKGSPEDNEQKQLFVEQHKHYLDEIIEQISEFSKRVILADANLDKVLSAYNKHRDKPIREQAENIIHLFTLTNLGAPAAFKYFDTTIDRKRYTSTKEVLDATLIHQSITGLYETRIDLSQLGGDGGPAPAPAPAPAPGGTLQLEEEYRLFEPESTQKQEMDIWLKNFPQAWAETGGMGTAHCQAPVLIQLKATATPISIRQYPMPHEAYQGIKPHIRRMLDQGILKPCQSPWNTPLLPVKKPGTEDYRPVQDLREVNKRVEDIHPTVPNPYNLLSTLPPSHPWYTVLDLKDAFFCLRLHSESQLLFAFEWRDPEIGLSGQLTWTRLPQGFKNSPTLFNEALHSDLADFRVRYPALVLLQYVDDLLLAAATRTECLEGTKALLETLGNKGYRASAKKAQICLQEVTYLGYSLKDGQRWLTKARKEAILSIPVPKNSRQVREFLGKAGYCRLFIPGFAELAAPLYPLTRPGTLFQWGTEQQLAFEDIKKALLSSPALGLPDITKPFELFIDENSGFAKGVLVQKLGPWKRPVAYLSKKLDTVASGWPPCLRMVAAIAILVKDAGKLTLGQPLTILTSHPVEALVRQPPNKWLSNARMTHYQAMLLDAERVHFGPTVSLNPATLLPLPSGGNHHDCLQILAETHGTRPDLTDQPLPDADLTWYTDGSSFIRNGEREAGAAVTTESEVIWAAPLPPGTSAQRAELIALTQALKMAEGKKLTVYTDSRYAFATTHVHGEIYRRRGWLTSEGKEIKNKNEILALLEALFLPKRLSIIHCPGHQKGDSPQAKGNRLADDTAKKAATETHSSLTVLPAGKRTADGSEFEKRTADGSEFESPKKKAKVE

SEQ ID NO: 1233 - protein, 2094 aa, synthetic construct
MPAAKRVKLDGGDKKYSIGLDIGTNSVGWAVITDEYKVPSKKFKVLGNTDRHSIKKNLIGALLFDSGETAEATRLKRTARRRYTRRKNRICYLQEIFSNEMAKVDDSFFHRLEESFLVEEDKKHERHPIFGNIVDEVAYHEKYPTIYHLRKKLVDSTDKADLRLIYLALAHMIKFRGHFLIEGDLNPDNSDVDKLFIQLVQTYNQLFEENPINASGVDAKAILSARLSKSRRLENLIAQLPGEKKNGLFGNLIALSLGLTPNFKSNFDLAEDAKLQLSKDTYDDDLDNLLAQIGDQYADLFLAAKNLSDAILLSDILRVNTEITKAPLSASMIKRYDEHHQDLTLLKALVRQQLPEKYKEIFFDQSKNGYAGYIDGGASQEEFYKFIKPILEKMDGTEELLVKLNREDLLRKQRTFDNGSIPHQIHLGELHAILRRQEDFYPFLKDNREKIEKILTFRIPYYVGPLARGNSRFAWMTRKSEETITPWNFEEVVDKGASAQSFIERMTNFDKNLPNEKVLPKHSLLYEYFTVYNELTKVKYVTEGMRKPAFLSGEQKKAIVDLLFKTNRKVTVKQLKEDYFKKIECFDSVEISGVEDRFNASLGTYHDLLKIIKDKDFLDNEENEDILEDIVLTLTLFEDREMIEERLKTYAHLFDDKVMKQLKRRRYTGWGRLSRKLINGIRDKQSGKTILDFLKSDGFANRNFMQLIHDDSLTFKEDIQKAQVSGQGDSLHEHIANLAGSPAIKKGILQTVKVVDELVKVMGRHKPENIVIEMARENQTTQKGQKNSRERMKRIEEGIKELGSQILKEHPVENTQLQNEKLYLYYLQNGRDMYVDQELDINRLSDYDVDHIVPQSFLKDDSIDNKVLTRSDKARGKSDNVPSEEVVKKMKNYWRQLLNAKLITQRKFDNLTKAERGGLSELDKAGFIKRQLVETRQITKHVAQILDSRMNTKYDENDKLIREVKVITLKSKLVSDFRKDFQFYKVREINNYHHAHDAYLNAVVGTALIKKYPKLESEFVYGDYKVYDVRKMIAKSEQEIGKATAKYFFYSNIMNFFKTEITLANGEIRKRPLIETNGETGEIVWDKGRDFATVRKVLSMPQVNIVKKTEVQTGGFSKESILPKRNSDKLIARKKDWDPKKYGGFDSPTVAYSVLVVAKVEKGKSKKLKSVKELLGITIMERSSFEKNPIDFLEAKGYKEVKKDLIIKLPKYSLFELENGRKRMLASAGELQKGNELALPSKYVNFLYLASHYEKLKGSPEDNEQKQLFVEQHKHYLDEIIEQISEFSKRVILADANLDKVLSAYNKHRDKPIREQAENIIHLFTLTNLGAPAAFKYFDTTIDRKRYTSTKEVLDATLIHQSITGLYETRIDLSQLGGDGGGGGGSGGGGSGGTLQLEEEYRLFEPESTQKQEMDIWLKNFPQAWAETGGMGTAHCQAPVLIQLKATATPISIRQYPMPHEAYQGIKPHIRRMLDQGILKPCQSPWNTPLLPVKKPGTEDYRPVQDLREVNKRVEDIHPTVPNPYNLLSTLPPSHPWYTVLDLKDAFFCLRLHSESQLLFAFEWRDPEIGLSGQLTWTRLPQGFKNSPTLFNEALHSDLADFRVRYPALVLLQYVDDLLLAAATRTECLEGTKALLETLGNKGYRASAKKAQICLQEVTYLGYSLKDGQRWLTKARKEAILSIPVPKNSRQVREFLGKAGYCRLFIPGFAELAAPLYPLTRPGTLFQWGTEQQLAFEDIKKALLSSPALGLPDITKPFELFIDENSGFAKGVLVQKLGPWKRPVAYLSKKLDTVASGWPPCLRMVAAIAILVKDAGKLTLGQPLTILTSHPVEALVRQPPNKWLSNARMTHYQAMLLDAERVHFGPTVSLNPATLLPLPSGGNHHDCLQILAETHGTRPDLTDQPLPDADLTWYTDGSSFIRNGEREAGAAVTTESEVIWAAPLPPGTSAQRAELIALTQALKMAEGKKLTVYTDSRYAFATTHVHGEIYRRRGWLTSEGKEIKNKNEILALLEALFLPKRLSIIHCPGHQKGDSPQAKGNRLADDTAKKAATETHSSLTVLPAGKRTADGSEFEKRTADGSEFESPKKKAKVE

SEQ ID NO: 1234 - protein, 2095 aa, synthetic construct
MPAAKRVKLDGGDKKYSIGLDIGTNSVGWAVITDEYKVPSKKFKVLGNTDRHSIKKNLIGALLFDSGETAEATRLKRTARRRYTRRKNRICYLQEIFSNEMAKVDDSFFHRLEESFLVEEDKKHERHPIFGNIVDEVAYHEKYPTIYHLRKKLVDSTDKADLRLIYLALAHMIKFRGHFLIEGDLNPDNSDVDKLFIQLVQTYNQLFEENPINASGVDAKAILSARLSKSRRLENLIAQLPGEKKNGLFGNLIALSLGLTPNFKSNFDLAEDAKLQLSKDTYDDDLDNLLAQIGDQYADLFLAAKNLSDAILLSDILRVNTEITKAPLSASMIKRYDEHHQDLTLLKALVRQQLPEKYKEIFFDQSKNGYAGYIDGGASQEEFYKFIKPILEKMDGTEELLVKLNREDLLRKQRTFDNGSIPHQIHLGELHAILRRQEDFYPFLKDNREKIEKILTFRIPYYVGPLARGNSRFAWMTRKSEETITPWNFEEVVDKGASAQSFIERMTNFDKNLPNEKVLPKHSLLYEYFTVYNELTKVKYVTEGMRKPAFLSGEQKKAIVDLLFKTNRKVTVKQLKEDYFKKIECFDSVEISGVEDRFNASLGTYHDLLKIIKDKDFLDNEENEDILEDIVLTLTLFEDREMIEERLKTYAHLFDDKVMKQLKRRRYTGWGRLSRKLINGIRDKQSGKTILDFLKSDGFANRNFMQLIHDDSLTFKEDIQKAQVSGQGDSLHEHIANLAGSPAIKKGILQTVKVVDELVKVMGRHKPENIVIEMARENQTTQKGQKNSRERMKRIEEGIKELGSQILKEHPVENTQLQNEKLYLYYLQNGRDMYVDQELDINRLSDYDVDHIVPQSFLKDDSIDNKVLTRSDKARGKSDNVPSEEVVKKMKNYWRQLLNAKLITQRKFDNLTKAERGGLSELDKAGFIKRQLVETRQITKHVAQILDSRMNTKYDENDKLIREVKVITLKSKLVSDFRKDFQFYKVREINNYHHAHDAYLNAVVGTALIKKYPKLESEFVYGDYKVYDVRKMIAKSEQEIGKATAKYFFYSNIMNFFKTEITLANGEIRKRPLIETNGETGEIVWDKGRDFATVRKVLSMPQVNIVKKTEVQTGGFSKESILPKRNSDKLIARKKDWDPKKYGGFDSPTVAYSVLVVAKVEKGKSKKLKSVKELLGITIMERSSFEKNPIDFLEAKGYKEVKKDLIIKLPKYSLFELENGRKRMLASAGELQKGNELALPSKYVNFLYLASHYEKLKGSPEDNEQKQLFVEQHKHYLDEIIEQISEFSKRVILADANLDKVLSAYNKHRDKPIREQAENIIHLFTLTNLGAPAAFKYFDTTIDRKRYTSTKEVLDATLIHQSITGLYETRIDLSQLGGDGGEAAAKGSSGGSGGTLQLEEEYRLFEPESTQKQEMDIWLKNFPQAWAETGGMGTAHCQAPVLIQLKATATPISIRQYPMPHEAYQGIKPHIRRMLDQGILKPCQSPWNTPLLPVKKPGTEDYRPVQDLREVNKRVEDIHPTVPNPYNLLSTLPPSHPWYTVLDLKDAFFCLRLHSESQLLFAFEWRDPEIGLSGQLTWTRLPQGFKNSPTLFNEALHSDLADFRVRYPALVLLQYVDDLLLAAATRTECLEGTKALLETLGNKGYRASAKKAQICLQEVTYLGYSLKDGQRWLTKARKEAILSIPVPKNSRQVREFLGKAGYCRLFIPGFAELAAPLYPLTRPGTLFQWGTEQQLAFEDIKKALLSSPALGLPDITKPFELFIDENSGFAKGVLVQKLGPWKRPVAYLSKKLDTVASGWPPCLRMVAAIAILVKDAGKLTLGQPLTILTSHPVEALVRQPPNKWLSNARMTHYQAMLLDAERVHFGPTVSLNPATLLPLPSGGNHHDCLQILAETHGTRPDLTDQPLPDADLTWYTDGSSFIRNGEREAGAAVTTESEVIWAAPLPPGTSAQRAELIALTQALKMAEGKKLTVYTDSRYAFATTHVHGEIYRRRGWLTSEGKEIKNKNEILALLEALFLPKRLSIIHCPGHQKGDSPQAKGNRLADDTAKKAATETHSSLTVLPAGKRTADGSEFEKRTADGSEFESPKKKAKVE

SEQ ID NO: 1235 - protein, 2095 aa, synthetic construct
MPAAKRVKLDGGDKKYSIGLDIGTNSVGWAVITDEYKVPSKKFKVLGNTDRHSIKKNLIGALLFDSGETAEATRLKRTARRRYTRRKNRICYLQEIFSNEMAKVDDSFFHRLEESFLVEEDKKHERHPIFGNIVDEVAYHEKYPTIYHLRKKLVDSTDKADLRLIYLALAHMIKFRGHFLIEGDLNPDNSDVDKLFIQLVQTYNQLFEENPINASGVDAKAILSARLSKSRRLENLIAQLPGEKKNGLFGNLIALSLGLTPNFKSNFDLAEDAKLQLSKDTYDDDLDNLLAQIGDQYADLFLAAKNLSDAILLSDILRVNTEITKAPLSASMIKRYDEHHQDLTLLKALVRQQLPEKYKEIFFDQSKNGYAGYIDGGASQEEFYKFIKPILEKMDGTEELLVKLNREDLLRKQRTFDNGSIPHQIHLGELHAILRRQEDFYPFLKDNREKIEKILTFRIPYYVGPLARGNSRFAWMTRKSEETITPWNFEEVVDKGASAQSFIERMTNFDKNLPNEKVLPKHSLLYEYFTVYNELTKVKYVTEGMRKPAFLSGEQKKAIVDLLFKTNRKVTVKQLKEDYFKKIECFDSVEISGVEDRFNASLGTYHDLLKIIKDKDFLDNEENEDILEDIVLTLTLFEDREMIEERLKTYAHLFDDKVMKQLKRRRYTGWGRLSRKLINGIRDKQSGKTILDFLKSDGFANRNFMQLIHDDSLTFKEDIQKAQVSGQGDSLHEHIANLAGSPAIKKGILQTVKVVDELVKVMGRHKPENIVIEMARENQTTQKGQKNSRERMKRIEEGIKELGSQILKEHPVENTQLQNEKLYLYYLQNGRDMYVDQELDINRLSDYDVDHIVPQSFLKDDSIDNKVLTRSDKARGKSDNVPSEEVVKKMKNYWRQLLNAKLITQRKFDNLTKAERGGLSELDKAGFIKRQLVETRQITKHVAQILDSRMNTKYDENDKLIREVKVITLKSKLVSDFRKDFQFYKVREINNYHHAHDAYLNAVVGTALIKKYPKLESEFVYGDYKVYDVRKMIAKSEQEIGKATAKYFFYSNIMNFFKTEITLANGEIRKRPLIETNGETGEIVWDKGRDFATVRKVLSMPQVNIVKKTEVQTGGFSKESILPKRNSDKLIARKKDWDPKKYGGFDSPTVAYSVLVVAKVEKGKSKKLKSVKELLGITIMERSSFEKNPIDFLEAKGYKEVKKDLIIKLPKYSLFELENGRKRMLASAGELQKGNELALPSKYVNFLYLASHYEKLKGSPEDNEQKQLFVEQHKHYLDEIIEQISEFSKRVILADANLDKVLSAYNKHRDKPIREQAENIIHLFTLTNLGAPAAFKYFDTTIDRKRYTSTKEVLDATLIHQSITGLYETRIDLSQLGGDGGEAAAKGGGGGSGGTLQLEEEYRLFEPESTQKQEMDIWLKNFPQAWAETGGMGTAHCQAPVLIQLKATATPISIRQYPMPHEAYQGIKPHIRRMLDQGILKPCQSPWNTPLLPVKKPGTEDYRPVQDLREVNKRVEDIHPTVPNPYNLLSTLPPSHPWYTVLDLKDAFFCLRLHSESQLLFAFEWRDPEIGLSGQLTWTRLPQGFKNSPTLFNEALHSDLADFRVRYPALVLLQYVDDLLLAAATRTECLEGTKALLETLGNKGYRASAKKAQICLQEVTYLGYSLKDGQRWLTKARKEAILSIPVPKNSRQVREFLGKAGYCRLFIPGFAELAAPLYPLTRPGTLFQWGTEQQLAFEDIKKALLSSPALGLPDITKPFELFIDENSGFAKGVLVQKLGPWKRPVAYLSKKLDTVASGWPPCLRMVAAIAILVKDAGKLTLGQPLTILTSHPVEALVRQPPNKWLSNARMTHYQAMLLDAERVHFGPTVSLNPATLLPLPSGGNHHDCLQILAETHGTRPDLTDQPLPDADLTWYTDGSSFIRNGEREAGAAVTTESEVIWAAPLPPGTSAQRAELIALTQALKMAEGKKLTVYTDSRYAFATTHVHGEIYRRRGWLTSEGKEIKNKNEILALLEALFLPKRLSIIHCPGHQKGDSPQAKGNRLADDTAKKAATETHSSLTVLPAGKRTADGSEFEKRTADGSEFESPKKKAKVE

SEQ ID NO: 1236 - protein, 2092 aa, synthetic construct
MPAAKRVKLDGGDKKYSIGLDIGTNSVGWAVITDEYKVPSKKFKVLGNTDRHSIKKNLIGALLFDSGETAEATRLKRTARRRYTRRKNRICYLQEIFSNEMAKVDDSFFHRLEESFLVEEDKKHERHPIFGNIVDEVAYHEKYPTIYHLRKKLVDSTDKADLRLIYLALAHMIKFRGHFLIEGDLNPDNSDVDKLFIQLVQTYNQLFEENPINASGVDAKAILSARLSKSRRLENLIAQLPGEKKNGLFGNLIALSLGLTPNFKSNFDLAEDAKLQLSKDTYDDDLDNLLAQIGDQYADLFLAAKNLSDAILLSDILRVNTEITKAPLSASMIKRYDEHHQDLTLLKALVRQQLPEKYKEIFFDQSKNGYAGYIDGGASQEEFYKFIKPILEKMDGTEELLVKLNREDLLRKQRTFDNGSIPHQIHLGELHAILRRQEDFYPFLKDNREKIEKILTFRIPYYVGPLARGNSRFAWMTRKSEETITPWNFEEVVDKGASAQSFIERMTNFDKNLPNEKVLPKHSLLYEYFTVYNELTKVKYVTEGMRKPAFLSGEQKKAIVDLLFKTNRKVTVKQLKEDYFKKIECFDSVEISGVEDRFNASLGTYHDLLKIIKDKDFLDNEENEDILEDIVLTLTLFEDREMIEERLKTYAHLFDDKVMKQLKRRRYTGWGRLSRKLINGIRDKQSGKTILDFLKSDGFANRNFMQLIHDDSLTFKEDIQKAQVSGQGDSLHEHIANLAGSPAIKKGILQTVKVVDELVKVMGRHKPENIVIEMARENQTTQKGQKNSRERMKRIEEGIKELGSQILKEHPVENTQLQNEKLYLYYLQNGRDMYVDQELDINRLSDYDVDHIVPQSFLKDDSIDNKVLTRSDKARGKSDNVPSEEVVKKMKNYWRQLLNAKLITQRKFDNLTKAERGGLSELDKAGFIKRQLVETRQITKHVAQILDSRMNTKYDENDKLIREVKVITLKSKLVSDFRKDFQFYKVREINNYHHAHDAYLNAVVGTALIKKYPKLESEFVYGDYKVYDVRKMIAKSEQEIGKATAKYFFYSNIMNFFKTEITLANGEIRKRPLIETNGETGEIVWDKGRDFATVRKVLSMPQVNIVKKTEVQTGGFSKESILPKRNSDKLIARKKDWDPKKYGGFDSPTVAYSVLVVAKVEKGKSKKLKSVKELLGITIMERSSFEKNPIDFLEAKGYKEVKKDLIIKLPKYSLFELENGRKRMLASAGELQKGNELALPSKYVNFLYLASHYEKLKGSPEDNEQKQLFVEQHKHYLDEIIEQISEFSKRVILADANLDKVLSAYNKHRDKPIREQAENIIHLFTLTNLGAPAAFKYFDTTIDRKRYTSTKEVLDATLIHQSITGLYETRIDLSQLGGDGGGSSEAAAKGGTLQLEEEYRLFEPESTQKQEMDIWLKNFPQAWAETGGMGTAHCQAPVLIQLKATATPISIRQYPMPHEAYQGIKPHIRRMLDQGILKPCQSPWNTPLLPVKKPGTEDYRPVQDLREVNKRVEDIHPTVPNPYNLLSTLPPSHPWYTVLDLKDAFFCLRLHSESQLLFAFEWRDPEIGLSGQLTWTRLPQGFKNSPTLFNEALHSDLADFRVRYPALVLLQYVDDLLLAAATRTECLEGTKALLETLGNKGYRASAKKAQICLQEVTYLGYSLKDGQRWLTKARKEAILSIPVPKNSRQVREFLGKAGYCRLFIPGFAELAAPLYPLTRPGTLFQWGTEQQLAFEDIKKALLSSPALGLPDITKPFELFIDENSGFAKGVLVQKLGPWKRPVAYLSKKLDTVASGWPPCLRMVAAIAILVKDAGKLTLGQPLTILTSHPVEALVRQPPNKWLSNARMTHYQAMLLDAERVHFGPTVSLNPATLLPLPSGGNHHDCLQILAETHGTRPDLTDQPLPDADLTWYTDGSSFIRNGEREAGAAVTTESEVIWAAPLPPGTSAQRAELIALTQALKMAEGKKLTVYTDSRYAFATTHVHGEIYRRRGWLTSEGKEIKNKNEILALLEALFLPKRLSIIHCPGHQKGDSPQAKGNRLADDTAKKAATETHSSLTVLPAGKRTADGSEFEKRTADGSEFESPKKKAKVE

SEQ ID NO: 1237 - protein, 2095 aa, synthetic construct
MPAAKRVKLDGGDKKYSIGLDIGTNSVGWAVITDEYKVPSKKFKVLGNTDRHSIKKNLIGALLFDSGETAEATRLKRTARRRYTRRKNRICYLQEIFSNEMAKVDDSFFHRLEESFLVEEDKKHERHPIFGNIVDEVAYHEKYPTIYHLRKKLVDSTDKADLRLIYLALAHMIKFRGHFLIEGDLNPDNSDVDKLFIQLVQTYNQLFEENPINASGVDAKAILSARLSKSRRLENLIAQLPGEKKNGLFGNLIALSLGLTPNFKSNFDLAEDAKLQLSKDTYDDDLDNLLAQIGDQYADLFLAAKNLSDAILLSDILRVNTEITKAPLSASMIKRYDEHHQDLTLLKALVRQQLPEKYKEIFFDQSKNGYAGYIDGGASQEEFYKFIKPILEKMDGTEELLVKLNREDLLRKQRTFDNGSIPHQIHLGELHAILRRQEDFYPFLKDNREKIEKILTFRIPYYVGPLARGNSRFAWMTRKSEETITPWNFEEVVDKGASAQSFIERMTNFDKNLPNEKVLPKHSLLYEYFTVYNELTKVKYVTEGMRKPAFLSGEQKKAIVDLLFKTNRKVTVKQLKEDYFKKIECFDSVEISGVEDRFNASLGTYHDLLKIIKDKDFLDNEENEDILEDIVLTLTLFEDREMIEERLKTYAHLFDDKVMKQLKRRRYTGWGRLSRKLINGIRDKQSGKTILDFLKSDGFANRNFMQLIHDDSLTFKEDIQKAQVSGQGDSLHEHIANLAGSPAIKKGILQTVKVVDELVKVMGRHKPENIVIEMARENQTTQKGQKNSRERMKRIEEGIKELGSQILKEHPVENTQLQNEKLYLYYLQNGRDMYVDQELDINRLSDYDVDHIVPQSFLKDDSIDNKVLTRSDKARGKSDNVPSEEVVKKMKNYWRQLLNAKLITQRKFDNLTKAERGGLSELDKAGFIKRQLVETRQITKHVAQILDSRMNTKYDENDKLIREVKVITLKSKLVSDFRKDFQFYKVREINNYHHAHDAYLNAVVGTALIKKYPKLESEFVYGDYKVYDVRKMIAKSEQEIGKATAKYFFYSNIMNFFKTEITLANGEIRKRPLIETNGETGEIVWDKGRDFATVRKVLSMPQVNIVKKTEVQTGGFSKESILPKRNSDKLIARKKDWDPKKYGGFDSPTVAYSVLVVAKVEKGKSKKLKSVKELLGITIMERSSFEKNPIDFLEAKGYKEVKKDLIIKLPKYSLFELENGRKRMLASAGELQKGNELALPSKYVNFLYLASHYEKLKGSPEDNEQKQLFVEQHKHYLDEIIEQISEFSKRVILADANLDKVLSAYNKHRDKPIREQAENIIHLFTLTNLGAPAAFKYFDTTIDRKRYTSTKEVLDATLIHQSITGLYETRIDLSQLGGDGGGGSEAAAKGGGGGTLQLEEEYRLFEPESTQKQEMDIWLKNFPQAWAETGGMGTAHCQAPVLIQLKATATPISIRQYPMPHEAYQGIKPHIRRMLDQGILKPCQSPWNTPLLPVKKPGTEDYRPVQDLREVNKRVEDIHPTVPNPYNLLSTLPPSHPWYTVLDLKDAFFCLRLHSESQLLFAFEWRDPEIGLSGQLTWTRLPQGFKNSPTLFNEALHSDLADFRVRYPALVLLQYVDDLLLAAATRTECLEGTKALLETLGNKGYRASAKKAQICLQEVTYLGYSLKDGQRWLTKARKEAILSIPVPKNSRQVREFLGKAGYCRLFIPGFAELAAPLYPLTRPGTLFQWGTEQQLAFEDIKKALLSSPALGLPDITKPFELFIDENSGFAKGVLVQKLGPWKRPVAYLSKKLDTVASGWPPCLRMVAAIAILVKDAGKLTLGQPLTILTSHPVEALVRQPPNKWLSNARMTHYQAMLLDAERVHFGPTVSLNPATLLPLPSGGNHHDCLQILAETHGTRPDLTDQPLPDADLTWYTDGSSFIRNGEREAGAAVTTESEVIWAAPLPPGTSAQRAELIALTQALKMAEGKKLTVYTDSRYAFATTHVHGEIYRRRGWLTSEGKEIKNKNEILALLEALFLPKRLSIIHCPGHQKGDSPQAKGNRLADDTAKKAATETHSSLTVLPAGKRTADGSEFEKRTADGSEFESPKKKAKVE

SEQ ID NO: 1238 - protein, 2093 aa, synthetic construct
MPAAKRVKLDGGDKKYSIGLDIGTNSVGWAVITDEYKVPSKKFKVLGNTDRHSIKKNLIGALLFDSGETAEATRLKRTARRRYTRRKNRICYLQEIFSNEMAKVDDSFFHRLEESFLVEEDKKHERHPIFGNIVDEVAYHEKYPTIYHLRKKLVDSTDKADLRLIYLALAHMIKFRGHFLIEGDLNPDNSDVDKLFIQLVQTYNQLFEENPINASGVDAKAILSARLSKSRRLENLIAQLPGEKKNGLFGNLIALSLGLTPNFKSNFDLAEDAKLQLSKDTYDDDLDNLLAQIGDQYADLFLAAKNLSDAILLSDILRVNTEITKAPLSASMIKRYDEHHQDLTLLKALVRQQLPEKYKEIFFDQSKNGYAGYIDGGASQEEFYKFIKPILEKMDGTEELLVKLNREDLLRKQRTFDNGSIPHQIHLGELHAILRRQEDFYPFLKDNREKIEKILTFRIPYYVGPLARGNSRFAWMTRKSEETITPWNFEEVVDKGASAQSFIERMTNFDKNLPNEKVLPKHSLLYEYFTVYNELTKVKYVTEGMRKPAFLSGEQKKAIVDLLFKTNRKVTVKQLKEDYFKKIECFDSVEISGVEDRFNASLGTYHDLLKIIKDKDFLDNEENEDILEDIVLTLTLFEDREMIEERLKTYAHLFDDKVMKQLKRRRYTGWGRLSRKLINGIRDKQSGKTILDFLKSDGFANRNFMQLIHDDSLTFKEDIQKAQVSGQGDSLHEHIANLAGSPAIKKGILQTVKVVDELVKVMGRHKPENIVIEMARENQTTQKGQKNSRERMKRIEEGIKELGSQILKEHPVENTQLQNEKLYLYYLQNGRDMYVDQELDINRLSDYDVDHIVPQSFLKDDSIDNKVLTRSDKARGKSDNVPSEEVVKKMKNYWRQLLNAKLITQRKFDNLTKAERGGLSELDKAGFIKRQLVETRQITKHVAQILDSRMNTKYDENDKLIREVKVITLKSKLVSDFRKDFQFYKVREINNYHHAHDAYLNAVVGTALIKKYPKLESEFVYGDYKVYDVRKMIAKSEQEIGKATAKYFFYSNIMNFFKTEITLANGEIRKRPLIETNGETGEIVWDKGRDFATVRKVLSMPQVNIVKKTEVQTGGFSKESILPKRNSDKLIARKKDWDPKKYGGFDSPTVAYSVLVVAKVEKGKSKKLKSVKELLGITIMERSSFEKNPIDFLEAKGYKEVKKDLIIKLPKYSLFELENGRKRMLASAGELQKGNELALPSKYVNFLYLASHYEKLKGSPEDNEQKQLFVEQHKHYLDEIIEQISEFSKRVILADANLDKVLSAYNKHRDKPIREQAENIIHLFTLTNLGAPAAFKYFDTTIDRKRYTSTKEVLDATLIHQSITGLYETRIDLSQLGGDGGPAPGSSGGGGGTLQLEEEYRLFEPESTQKQEMDIWLKNFPQAWAETGGMGTAHCQAPVLIQLKATATPISIRQYPMPHEAYQGIKPHIRRMLDQGILKPCQSPWNTPLLPVKKPGTEDYRPVQDLREVNKRVEDIHPTVPNPYNLLSTLPPSHPWYTVLDLKDAFFCLRLHSESQLLFAFEWRDPEIGLSGQLTWTRLPQGFKNSPTLFNEALHSDLADFRVRYPALVLLQYVDDLLLAAATRTECLEGTKALLETLGNKGYRASAKKAQICLQEVTYLGYSLKDGQRWLTKARKEAILSIPVPKNSRQVREFLGKAGYCRLFIPGFAELAAPLYPLTRPGTLFQWGTEQQLAFEDIKKALLSSPALGLPDITKPFELFIDENSGFAKGVLVQKLGPWKRPVAYLSKKLDTVASGWPPCLRMVAAIAILVKDAGKLTLGQPLTILTSHPVEALVRQPPNKWLSNARMTHYQAMLLDAERVHFGPTVSLNPATLLPLPSGGNHHDCLQILAETHGTRPDLTDQPLPDADLTWYTDGSSFIRNGEREAGAAVTTESEVIWAAPLPPGTSAQRAELIALTQALKMAEGKKLTVYTDSRYAFATTHVHGEIYRRRGWLTSEGKEIKNKNEILALLEALFLPKRLSIIHCPGHQKGDSPQAKGNRLADDTAKKAATETHSSLTVLPAGKRTADGSEFEKRTADGSEFESPKKKAKVE

SEQ ID NO: 1239 - protein, 2095 aa, synthetic construct
MPAAKRVKLDGGDKKYSIGLDIGTNSVGWAVITDEYKVPSKKFKVLGNTDRHSIKKNLIGALLFDSGETAEATRLKRTARRRYTRRKNRICYLQEIFSNEMAKVDDSFFHRLEESFLVEEDKKHERHPIFGNIVDEVAYHEKYPTIYHLRKKLVDSTDKADLRLIYLALAHMIKFRGHFLIEGDLNPDNSDVDKLFIQLVQTYNQLFEENPINASGVDAKAILSARLSKSRRLENLIAQLPGEKKNGLFGNLIALSLGLTPNFKSNFDLAEDAKLQLSKDTYDDDLDNLLAQIGDQYADLFLAAKNLSDAILLSDILRVNTEITKAPLSASMIKRYDEHHQDLTLLKALVRQQLPEKYKEIFFDQSKNGYAGYIDGGASQEEFYKFIKPILEKMDGTEELLVKLNREDLLRKQRTFDNGSIPHQIHLGELHAILRRQEDFYPFLKDNREKIEKILTFRIPYYVGPLARGNSRFAWMTRKSEETITPWNFEEVVDKGASAQSFIERMTNFDKNLPNEKVLPKHSLLYEYFTVYNELTKVKYVTEGMRKPAFLSGEQKKAIVDLLFKTNRKVTVKQLKEDYFKKIECFDSVEISGVEDRFNASLGTYHDLLKIIKDKDFLDNEENEDILEDIVLTLTLFEDREMIEERLKTYAHLFDDKVMKQLKRRRYTGWGRLSRKLINGIRDKQSGKTILDFLKSDGFANRNFMQLIHDDSLTFKEDIQKAQVSGQGDSLHEHIANLAGSPAIKKGILQTVKVVDELVKVMGRHKPENIVIEMARENQTTQKGQKNSRERMKRIEEGIKELGSQILKEHPVENTQLQNEKLYLYYLQNGRDMYVDQELDINRLSDYDVDHIVPQSFLKDDSIDNKVLTRSDKARGKSDNVPSEEVVKKMKNYWRQLLNAKLITQRKFDNLTKAERGGLSELDKAGFIKRQLVETRQITKHVAQILDSRMNTKYDENDKLIREVKVITLKSKLVSDFRKDFQFYKVREINNYHHAHDAYLNAVVGTALIKKYPKLESEFVYGDYKVYDVRKMIAKSEQEIGKATAKYFFYSNIMNFFKTEITLANGEIRKRPLIETNGETGEIVWDKGRDFATVRKVLSMPQVNIVKKTEVQTGGFSKESILPKRNSDKLIARKKDWDPKKYGGFDSPTVAYSVLVVAKVEKGKSKKLKSVKELLGITIMERSSFEKNPIDFLEAKGYKEVKKDLIIKLPKYSLFELENGRKRMLASAGELQKGNELALPSKYVNFLYLASHYEKLKGSPEDNEQKQLFVEQHKHYLDEIIEQISEFSKRVILADANLDKVLSAYNKHRDKPIREQAENIIHLFTLTNLGAPAAFKYFDTTIDRKRYTSTKEVLDATLIHQSITGLYETRIDLSQLGGDGGPAPGGSEAAAKGGTLQLEEEYRLFEPESTQKQEMDIWLKNFPQAWAETGGMGTAHCQAPVLIQLKATATPISIRQYPMPHEAYQGIKPHIRRMLDQGILKPCQSPWNTPLLPVKKPGTEDYRPVQDLREVNKRVEDIHPTVPNPYNLLSTLPPSHPWYTVLDLKDAFFCLRLHSESQLLFAFEWRDPEIGLSGQLTWTRLPQGFKNSPTLFNEALHSDLADFRVRYPALVLLQYVDDLLLAAATRTECLEGTKALLETLGNKGYRASAKKAQICLQEVTYLGYSLKDGQRWLTKARKEAILSIPVPKNSRQVREFLGKAGYCRLFIPGFAELAAPLYPLTRPGTLFQWGTEQQLAFEDIKKALLSSPALGLPDITKPFELFIDENSGFAKGVLVQKLGPWKRPVAYLSKKLDTVASGWPPCLRMVAAIAILVKDAGKLTLGQPLTILTSHPVEALVRQPPNKWLSNARMTHYQAMLLDAERVHFGPTVSLNPATLLPLPSGGNHHDCLQILAETHGTRPDLTDQPLPDADLTWYTDGSSFIRNGEREAGAAVTTESEVIWAAPLPPGTSAQRAELIALTQALKMAEGKKLTVYTDSRYAFATTHVHGEIYRRRGWLTSEGKEIKNKNEILALLEALFLPKRLSIIHCPGHQKGDSPQAKGNRLADDTAKKAATETHSSLTVLPAGKRTADGSEFEKRTADGSEFESPKKKAKVE

SEQ ID NO: 1240 - protein, 2093 aa, synthetic construct
MPAAKRVKLDGGDKKYSIGLDIGTNSVGWAVITDEYKVPSKKFKVLGNTDRHSIKKNLIGALLFDSGETAEATRLKRTARRRYTRRKNRICYLQEIFSNEMAKVDDSFFHRLEESFLVEEDKKHERHPIFGNIVDEVAYHEKYPTIYHLRKKLVDSTDKADLRLIYLALAHMIKFRGHFLIEGDLNPDNSDVDKLFIQLVQTYNQLFEENPINASGVDAKAILSARLSKSRRLENLIAQLPGEKKNGLFGNLIALSLGLTPNFKSNFDLAEDAKLQLSKDTYDDDLDNLLAQIGDQYADLFLAAKNLSDAILLSDILRVNTEITKAPLSASMIKRYDEHHQDLTLLKALVRQQLPEKYKEIFFDQSKNGYAGYIDGGASQEEFYKFIKPILEKMDGTEELLVKLNREDLLRKQRTFDNGSIPHQIHLGELHAILRRQEDFYPFLKDNREKIEKILTFRIPYYVGPLARGNSRFAWMTRKSEETITPWNFEEVVDKGASAQSFIERMTNFDKNLPNEKVLPKHSLLYEYFTVYNELTKVKYVTEGMRKPAFLSGEQKKAIVDLLFKTNRKVTVKQLKEDYFKKIECFDSVEISGVEDRFNASLGTYHDLLKIIKDKDFLDNEENEDILEDIVLTLTLFEDREMIEERLKTYAHLFDDKVMKQLKRRRYTGWGRLSRKLINGIRDKQSGKTILDFLKSDGFANRNFMQLIHDDSLTFKEDIQKAQVSGQGDSLHEHIANLAGSPAIKKGILQTVKVVDELVKVMGRHKPENIVIEMARENQTTQKGQKNSRERMKRIEEGIKELGSQILKEHPVENTQLQNEKLYLYYLQNGRDMYVDQELDINRLSDYDVDHIVPQSFLKDDSIDNKVLTRSDKARGKSDNVPSEEVVKKMKNYWRQLLNAKLITQRKFDNLTKAERGGLSELDKAGFIKRQLVETRQITKHVAQILDSRMNTKYDENDKLIREVKVITLKSKLVSDFRKDFQFYKVREINNYHHAHDAYLNAVVGTALIKKYPKLESEFVYGDYKVYDVRKMIAKSEQEIGKATAKYFFYSNIMNFFKTEITLANGEIRKRPLIETNGETGEIVWDKGRDFATVRKVLSMPQVNIVKKTEVQTGGFSKESILPKRNSDKLIARKKDWDPKKYGGFDSPTVAYSVLVVAKVEKGKSKKLKSVKELLGITIMERSSFEKNPIDFLEAKGYKEVKKDLIIKLPKYSLFELENGRKRMLASAGELQKGNELALPSKYVNFLYLASHYEKLKGSPEDNEQKQLFVEQHKHYLDEIIEQISEFSKRVILADANLDKVLSAYNKHRDKPIREQAENIIHLFTLTNLGAPAAFKYFDTTIDRKRYTSTKEVLDATLIHQSITGLYETRIDLSQLGGDGGGSSGGGPAPGGTLQLEEEYRLFEPESTQKQEMDIWLKNFPQAWAETGGMGTAHCQAPVLIQLKATATPISIRQYPMPHEAYQGIKPHIRRMLDQGILKPCQSPWNTPLLPVKKPGTEDYRPVQDLREVNKRVEDIHPTVPNPYNLLSTLPPSHPWYTVLDLKDAFFCLRLHSESQLLFAFEWRDPEIGLSGQLTWTRLPQGFKNSPTLFNEALHSDLADFRVRYPALVLLQYVDDLLLAAATRTECLEGTKALLETLGNKGYRASAKKAQICLQEVTYLGYSLKDGQRWLTKARKEAILSIPVPKNSRQVREFLGKAGYCRLFIPGFAELAAPLYPLTRPGTLFQWGTEQQLAFEDIKKALLSSPALGLPDITKPFELFIDENSGFAKGVLVQKLGPWKRPVAYLSKKLDTVASGWPPCLRMVAAIAILVKDAGKLTLGQPLTILTSHPVEALVRQPPNKWLSNARMTHYQAMLLDAERVHFGPTVSLNPATLLPLPSGGNHHDCLQILAETHGTRPDLTDQPLPDADLTWYTDGSSFIRNGEREAGAAVTTESEVIWAAPLPPGTSAQRAELIALTQALKMAEGKKLTVYTDSRYAFATTHVHGEIYRRRGWLTSEGKEIKNKNEILALLEALFLPKRLSIIHCPGHQKGDSPQAKGNRLADDTAKKAATETHSSLTVLPAGKRTADGSEFEKRTADGSEFESPKKKAKVE

SEQ ID NO: 1241 - protein, 2095 aa, synthetic construct
MPAAKRVKLDGGDKKYSIGLDIGTNSVGWAVITDEYKVPSKKFKVLGNTDRHSIKKNLIGALLFDSGETAEATRLKRTARRRYTRRKNRICYLQEIFSNEMAKVDDSFFHRLEESFLVEEDKKHERHPIFGNIVDEVAYHEKYPTIYHLRKKLVDSTDKADLRLIYLALAHMIKFRGHFLIEGDLNPDNSDVDKLFIQLVQTYNQLFEENPINASGVDAKAILSARLSKSRRLENLIAQLPGEKKNGLFGNLIALSLGLTPNFKSNFDLAEDAKLQLSKDTYDDDLDNLLAQIGDQYADLFLAAKNLSDAILLSDILRVNTEITKAPLSASMIKRYDEHHQDLTLLKALVRQQLPEKYKEIFFDQSKNGYAGYIDGGASQEEFYKFIKPILEKMDGTEELLVKLNREDLLRKQRTFDNGSIPHQIHLGELHAILRRQEDFYPFLKDNREKIEKILTFRIPYYVGPLARGNSRFAWMTRKSEETITPWNFEEVVDKGASAQSFIERMTNFDKNLPNEKVLPKHSLLYEYFTVYNELTKVKYVTEGMRKPAFLSGEQKKAIVDLLFKTNRKVTVKQLKEDYFKKIECFDSVEISGVEDRFNASLGTYHDLLKIIKDKDFLDNEENEDILEDIVLTLTLFEDREMIEERLKTYAHLFDDKVMKQLKRRRYTGWGRLSRKLINGIRDKQSGKTILDFLKSDGFANRNFMQLIHDDSLTFKEDIQKAQVSGQGDSLHEHIANLAGSPAIKKGILQTVKVVDELVKVMGRHKPENIVIEMARENQTTQKGQKNSRERMKRIEEGIKELGSQILKEHPVENTQLQNEKLYLYYLQNGRDMYVDQELDINRLSDYDVDHIVPQSFLKDDSIDNKVLTRSDKARGKSDNVPSEEVVKKMKNYWRQLLNAKLITQRKFDNLTKAERGGLSELDKAGFIKRQLVETRQITKHVAQILDSRMNTKYDENDKLIREVKVITLKSKLVSDFRKDFQFYKVREINNYHHAHDAYLNAVVGTALIKKYPKLESEFVYGDYKVYDVRKMIAKSEQEIGKATAKYFFYSNIMNFFKTEITLANGEIRKRPLIETNGETGEIVWDKGRDFATVRKVLSMPQVNIVKKTEVQTGGFSKESILPKRNSDKLIARKKDWDPKKYGGFDSPTVAYSVLVVAKVEKGKSKKLKSVKELLGITIMERSSFEKNPIDFLEAKGYKEVKKDLIIKLPKYSLFELENGRKRMLASAGELQKGNELALPSKYVNFLYLASHYEKLKGSPEDNEQKQLFVEQHKHYLDEIIEQISEFSKRVILADANLDKVLSAYNKHRDKPIREQAENIIHLFTLTNLGAPAAFKYFDTTIDRKRYTSTKEVLDATLIHQSITGLYETRIDLSQLGGDGGEAAAKGGSGSSGGTLQLEEEYRLFEPESTQKQEMDIWLKNFPQAWAETGGMGTAHCQAPVLIQLKATATPISIRQYPMPHEAYQGIKPHIRRMLDQGILKPCQSPWNTPLLPVKKPGTEDYRPVQDLREVNKRVEDIHPTVPNPYNLLSTLPPSHPWYTVLDLKDAFFCLRLHSESQLLFAFEWRDPEIGLSGQLTWTRLPQGFKNSPTLFNEALHSDLADFRVRYPALVLLQYVDDLLLAAATRTECLEGTKALLETLGNKGYRASAKKAQICLQEVTYLGYSLKDGQRWLTKARKEAILSIPVPKNSRQVREFLGKAGYCRLFIPGFAELAAPLYPLTRPGTLFQWGTEQQLAFEDIKKALLSSPALGLPDITKPFELFIDENSGFAKGVLVQKLGPWKRPVAYLSKKLDTVASGWPPCLRMVAAIAILVKDAGKLTLGQPLTILTSHPVEALVRQPPNKWLSNARMTHYQAMLLDAERVHFGPTVSLNPATLLPLPSGGNHHDCLQILAETHGTRPDLTDQPLPDADLTWYTDGSSFIRNGEREAGAAVTTESEVIWAAPLPPGTSAQRAELIALTQALKMAEGKKLTVYTDSRYAFATTHVHGEIYRRRGWLTSEGKEIKNKNEILALLEALFLPKRLSIIHCPGHQKGDSPQAKGNRLADDTAKKAATETHSSLTVLPAGKRTADGSEFEKRTADGSEFESPKKKAKVE

SEQ ID NO: 1242 - protein, 2095 aa, synthetic construct
MPAAKRVKLDGGDKKYSIGLDIGTNSVGWAVITDEYKVPSKKFKVLGNTDRHSIKKNLIGALLFDSGETAEATRLKRTARRRYTRRKNRICYLQEIFSNEMAKVDDSFFHRLEESFLVEEDKKHERHPIFGNIVDEVAYHEKYPTIYHLRKKLVDSTDKADLRLIYLALAHMIKFRGHFLIEGDLNPDNSDVDKLFIQLVQTYNQLFEENPINASGVDAKAILSARLSKSRRLENLIAQLPGEKKNGLFGNLIALSLGLTPNFKSNFDLAEDAKLQLSKDTYDDDLDNLLAQIGDQYADLFLAAKNLSDAILLSDILRVNTEITKAPLSASMIKRYDEHHQDLTLLKALVRQQLPEKYKEIFFDQSKNGYAGYIDGGASQEEFYKFIKPILEKMDGTEELLVKLNREDLLRKQRTFDNGSIPHQIHLGELHAILRRQEDFYPFLKDNREKIEKILTFRIPYYVGPLARGNSRFAWMTRKSEETITPWNFEEVVDKGASAQSFIERMTNFDKNLPNEKVLPKHSLLYEYFTVYNELTKVKYVTEGMRKPAFLSGEQKKAIVDLLFKTNRKVTVKQLKEDYFKKIECFDSVEISGVEDRFNASLGTYHDLLKIIKDKDFLDNEENEDILEDIVLTLTLFEDREMIEERLKTYAHLFDDKVMKQLKRRRYTGWGRLSRKLINGIRDKQSGKTILDFLKSDGFANRNFMQLIHDDSLTFKEDIQKAQVSGQGDSLHEHIANLAGSPAIKKGILQTVKVVDELVKVMGRHKPENIVIEMARENQTTQKGQKNSRERMKRIEEGIKELGSQILKEHPVENTQLQNEKLYLYYLQNGRDMYVDQELDINRLSDYDVDHIVPQSFLKDDSIDNKVLTRSDKARGKSDNVPSEEVVKKMKNYWRQLLNAKLITQRKFDNLTKAERGGLSELDKAGFIKRQLVETRQITKHVAQILDSRMNTKYDENDKLIREVKVITLKSKLVSDFRKDFQFYKVREINNYHHAHDAYLNAVVGTALIKKYPKLESEFVYGDYKVYDVRKMIAKSEQEIGKATAKYFFYSNIMNFFKTEITLANGEIRKRPLIETNGETGEIVWDKGRDFATVRKVLSMPQVNIVKKTEVQTGGFSKESILPKRNSDKLIARKKDWDPKKYGGFDSPTVAYSVLVVAKVEKGKSKKLKSVKELLGITIMERSSFEKNPIDFLEAKGYKEVKKDLIIKLPKYSLFELENGRKRMLASAGELQKGNELALPSKYVNFLYLASHYEKLKGSPEDNEQKQLFVEQHKHYLDEIIEQISEFSKRVILADANLDKVLSAYNKHRDKPIREQAENIIHLFTLTNLGAPAAFKYFDTTIDRKRYTSTKEVLDATLIHQSITGLYETRIDLSQLGGDGGGSSGGSEAAAKGGTLQLEEEYRLFEPESTQKQEMDIWLKNFPQAWAETGGMGTAHCQAPVLIQLKATATPISIRQYPMPHEAYQGIKPHIRRMLDQGILKPCQSPWNTPLLPVKKPGTEDYRPVQDLREVNKRVEDIHPTVPNPYNLLSTLPPSHPWYTVLDLKDAFFCLRLHSESQLLFAFEWRDPEIGLSGQLTWTRLPQGFKNSPTLFNEALHSDLADFRVRYPALVLLQYVDDLLLAAATRTECLEGTKALLETLGNKGYRASAKKAQICLQEVTYLGYSLKDGQRWLTKARKEAILSIPVPKNSRQVREFLGKAGYCRLFIPGFAELAAPLYPLTRPGTLFQWGTEQQLAFEDIKKALLSSPALGLPDITKPFELFIDENSGFAKGVLVQKLGPWKRPVAYLSKKLDTVASGWPPCLRMVAAIAILVKDAGKLTLGQPLTILTSHPVEALVRQPPNKWLSNARMTHYQAMLLDAERVHFGPTVSLNPATLLPLPSGGNHHDCLQILAETHGTRPDLTDQPLPDADLTWYTDGSSFIRNGEREAGAAVTTESEVIWAAPLPPGTSAQRAELIALTQALKMAEGKKLTVYTDSRYAFATTHVHGEIYRRRGWLTSEGKEIKNKNEILALLEALFLPKRLSIIHCPGHQKGDSPQAKGNRLADDTAKKAATETHSSLTVLPAGKRTADGSEFEKRTADGSEFESPKKKAKVE

SEQ ID NO: 1243 - protein, 2099 aa, synthetic construct
MPAAKRVKLDGGDKKYSIGLDIGTNSVGWAVITDEYKVPSKKFKVLGNTDRHSIKKNLIGALLFDSGETAEATRLKRTARRRYTRRKNRICYLQEIFSNEMAKVDDSFFHRLEESFLVEEDKKHERHPIFGNIVDEVAYHEKYPTIYHLRKKLVDSTDKADLRLIYLALAHMIKFRGHFLIEGDLNPDNSDVDKLFIQLVQTYNQLFEENPINASGVDAKAILSARLSKSRRLENLIAQLPGEKKNGLFGNLIALSLGLTPNFKSNFDLAEDAKLQLSKDTYDDDLDNLLAQIGDQYADLFLAAKNLSDAILLSDILRVNTEITKAPLSASMIKRYDEHHQDLTLLKALVRQQLPEKYKEIFFDQSKNGYAGYIDGGASQEEFYKFIKPILEKMDGTEELLVKLNREDLLRKQRTFDNGSIPHQIHLGELHAILRRQEDFYPFLKDNREKIEKILTFRIPYYVGPLARGNSRFAWMTRKSEETITPWNFEEVVDKGASAQSFIERMTNFDKNLPNEKVLPKHSLLYEYFTVYNELTKVKYVTEGMRKPAFLSGEQKKAIVDLLFKTNRKVTVKQLKEDYFKKIECFDSVEISGVEDRFNASLGTYHDLLKIIKDKDFLDNEENEDILEDIVLTLTLFEDREMIEERLKTYAHLFDDKVMKQLKRRRYTGWGRLSRKLINGIRDKQSGKTILDFLKSDGFANRNFMQLIHDDSLTFKEDIQKAQVSGQGDSLHEHIANLAGSPAIKKGILQTVKVVDELVKVMGRHKPENIVIEMARENQTTQKGQKNSRERMKRIEEGIKELGSQILKEHPVENTQLQNEKLYLYYLQNGRDMYVDQELDINRLSDYDVDHIVPQSFLKDDSIDNKVLTRSDKARGKSDNVPSEEVVKKMKNYWRQLLNAKLITQRKFDNLTKAERGGLSELDKAGFIKRQLVETRQITKHVAQILDSRMNTKYDENDKLIREVKVITLKSKLVSDFRKDFQFYKVREINNYHHAHDAYLNAVVGTALIKKYPKLESEFVYGDYKVYDVRKMIAKSEQEIGKATAKYFFYSNIMNFFKTEITLANGEIRKRPLIETNGETGEIVWDKGRDFATVRKVLSMPQVNIVKKTEVQTGGFSKESILPKRNSDKLIARKKDWDPKKYGGFDSPTVAYSVLVVAKVEKGKSKKLKSVKELLGITIMERSSFEKNPIDFLEAKGYKEVKKDLIIKLPKYSLFELENGRKRMLASAGELQKGNELALPSKYVNFLYLASHYEKLKGSPEDNEQKQLFVEQHKHYLDEIIEQISEFSKRVILADANLDKVLSAYNKHRDKPIREQAENIIHLFTLTNLGAPAAFKYFDTTIDRKRYTSTKEVLDATLIHQSITGLYETRIDLSQLGGDGGEAAAKGGGGSEAAAKGGTLQLEEEYRLFEPESTQKQEMDIWLKNFPQAWAETGGMGTAHCQAPVLIQLKATATPISIRQYPMPHEAYQGIKPHIRRMLDQGILKPCQSPWNTPLLPVKKPGTEDYRPVQDLREVNKRVEDIHPTVPNPYNLLSTLPPSHPWYTVLDLKDAFFCLRLHSESQLLFAFEWRDPEIGLSGQLTWTRLPQGFKNSPTLFNEALHSDLADFRVRYPALVLLQYVDDLLLAAATRTECLEGTKALLETLGNKGYRASAKKAQICLQEVTYLGYSLKDGQRWLTKARKEAILSIPVPKNSRQVREFLGKAGYCRLFIPGFAELAAPLYPLTRPGTLFQWGTEQQLAFEDIKKALLSSPALGLPDITKPFELFIDENSGFAKGVLVQKLGPWKRPVAYLSKKLDTVASGWPPCLRMVAAIAILVKDAGKLTLGQPLTILTSHPVEALVRQPPNKWLSNARMTHYQAMLLDAERVHFGPTVSLNPATLLPLPSGGNHHDCLQILAETHGTRPDLTDQPLPDADLTWYTDGSSFIRNGEREAGAAVTTESEVIWAAPLPPGTSAQRAELIALTQALKMAEGKKLTVYTDSRYAFATTHVHGEIYRRRGWLTSEGKEIKNKNEILALLEALFLPKRLSIIHCPGHQKGDSPQAKGNRLADDTAKKAATETHSSLTVLPAGKRTADGSEFEKRTADGSEFESPKKKAKVE

SEQ ID NO: 1244 - protein, 2093 aa, synthetic construct
MPAAKRVKLDGGDKKYSIGLDIGTNSVGWAVITDEYKVPSKKFKVLGNTDRHSIKKNLIGALLFDSGETAEATRLKRTARRRYTRRKNRICYLQEIFSNEMAKVDDSFFHRLEESFLVEEDKKHERHPIFGNIVDEVAYHEKYPTIYHLRKKLVDSTDKADLRLIYLALAHMIKFRGHFLIEGDLNPDNSDVDKLFIQLVQTYNQLFEENPINASGVDAKAILSARLSKSRRLENLIAQLPGEKKNGLFGNLIALSLGLTPNFKSNFDLAEDAKLQLSKDTYDDDLDNLLAQIGDQYADLFLAAKNLSDAILLSDILRVNTEITKAPLSASMIKRYDEHHQDLTLLKALVRQQLPEKYKEIFFDQSKNGYAGYIDGGASQEEFYKFIKPILEKMDGTEELLVKLNREDLLRKQRTFDNGSIPHQIHLGELHAILRRQEDFYPFLKDNREKIEKILTFRIPYYVGPLARGNSRFAWMTRKSEETITPWNFEEVVDKGASAQSFIERMTNFDKNLPNEKVLPKHSLLYEYFTVYNELTKVKYVTEGMRKPAFLSGEQKKAIVDLLFKTNRKVTVKQLKEDYFKKIECFDSVEISGVEDRFNASLGTYHDLLKIIKDKDFLDNEENEDILEDIVLTLTLFEDREMIEERLKTYAHLFDDKVMKQLKRRRYTGWGRLSRKLINGIRDKQSGKTILDFLKSDGFANRNFMQLIHDDSLTFKEDIQKAQVSGQGDSLHEHIANLAGSPAIKKGILQTVKVVDELVKVMGRHKPENIVIEMARENQTTQKGQKNSRERMKRIEEGIKELGSQILKEHPVENTQLQNEKLYLYYLQNGRDMYVDQELDINRLSDYDVDHIVPQSFLKDDSIDNKVLTRSDKARGKSDNVPSEEVVKKMKNYWRQLLNAKLITQRKFDNLTKAERGGLSELDKAGFIKRQLVETRQITKHVAQILDSRMNTKYDENDKLIREVKVITLKSKLVSDFRKDFQFYKVREINNYHHAHDAYLNAVVGTALIKKYPKLESEFVYGDYKVYDVRKMIAKSEQEIGKATAKYFFYSNIMNFFKTEITLANGEIRKRPLIETNGETGEIVWDKGRDFATVRKVLSMPQVNIVKKTEVQTGGFSKESILPKRNSDKLIARKKDWDPKKYGGFDSPTVAYSVLVVAKVEKGKSKKLKSVKELLGITIMERSSFEKNPIDFLEAKGYKEVKKDLIIKLPKYSLFELENGRKRMLASAGELQKGNELALPSKYVNFLYLASHYEKLKGSPEDNEQKQLFVEQHKHYLDEIIEQISEFSKRVILADANLDKVLSAYNKHRDKPIREQAENIIHLFTLTNLGAPAAFKYFDTTIDRKRYTSTKEVLDATLIHQSITGLYETRIDLSQLGGDGGGGSGSSPAPGGTLQLEEEYRLFEPESTQKQEMDIWLKNFPQAWAETGGMGTAHCQAPVLIQLKATATPISIRQYPMPHEAYQGIKPHIRRMLDQGILKPCQSPWNTPLLPVKKPGTEDYRPVQDLREVNKRVEDIHPTVPNPYNLLSTLPPSHPWYTVLDLKDAFFCLRLHSESQLLFAFEWRDPEIGLSGQLTWTRLPQGFKNSPTLFNEALHSDLADFRVRYPALVLLQYVDDLLLAAATRTECLEGTKALLETLGNKGYRASAKKAQICLQEVTYLGYSLKDGQRWLTKARKEAILSIPVPKNSRQVREFLGKAGYCRLFIPGFAELAAPLYPLTRPGTLFQWGTEQQLAFEDIKKALLSSPALGLPDITKPFELFIDENSGFAKGVLVQKLGPWKRPVAYLSKKLDTVASGWPPCLRMVAAIAILVKDAGKLTLGQPLTILTSHPVEALVRQPPNKWLSNARMTHYQAMLLDAERVHFGPTVSLNPATLLPLPSGGNHHDCLQILAETHGTRPDLTDQPLPDADLTWYTDGSSFIRNGEREAGAAVTTESEVIWAAPLPPGTSAQRAELIALTQALKMAEGKKLTVYTDSRYAFATTHVHGEIYRRRGWLTSEGKEIKNKNEILALLEALFLPKRLSIIHCPGHQKGDSPQAKGNRLADDTAKKAATETHSSLTVLPAGKRTADGSEFEKRTADGSEFESPKKKAKVE

SEQ ID NO: 1245 - protein, 2090 aa, synthetic construct
MPAAKRVKLDGGDKKYSIGLDIGTNSVGWAVITDEYKVPSKKFKVLGNTDRHSIKKNLIGALLFDSGETAEATRLKRTARRRYTRRKNRICYLQEIFSNEMAKVDDSFFHRLEESFLVEEDKKHERHPIFGNIVDEVAYHEKYPTIYHLRKKLVDSTDKADLRLIYLALAHMIKFRGHFLIEGDLNPDNSDVDKLFIQLVQTYNQLFEENPINASGVDAKAILSARLSKSRRLENLIAQLPGEKKNGLFGNLIALSLGLTPNFKSNFDLAEDAKLQLSKDTYDDDLDNLLAQIGDQYADLFLAAKNLSDAILLSDILRVNTEITKAPLSASMIKRYDEHHQDLTLLKALVRQQLPEKYKEIFFDQSKNGYAGYIDGGASQEEFYKFIKPILEKMDGTEELLVKLNREDLLRKQRTFDNGSIPHQIHLGELHAILRRQEDFYPFLKDNREKIEKILTFRIPYYVGPLARGNSRFAWMTRKSEETITPWNFEEVVDKGASAQSFIERMTNFDKNLPNEKVLPKHSLLYEYFTVYNELTKVKYVTEGMRKPAFLSGEQKKAIVDLLFKTNRKVTVKQLKEDYFKKIECFDSVEISGVEDRFNASLGTYHDLLKIIKDKDFLDNEENEDILEDIVLTLTLFEDREMIEERLKTYAHLFDDKVMKQLKRRRYTGWGRLSRKLINGIRDKQSGKTILDFLKSDGFANRNFMQLIHDDSLTFKEDIQKAQVSGQGDSLHEHIANLAGSPAIKKGILQTVKVVDELVKVMGRHKPENIVIEMARENQTTQKGQKNSRERMKRIEEGIKELGSQILKEHPVENTQLQNEKLYLYYLQNGRDMYVDQELDINRLSDYDVDHIVPQSFLKDDSIDNKVLTRSDKARGKSDNVPSEEVVKKMKNYWRQLLNAKLITQRKFDNLTKAERGGLSELDKAGFIKRQLVETRQITKHVAQILDSRMNTKYDENDKLIREVKVITLKSKLVSDFRKDFQFYKVREINNYHHAHDAYLNAVVGTALIKKYPKLESEFVYGDYKVYDVRKMIAKSEQEIGKATAKYFFYSNIMNFFKTEITLANGEIRKRPLIETNGETGEIVWDKGRDFATVRKVLSMPQVNIVKKTEVQTGGFSKESILPKRNSDKLIARKKDWDPKKYGGFDSPTVAYSVLVVAKVEKGKSKKLKSVKELLGITIMERSSFEKNPIDFLEAKGYKEVKKDLIIKLPKYSLFELENGRKRMLASAGELQKGNELALPSKYVNFLYLASHYEKLKGSPEDNEQKQLFVEQHKHYLDEIIEQISEFSKRVILADANLDKVLSAYNKHRDKPIREQAENIIHLFTLTNLGAPAAFKYFDTTIDRKRYTSTKEVLDATLIHQSITGLYETRIDLSQLGGDGGGSSPAPGGTLQLEEEYRLFEPESTQKQEMDIWLKNFPQAWAETGGMGTAHCQAPVLIQLKATATPISIRQYPMPHEAYQGIKPHIRRMLDQGILKPCQSPWNTPLLPVKKPGTEDYRPVQDLREVNKRVEDIHPTVPNPYNLLSTLPPSHPWYTVLDLKDAFFCLRLHSESQLLFAFEWRDPEIGLSGQLTWTRLPQGFKNSPTLFNEALHSDLADFRVRYPALVLLQYVDDLLLAAATRTECLEGTKALLETLGNKGYRASAKKAQICLQEVTYLGYSLKDGQRWLTKARKEAILSIPVPKNSRQVREFLGKAGYCRLFIPGFAELAAPLYPLTRPGTLFQWGTEQQLAFEDIKKALLSSPALGLPDITKPFELFIDENSGFAKGVLVQKLGPWKRPVAYLSKKLDTVASGWPPCLRMVAAIAILVKDAGKLTLGQPLTILTSHPVEALVRQPPNKWLSNARMTHYQAMLLDAERVHFGPTVSLNPATLLPLPSGGNHHDCLQILAETHGTRPDLTDQPLPDADLTWYTDGSSFIRNGEREAGAAVTTESEVIWAAPLPPGTSAQRAELIALTQALKMAEGKKLTVYTDSRYAFATTHVHGEIYRRRGWLTSEGKEIKNKNEILALLEALFLPKRLSIIHCPGHQKGDSPQAKGNRLADDTAKKAATETHSSLTVLPAGKRTADGSEFEKRTADGSEFESPKKKAKVE

SEQ ID NO: 1246 - protein, 2089 aa, synthetic construct
MPAAKRVKLDGGDKKYSIGLDIGTNSVGWAVITDEYKVPSKKFKVLGNTDRHSIKKNLIGALLFDSGETAEATRLKRTARRRYTRRKNRICYLQEIFSNEMAKVDDSFFHRLEESFLVEEDKKHERHPIFGNIVDEVAYHEKYPTIYHLRKKLVDSTDKADLRLIYLALAHMIKFRGHFLIEGDLNPDNSDVDKLFIQLVQTYNQLFEENPINASGVDAKAILSARLSKSRRLENLIAQLPGEKKNGLFGNLIALSLGLTPNFKSNFDLAEDAKLQLSKDTYDDDLDNLLAQIGDQYADLFLAAKNLSDAILLSDILRVNTEITKAPLSASMIKRYDEHHQDLTLLKALVRQQLPEKYKEIFFDQSKNGYAGYIDGGASQEEFYKFIKPILEKMDGTEELLVKLNREDLLRKQRTFDNGSIPHQIHLGELHAILRRQEDFYPFLKDNREKIEKILTFRIPYYVGPLARGNSRFAWMTRKSEETITPWNFEEVVDKGASAQSFIERMTNFDKNLPNEKVLPKHSLLYEYFTVYNELTKVKYVTEGMRKPAFLSGEQKKAIVDLLFKTNRKVTVKQLKEDYFKKIECFDSVEISGVEDRFNASLGTYHDLLKIIKDKDFLDNEENEDILEDIVLTLTLFEDREMIEERLKTYAHLFDDKVMKQLKRRRYTGWGRLSRKLINGIRDKQSGKTILDFLKSDGFANRNFMQLIHDDSLTFKEDIQKAQVSGQGDSLHEHIANLAGSPAIKKGILQTVKVVDELVKVMGRHKPENIVIEMARENQTTQKGQKNSRERMKRIEEGIKELGSQILKEHPVENTQLQNEKLYLYYLQNGRDMYVDQELDINRLSDYDVDHIVPQSFLKDDSIDNKVLTRSDKARGKSDNVPSEEVVKKMKNYWRQLLNAKLITQRKFDNLTKAERGGLSELDKAGFIKRQLVETRQITKHVAQILDSRMNTKYDENDKLIREVKVITLKSKLVSDFRKDFQFYKVREINNYHHAHDAYLNAVVGTALIKKYPKLESEFVYGDYKVYDVRKMIAKSEQEIGKATAKYFFYSNIMNFFKTEITLANGEIRKRPLIETNGETGEIVWDKGRDFATVRKVLSMPQVNIVKKTEVQTGGFSKESILPKRNSDKLIARKKDWDPKKYGGFDSPTVAYSVLVVAKVEKGKSKKLKSVKELLGITIMERSSFEKNPIDFLEAKGYKEVKKDLIIKLPKYSLFELENGRKRMLASAGELQKGNELALPSKYVNFLYLASHYEKLKGSPEDNEQKQLFVEQHKHYLDEIIEQISEFSKRVILADANLDKVLSAYNKHRDKPIREQAENIIHLFTLTNLGAPAAFKYFDTTIDRKRYTSTKEVLDATLIHQSITGLYETRIDLSQLGGDGGPAPAPGGTLQLEEEYRLFEPESTQKQEMDIWLKNFPQAWAETGGMGTAHCQAPVLIQLKATATPISIRQYPMPHEAYQGIKPHIRRMLDQGILKPCQSPWNTPLLPVKKPGTEDYRPVQDLREVNKRVEDIHPTVPNPYNLLSTLPPSHPWYTVLDLKDAFFCLRLHSESQLLFAFEWRDPEIGLSGQLTWTRLPQGFKNSPTLFNEALHSDLADFRVRYPALVLLQYVDDLLLAAATRTECLEGTKALLETLGNKGYRASAKKAQICLQEVTYLGYSLKDGQRWLTKARKEAILSIPVPKNSRQVREFLGKAGYCRLFIPGFAELAAPLYPLTRPGTLFQWGTEQQLAFEDIKKALLSSPALGLPDITKPFELFIDENSGFAKGVLVQKLGPWKRPVAYLSKKLDTVASGWPPCLRMVAAIAILVKDAGKLTLGQPLTILTSHPVEALVRQPPNKWLSNARMTHYQAMLLDAERVHFGPTVSLNPATLLPLPSGGNHHDCLQILAETHGTRPDLTDQPLPDADLTWYTDGSSFIRNGEREAGAAVTTESEVIWAAPLPPGTSAQRAELIALTQALKMAEGKKLTVYTDSRYAFATTHVHGEIYRRRGWLTSEGKEIKNKNEILALLEALFLPKRLSIIHCPGHQKGDSPQAKGNRLADDTAKKAATETHSSLTVLPAGKRTADGSEFEKRTADGSEFESPKKKAKVE

SEQ ID NO: 1247 - protein, 2093 aa, synthetic construct
MPAAKRVKLDGGDKKYSIGLDIGTNSVGWAVITDEYKVPSKKFKVLGNTDRHSIKKNLIGALLFDSGETAEATRLKRTARRRYTRRKNRICYLQEIFSNEMAKVDDSFFHRLEESFLVEEDKKHERHPIFGNIVDEVAYHEKYPTIYHLRKKLVDSTDKADLRLIYLALAHMIKFRGHFLIEGDLNPDNSDVDKLFIQLVQTYNQLFEENPINASGVDAKAILSARLSKSRRLENLIAQLPGEKKNGLFGNLIALSLGLTPNFKSNFDLAEDAKLQLSKDTYDDDLDNLLAQIGDQYADLFLAAKNLSDAILLSDILRVNTEITKAPLSASMIKRYDEHHQDLTLLKALVRQQLPEKYKEIFFDQSKNGYAGYIDGGASQEEFYKFIKPILEKMDGTEELLVKLNREDLLRKQRTFDNGSIPHQIHLGELHAILRRQEDFYPFLKDNREKIEKILTFRIPYYVGPLARGNSRFAWMTRKSEETITPWNFEEVVDKGASAQSFIERMTNFDKNLPNEKVLPKHSLLYEYFTVYNELTKVKYVTEGMRKPAFLSGEQKKAIVDLLFKTNRKVTVKQLKEDYFKKIECFDSVEISGVEDRFNASLGTYHDLLKIIKDKDFLDNEENEDILEDIVLTLTLFEDREMIEERLKTYAHLFDDKVMKQLKRRRYTGWGRLSRKLINGIRDKQSGKTILDFLKSDGFANRNFMQLIHDDSLTFKEDIQKAQVSGQGDSLHEHIANLAGSPAIKKGILQTVKVVDELVKVMGRHKPENIVIEMARENQTTQKGQKNSRERMKRIEEGIKELGSQILKEHPVENTQLQNEKLYLYYLQNGRDMYVDQELDINRLSDYDVDHIVPQSFLKDDSIDNKVLTRSDKARGKSDNVPSEEVVKKMKNYWRQLLNAKLITQRKFDNLTKAERGGLSELDKAGFIKRQLVETRQITKHVAQILDSRMNTKYDENDKLIREVKVITLKSKLVSDFRKDFQFYKVREINNYHHAHDAYLNAVVGTALIKKYPKLESEFVYGDYKVYDVRKMIAKSEQEIGKATAKYFFYSNIMNFFKTEITLANGEIRKRPLIETNGETGEIVWDKGRDFATVRKVLSMPQVNIVKKTEVQTGGFSKESILPKRNSDKLIARKKDWDPKKYGGFDSPTVAYSVLVVAKVEKGKSKKLKSVKELLGITIMERSSFEKNPIDFLEAKGYKEVKKDLIIKLPKYSLFELENGRKRMLASAGELQKGNELALPSKYVNFLYLASHYEKLKGSPEDNEQKQLFVEQHKHYLDEIIEQISEFSKRVILADANLDKVLSAYNKHRDKPIREQAENIIHLFTLTNLGAPAAFKYFDTTIDRKRYTSTKEVLDATLIHQSITGLYETRIDLSQLGGDGGGGGGSSGGSGGTLQLEEEYRLFEPESTQKQEMDIWLKNFPQAWAETGGMGTAHCQAPVLIQLKATATPISIRQYPMPHEAYQGIKPHIRRMLDQGILKPCQSPWNTPLLPVKKPGTEDYRPVQDLREVNKRVEDIHPTVPNPYNLLSTLPPSHPWYTVLDLKDAFFCLRLHSESQLLFAFEWRDPEIGLSGQLTWTRLPQGFKNSPTLFNEALHSDLADFRVRYPALVLLQYVDDLLLAAATRTECLEGTKALLETLGNKGYRASAKKAQICLQEVTYLGYSLKDGQRWLTKARKEAILSIPVPKNSRQVREFLGKAGYCRLFIPGFAELAAPLYPLTRPGTLFQWGTEQQLAFEDIKKALLSSPALGLPDITKPFELFIDENSGFAKGVLVQKLGPWKRPVAYLSKKLDTVASGWPPCLRMVAAIAILVKDAGKLTLGQPLTILTSHPVEALVRQPPNKWLSNARMTHYQAMLLDAERVHFGPTVSLNPATLLPLPSGGNHHDCLQILAETHGTRPDLTDQPLPDADLTWYTDGSSFIRNGEREAGAAVTTESEVIWAAPLPPGTSAQRAELIALTQALKMAEGKKLTVYTDSRYAFATTHVHGEIYRRRGWLTSEGKEIKNKNEILALLEALFLPKRLSIIHCPGHQKGDSPQAKGNRLADDTAKKAATETHSSLTVLPAGKRTADGSEFEKRTADGSEFESPKKKAKVE

SEQ ID NO: 1248 - protein, 2090 aa, synthetic construct
MPAAKRVKLDGGDKKYSIGLDIGTNSVGWAVITDEYKVPSKKFKVLGNTDRHSIKKNLIGALLFDSGETAEATRLKRTARRRYTRRKNRICYLQEIFSNEMAKVDDSFFHRLEESFLVEEDKKHERHPIFGNIVDEVAYHEKYPTIYHLRKKLVDSTDKADLRLIYLALAHMIKFRGHFLIEGDLNPDNSDVDKLFIQLVQTYNQLFEENPINASGVDAKAILSARLSKSRRLENLIAQLPGEKKNGLFGNLIALSLGLTPNFKSNFDLAEDAKLQLSKDTYDDDLDNLLAQIGDQYADLFLAAKNLSDAILLSDILRVNTEITKAPLSASMIKRYDEHHQDLTLLKALVRQQLPEKYKEIFFDQSKNGYAGYIDGGASQEEFYKFIKPILEKMDGTEELLVKLNREDLLRKQRTFDNGSIPHQIHLGELHAILRRQEDFYPFLKDNREKIEKILTFRIPYYVGPLARGNSRFAWMTRKSEETITPWNFEEVVDKGASAQSFIERMTNFDKNLPNEKVLPKHSLLYEYFTVYNELTKVKYVTEGMRKPAFLSGEQKKAIVDLLFKTNRKVTVKQLKEDYFKKIECFDSVEISGVEDRFNASLGTYHDLLKIIKDKDFLDNEENEDILEDIVLTLTLFEDREMIEERLKTYAHLFDDKVMKQLKRRRYTGWGRLSRKLINGIRDKQSGKTILDFLKSDGFANRNFMQLIHDDSLTFKEDIQKAQVSGQGDSLHEHIANLAGSPAIKKGILQTVKVVDELVKVMGRHKPENIVIEMARENQTTQKGQKNSRERMKRIEEGIKELGSQILKEHPVENTQLQNEKLYLYYLQNGRDMYVDQELDINRLSDYDVDHIVPQSFLKDDSIDNKVLTRSDKARGKSDNVPSEEVVKKMKNYWRQLLNAKLITQRKFDNLTKAERGGLSELDKAGFIKRQLVETRQITKHVAQILDSRMNTKYDENDKLIREVKVITLKSKLVSDFRKDFQFYKVREINNYHHAHDAYLNAVVGTALIKKYPKLESEFVYGDYKVYDVRKMIAKSEQEIGKATAKYFFYSNIMNFFKTEITLANGEIRKRPLIETNGETGEIVWDKGRDFATVRKVLSMPQVNIVKKTEVQTGGFSKESILPKRNSDKLIARKKDWDPKKYGGFDSPTVAYSVLVVAKVEKGKSKKLKSVKELLGITIMERSSFEKNPIDFLEAKGYKEVKKDLIIKLPKYSLFELENGRKRMLASAGELQKGNELALPSKYVNFLYLASHYEKLKGSPEDNEQKQLFVEQHKHYLDEIIEQISEFSKRVILADANLDKVLSAYNKHRDKPIREQAENIIHLFTLTNLGAPAAFKYFDTTIDRKRYTSTKEVLDATLIHQSITGLYETRIDLSQLGGDGGPAPGGGGGTLQLEEEYRLFEPESTQKQEMDIWLKNFPQAWAETGGMGTAHCQAPVLIQLKATATPISIRQYPMPHEAYQGIKPHIRRMLDQGILKPCQSPWNTPLLPVKKPGTEDYRPVQDLREVNKRVEDIHPTVPNPYNLLSTLPPSHPWYTVLDLKDAFFCLRLHSESQLLFAFEWRDPEIGLSGQLTWTRLPQGFKNSPTLFNEALHSDLADFRVRYPALVLLQYVDDLLLAAATRTECLEGTKALLETLGNKGYRASAKKAQICLQEVTYLGYSLKDGQRWLTKARKEAILSIPVPKNSRQVREFLGKAGYCRLFIPGFAELAAPLYPLTRPGTLFQWGTEQQLAFEDIKKALLSSPALGLPDITKPFELFIDENSGFAKGVLVQKLGPWKRPVAYLSKKLDTVASGWPPCLRMVAAIAILVKDAGKLTLGQPLTILTSHPVEALVRQPPNKWLSNARMTHYQAMLLDAERVHFGPTVSLNPATLLPLPSGGNHHDCLQILAETHGTRPDLTDQPLPDADLTWYTDGSSFIRNGEREAGAAVTTESEVIWAAPLPPGTSAQRAELIALTQALKMAEGKKLTVYTDSRYAFATTHVHGEIYRRRGWLTSEGKEIKNKNEILALLEALFLPKRLSIIHCPGHQKGDSPQAKGNRLADDTAKKAATETHSSLTVLPAGKRTADGSEFEKRTADGSEFESPKKKAKVE

SEQ ID NO: 1249 - protein, 2090 aa, synthetic construct
MPAAKRVKLDGGDKKYSIGLDIGTNSVGWAVITDEYKVPSKKFKVLGNTDRHSIKKNLIGALLFDSGETAEATRLKRTARRRYTRRKNRICYLQEIFSNEMAKVDDSFFHRLEESFLVEEDKKHERHPIFGNIVDEVAYHEKYPTIYHLRKKLVDSTDKADLRLIYLALAHMIKFRGHFLIEGDLNPDNSDVDKLFIQLVQTYNQLFEENPINASGVDAKAILSARLSKSRRLENLIAQLPGEKKNGLFGNLIALSLGLTPNFKSNFDLAEDAKLQLSKDTYDDDLDNLLAQIGDQYADLFLAAKNLSDAILLSDILRVNTEITKAPLSASMIKRYDEHHQDLTLLKALVRQQLPEKYKEIFFDQSKNGYAGYIDGGASQEEFYKFIKPILEKMDGTEELLVKLNREDLLRKQRTFDNGSIPHQIHLGELHAILRRQEDFYPFLKDNREKIEKILTFRIPYYVGPLARGNSRFAWMTRKSEETITPWNFEEVVDKGASAQSFIERMTNFDKNLPNEKVLPKHSLLYEYFTVYNELTKVKYVTEGMRKPAFLSGEQKKAIVDLLFKTNRKVTVKQLKEDYFKKIECFDSVEISGVEDRFNASLGTYHDLLKIIKDKDFLDNEENEDILEDIVLTLTLFEDREMIEERLKTYAHLFDDKVMKQLKRRRYTGWGRLSRKLINGIRDKQSGKTILDFLKSDGFANRNFMQLIHDDSLTFKEDIQKAQVSGQGDSLHEHIANLAGSPAIKKGILQTVKVVDELVKVMGRHKPENIVIEMARENQTTQKGQKNSRERMKRIEEGIKELGSQILKEHPVENTQLQNEKLYLYYLQNGRDMYVDQELDINRLSDYDVDHIVPQSFLKDDSIDNKVLTRSDKARGKSDNVPSEEVVKKMKNYWRQLLNAKLITQRKFDNLTKAERGGLSELDKAGFIKRQLVETRQITKHVAQILDSRMNTKYDENDKLIREVKVITLKSKLVSDFRKDFQFYKVREINNYHHAHDAYLNAVVGTALIKKYPKLESEFVYGDYKVYDVRKMIAKSEQEIGKATAKYFFYSNIMNFFKTEITLANGEIRKRPLIETNGETGEIVWDKGRDFATVRKVLSMPQVNIVKKTEVQTGGFSKESILPKRNSDKLIARKKDWDPKKYGGFDSPTVAYSVLVVAKVEKGKSKKLKSVKELLGITIMERSSFEKNPIDFLEAKGYKEVKKDLIIKLPKYSLFELENGRKRMLASAGELQKGNELALPSKYVNFLYLASHYEKLKGSPEDNEQKQLFVEQHKHYLDEIIEQISEFSKRVILADANLDKVLSAYNKHRDKPIREQAENIIHLFTLTNLGAPAAFKYFDTTIDRKRYTSTKEVLDATLIHQSITGLYETRIDLSQLGGDGGGSSGGGGGTLQLEEEYRLFEPESTQKQEMDIWLKNFPQAWAETGGMGTAHCQAPVLIQLKATATPISIRQYPMPHEAYQGIKPHIRRMLDQGILKPCQSPWNTPLLPVKKPGTEDYRPVQDLREVNKRVEDIHPTVPNPYNLLSTLPPSHPWYTVLDLKDAFFCLRLHSESQLLFAFEWRDPEIGLSGQLTWTRLPQGFKNSPTLFNEALHSDLADFRVRYPALVLLQYVDDLLLAAATRTECLEGTKALLETLGNKGYRASAKKAQICLQEVTYLGYSLKDGQRWLTKARKEAILSIPVPKNSRQVREFLGKAGYCRLFIPGFAELAAPLYPLTRPGTLFQWGTEQQLAFEDIKKALLSSPALGLPDITKPFELFIDENSGFAKGVLVQKLGPWKRPVAYLSKKLDTVASGWPPCLRMVAAIAILVKDAGKLTLGQPLTILTSHPVEALVRQPPNKWLSNARMTHYQAMLLDAERVHFGPTVSLNPATLLPLPSGGNHHDCLQILAETHGTRPDLTDQPLPDADLTWYTDGSSFIRNGEREAGAAVTTESEVIWAAPLPPGTSAQRAELIALTQALKMAEGKKLTVYTDSRYAFATTHVHGEIYRRRGWLTSEGKEIKNKNEILALLEALFLPKRLSIIHCPGHQKGDSPQAKGNRLADDTAKKAATETHSSLTVLPAGKRTADGSEFEKRTADGSEFESPKKKAKVE

SEQ ID NO: 1250 - protein, 2090 aa, synthetic construct
MPAAKRVKLDGGDKKYSIGLDIGTNSVGWAVITDEYKVPSKKFKVLGNTDRHSIKKNLIGALLFDSGETAEATRLKRTARRRYTRRKNRICYLQEIFSNEMAKVDDSFFHRLEESFLVEEDKKHERHPIFGNIVDEVAYHEKYPTIYHLRKKLVDSTDKADLRLIYLALAHMIKFRGHFLIEGDLNPDNSDVDKLFIQLVQTYNQLFEENPINASGVDAKAILSARLSKSRRLENLIAQLPGEKKNGLFGNLIALSLGLTPNFKSNFDLAEDAKLQLSKDTYDDDLDNLLAQIGDQYADLFLAAKNLSDAILLSDILRVNTEITKAPLSASMIKRYDEHHQDLTLLKALVRQQLPEKYKEIFFDQSKNGYAGYIDGGASQEEFYKFIKPILEKMDGTEELLVKLNREDLLRKQRTFDNGSIPHQIHLGELHAILRRQEDFYPFLKDNREKIEKILTFRIPYYVGPLARGNSRFAWMTRKSEETITPWNFEEVVDKGASAQSFIERMTNFDKNLPNEKVLPKHSLLYEYFTVYNELTKVKYVTEGMRKPAFLSGEQKKAIVDLLFKTNRKVTVKQLKEDYFKKIECFDSVEISGVEDRFNASLGTYHDLLKIIKDKDFLDNEENEDILEDIVLTLTLFEDREMIEERLKTYAHLFDDKVMKQLKRRRYTGWGRLSRKLINGIRDKQSGKTILDFLKSDGFANRNFMQLIHDDSLTFKEDIQKAQVSGQGDSLHEHIANLAGSPAIKKGILQTVKVVDELVKVMGRHKPENIVIEMARENQTTQKGQKNSRERMKRIEEGIKELGSQILKEHPVENTQLQNEKLYLYYLQNGRDMYVDQELDINRLSDYDVDHIVPQSFLKDDSIDNKVLTRSDKARGKSDNVPSEEVVKKMKNYWRQLLNAKLITQRKFDNLTKAERGGLSELDKAGFIKRQLVETRQITKHVAQILDSRMNTKYDENDKLIREVKVITLKSKLVSDFRKDFQFYKVREINNYHHAHDAYLNAVVGTALIKKYPKLESEFVYGDYKVYDVRKMIAKSEQEIGKATAKYFFYSNIMNFFKTEITLANGEIRKRPLIETNGETGEIVWDKGRDFATVRKVLSMPQVNIVKKTEVQTGGFSKESILPKRNSDKLIARKKDWDPKKYGGFDSPTVAYSVLVVAKVEKGKSKKLKSVKELLGITIMERSSFEKNPIDFLEAKGYKEVKKDLIIKLPKYSLFELENGRKRMLASAGELQKGNELALPSKYVNFLYLASHYEKLKGSPEDNEQKQLFVEQHKHYLDEIIEQISEFSKRVILADANLDKVLSAYNKHRDKPIREQAENIIHLFTLTNLGAPAAFKYFDTTIDRKRYTSTKEVLDATLIHQSITGLYETRIDLSQLGGDGGGSSGSSGGTLQLEEEYRLFEPESTQKQEMDIWLKNFPQAWAETGGMGTAHCQAPVLIQLKATATPISIRQYPMPHEAYQGIKPHIRRMLDQGILKPCQSPWNTPLLPVKKPGTEDYRPVQDLREVNKRVEDIHPTVPNPYNLLSTLPPSHPWYTVLDLKDAFFCLRLHSESQLLFAFEWRDPEIGLSGQLTWTRLPQGFKNSPTLFNEALHSDLADFRVRYPALVLLQYVDDLLLAAATRTECLEGTKALLETLGNKGYRASAKKAQICLQEVTYLGYSLKDGQRWLTKARKEAILSIPVPKNSRQVREFLGKAGYCRLFIPGFAELAAPLYPLTRPGTLFQWGTEQQLAFEDIKKALLSSPALGLPDITKPFELFIDENSGFAKGVLVQKLGPWKRPVAYLSKKLDTVASGWPPCLRMVAAIAILVKDAGKLTLGQPLTILTSHPVEALVRQPPNKWLSNARMTHYQAMLLDAERVHFGPTVSLNPATLLPLPSGGNHHDCLQILAETHGTRPDLTDQPLPDADLTWYTDGSSFIRNGEREAGAAVTTESEVIWAAPLPPGTSAQRAELIALTQALKMAEGKKLTVYTDSRYAFATTHVHGEIYRRRGWLTSEGKEIKNKNEILALLEALFLPKRLSIIHCPGHQKGDSPQAKGNRLADDTAKKAATETHSSLTVLPAGKRTADGSEFEKRTADGSEFESPKKKAKVE

SEQ ID NO: 1251 - protein, 2088 aa, synthetic construct
MPAAKRVKLDGGDKKYSIGLDIGTNSVGWAVITDEYKVPSKKFKVLGNTDRHSIKKNLIGALLFDSGETAEATRLKRTARRRYTRRKNRICYLQEIFSNEMAKVDDSFFHRLEESFLVEEDKKHERHPIFGNIVDEVAYHEKYPTIYHLRKKLVDSTDKADLRLIYLALAHMIKFRGHFLIEGDLNPDNSDVDKLFIQLVQTYNQLFEENPINASGVDAKAILSARLSKSRRLENLIAQLPGEKKNGLFGNLIALSLGLTPNFKSNFDLAEDAKLQLSKDTYDDDLDNLLAQIGDQYADLFLAAKNLSDAILLSDILRVNTEITKAPLSASMIKRYDEHHQDLTLLKALVRQQLPEKYKEIFFDQSKNGYAGYIDGGASQEEFYKFIKPILEKMDGTEELLVKLNREDLLRKQRTFDNGSIPHQIHLGELHAILRRQEDFYPFLKDNREKIEKILTFRIPYYVGPLARGNSRFAWMTRKSEETITPWNFEEVVDKGASAQSFIERMTNFDKNLPNEKVLPKHSLLYEYFTVYNELTKVKYVTEGMRKPAFLSGEQKKAIVDLLFKTNRKVTVKQLKEDYFKKIECFDSVEISGVEDRFNASLGTYHDLLKIIKDKDFLDNEENEDILEDIVLTLTLFEDREMIEERLKTYAHLFDDKVMKQLKRRRYTGWGRLSRKLINGIRDKQSGKTILDFLKSDGFANRNFMQLIHDDSLTFKEDIQKAQVSGQGDSLHEHIANLAGSPAIKKGILQTVKVVDELVKVMGRHKPENIVIEMARENQTTQKGQKNSRERMKRIEEGIKELGSQILKEHPVENTQLQNEKLYLYYLQNGRDMYVDQELDINRLSDYDVDHIVPQSFLKDDSIDNKVLTRSDKARGKSDNVPSEEVVKKMKNYWRQLLNAKLITQRKFDNLTKAERGGLSELDKAGFIKRQLVETRQITKHVAQILDSRMNTKYDENDKLIREVKVITLKSKLVSDFRKDFQFYKVREINNYHHAHDAYLNAVVGTALIKKYPKLESEFVYGDYKVYDVRKMIAKSEQEIGKATAKYFFYSNIMNFFKTEITLANGEIRKRPLIETNGETGEIVWDKGRDFATVRKVLSMPQVNIVKKTEVQTGGFSKESILPKRNSDKLIARKKDWDPKKYGGFDSPTVAYSVLVVAKVEKGKSKKLKSVKELLGITIMERSSFEKNPIDFLEAKGYKEVKKDLIIKLPKYSLFELENGRKRMLASAGELQKGNELALPSKYVNFLYLASHYEKLKGSPEDNEQKQLFVEQHKHYLDEIIEQISEFSKRVILADANLDKVLSAYNKHRDKPIREQAENIIHLFTLTNLGAPAAFKYFDTTIDRKRYTSTKEVLDATLIHQSITGLYETRIDLSQLGGDGGGGGGGGTLQLEEEYRLFEPESTQKQEMDIWLKNFPQAWAETGGMGTAHCQAPVLIQLKATATPISIRQYPMPHEAYQGIKPHIRRMLDQGILKPCQSPWNTPLLPVKKPGTEDYRPVQDLREVNKRVEDIHPTVPNPYNLLSTLPPSHPWYTVLDLKDAFFCLRLHSESQLLFAFEWRDPEIGLSGQLTWTRLPQGFKNSPTLFNEALHSDLADFRVRYPALVLLQYVDDLLLAAATRTECLEGTKALLETLGNKGYRASAKKAQICLQEVTYLGYSLKDGQRWLTKARKEAILSIPVPKNSRQVREFLGKAGYCRLFIPGFAELAAPLYPLTRPGTLFQWGTEQQLAFEDIKKALLSSPALGLPDITKPFELFIDENSGFAKGVLVQKLGPWKRPVAYLSKKLDTVASGWPPCLRMVAAIAILVKDAGKLTLGQPLTILTSHPVEALVRQPPNKWLSNARMTHYQAMLLDAERVHFGPTVSLNPATLLPLPSGGNHHDCLQILAETHGTRPDLTDQPLPDADLTWYTDGSSFIRNGEREAGAAVTTESEVIWAAPLPPGTSAQRAELIALTQALKMAEGKKLTVYTDSRYAFATTHVHGEIYRRRGWLTSEGKEIKNKNEILALLEALFLPKRLSIIHCPGHQKGDSPQAKGNRLADDTAKKAATETHSSLTVLPAGKRTADGSEFEKRTADGSEFESPKKKAKVE

SEQ ID NO: 1252 - protein, 2090 aa, synthetic construct
MPAAKRVKLDGGDKKYSIGLDIGTNSVGWAVITDEYKVPSKKFKVLGNTDRHSIKKNLIGALLFDSGETAEATRLKRTARRRYTRRKNRICYLQEIFSNEMAKVDDSFFHRLEESFLVEEDKKHERHPIFGNIVDEVAYHEKYPTIYHLRKKLVDSTDKADLRLIYLALAHMIKFRGHFLIEGDLNPDNSDVDKLFIQLVQTYNQLFEENPINASGVDAKAILSARLSKSRRLENLIAQLPGEKKNGLFGNLIALSLGLTPNFKSNFDLAEDAKLQLSKDTYDDDLDNLLAQIGDQYADLFLAAKNLSDAILLSDILRVNTEITKAPLSASMIKRYDEHHQDLTLLKALVRQQLPEKYKEIFFDQSKNGYAGYIDGGASQEEFYKFIKPILEKMDGTEELLVKLNREDLLRKQRTFDNGSIPHQIHLGELHAILRRQEDFYPFLKDNREKIEKILTFRIPYYVGPLARGNSRFAWMTRKSEETITPWNFEEVVDKGASAQSFIERMTNFDKNLPNEKVLPKHSLLYEYFTVYNELTKVKYVTEGMRKPAFLSGEQKKAIVDLLFKTNRKVTVKQLKEDYFKKIECFDSVEISGVEDRFNASLGTYHDLLKIIKDKDFLDNEENEDILEDIVLTLTLFEDREMIEERLKTYAHLFDDKVMKQLKRRRYTGWGRLSRKLINGIRDKQSGKTILDFLKSDGFANRNFMQLIHDDSLTFKEDIQKAQVSGQGDSLHEHIANLAGSPAIKKGILQTVKVVDELVKVMGRHKPENIVIEMARENQTTQKGQKNSRERMKRIEEGIKELGSQILKEHPVENTQLQNEKLYLYYLQNGRDMYVDQELDINRLSDYDVDHIVPQSFLKDDSIDNKVLTRSDKARGKSDNVPSEEVVKKMKNYWRQLLNAKLITQRKFDNLTKAERGGLSELDKAGFIKRQLVETRQITKHVAQILDSRMNTKYDENDKLIREVKVITLKSKLVSDFRKDFQFYKVREINNYHHAHDAYLNAVVGTALIKKYPKLESEFVYGDYKVYDVRKMIAKSEQEIGKATAKYFFYSNIMNFFKTEITLANGEIRKRPLIETNGETGEIVWDKGRDFATVRKVLSMPQVNIVKKTEVQTGGFSKESILPKRNSDKLIARKKDWDPKKYGGFDSPTVAYSVLVVAKVEKGKSKKLKSVKELLGITIMERSSFEKNPIDFLEAKGYKEVKKDLIIKLPKYSLFELENGRKRMLASAGELQKGNELALPSKYVNFLYLASHYEKLKGSPEDNEQKQLFVEQHKHYLDEIIEQISEFSKRVILADANLDKVLSAYNKHRDKPIREQAENIIHLFTLTNLGAPAAFKYFDTTIDRKRYTSTKEVLDATLIHQSITGLYETRIDLSQLGGDGGPAPGSSGGTLQLEEEYRLFEPESTQKQEMDIWLKNFPQAWAETGGMGTAHCQAPVLIQLKATATPISIRQYPMPHEAYQGIKPHIRRMLDQGILKPCQSPWNTPLLPVKKPGTEDYRPVQDLREVNKRVEDIHPTVPNPYNLLSTLPPSHPWYTVLDLKDAFFCLRLHSESQLLFAFEWRDPEIGLSGQLTWTRLPQGFKNSPTLFNEALHSDLADFRVRYPALVLLQYVDDLLLAAATRTECLEGTKALLETLGNKGYRASAKKAQICLQEVTYLGYSLKDGQRWLTKARKEAILSIPVPKNSRQVREFLGKAGYCRLFIPGFAELAAPLYPLTRPGTLFQWGTEQQLAFEDIKKALLSSPALGLPDITKPFELFIDENSGFAKGVLVQKLGPWKRPVAYLSKKLDTVASGWPPCLRMVAAIAILVKDAGKLTLGQPLTILTSHPVEALVRQPPNKWLSNARMTHYQAMLLDAERVHFGPTVSLNPATLLPLPSGGNHHDCLQILAETHGTRPDLTDQPLPDADLTWYTDGSSFIRNGEREAGAAVTTESEVIWAAPLPPGTSAQRAELIALTQALKMAEGKKLTVYTDSRYAFATTHVHGEIYRRRGWLTSEGKEIKNKNEILALLEALFLPKRLSIIHCPGHQKGDSPQAKGNRLADDTAKKAATETHSSLTVLPAGKRTADGSEFEKRTADGSEFESPKKKAKVE

SEQ ID NO: 1253 - protein, 2095 aa, synthetic construct
MPAAKRVKLDGGDKKYSIGLDIGTNSVGWAVITDEYKVPSKKFKVLGNTDRHSIKKNLIGALLFDSGETAEATRLKRTARRRYTRRKNRICYLQEIFSNEMAKVDDSFFHRLEESFLVEEDKKHERHPIFGNIVDEVAYHEKYPTIYHLRKKLVDSTDKADLRLIYLALAHMIKFRGHFLIEGDLNPDNSDVDKLFIQLVQTYNQLFEENPINASGVDAKAILSARLSKSRRLENLIAQLPGEKKNGLFGNLIALSLGLTPNFKSNFDLAEDAKLQLSKDTYDDDLDNLLAQIGDQYADLFLAAKNLSDAILLSDILRVNTEITKAPLSASMIKRYDEHHQDLTLLKALVRQQLPEKYKEIFFDQSKNGYAGYIDGGASQEEFYKFIKPILEKMDGTEELLVKLNREDLLRKQRTFDNGSIPHQIHLGELHAILRRQEDFYPFLKDNREKIEKILTFRIPYYVGPLARGNSRFAWMTRKSEETITPWNFEEVVDKGASAQSFIERMTNFDKNLPNEKVLPKHSLLYEYFTVYNELTKVKYVTEGMRKPAFLSGEQKKAIVDLLFKTNRKVTVKQLKEDYFKKIECFDSVEISGVEDRFNASLGTYHDLLKIIKDKDFLDNEENEDILEDIVLTLTLFEDREMIEERLKTYAHLFDDKVMKQLKRRRYTGWGRLSRKLINGIRDKQSGKTILDFLKSDGFANRNFMQLIHDDSLTFKEDIQKAQVSGQGDSLHEHIANLAGSPAIKKGILQTVKVVDELVKVMGRHKPENIVIEMARENQTTQKGQKNSRERMKRIEEGIKELGSQILKEHPVENTQLQNEKLYLYYLQNGRDMYVDQELDINRLSDYDVDHIVPQSFLKDDSIDNKVLTRSDKARGKSDNVPSEEVVKKMKNYWRQLLNAKLITQRKFDNLTKAERGGLSELDKAGFIKRQLVETRQITKHVAQILDSRMNTKYDENDKLIREVKVITLKSKLVSDFRKDFQFYKVREINNYHHAHDAYLNAVVGTALIKKYPKLESEFVYGDYKVYDVRKMIAKSEQEIGKATAKYFFYSNIMNFFKTEITLANGEIRKRPLIETNGETGEIVWDKGRDFATVRKVLSMPQVNIVKKTEVQTGGFSKESILPKRNSDKLIARKKDWDPKKYGGFDSPTVAYSVLVVAKVEKGKSKKLKSVKELLGITIMERSSFEKNPIDFLEAKGYKEVKKDLIIKLPKYSLFELENGRKRMLASAGELQKGNELALPSKYVNFLYLASHYEKLKGSPEDNEQKQLFVEQHKHYLDEIIEQISEFSKRVILADANLDKVLSAYNKHRDKPIREQAENIIHLFTLTNLGAPAAFKYFDTTIDRKRYTSTKEVLDATLIHQSITGLYETRIDLSQLGGDGGEAAAKGGGPAPGGTLQLEEEYRLFEPESTQKQEMDIWLKNFPQAWAETGGMGTAHCQAPVLIQLKATATPISIRQYPMPHEAYQGIKPHIRRMLDQGILKPCQSPWNTPLLPVKKPGTEDYRPVQDLREVNKRVEDIHPTVPNPYNLLSTLPPSHPWYTVLDLKDAFFCLRLHSESQLLFAFEWRDPEIGLSGQLTWTRLPQGFKNSPTLFNEALHSDLADFRVRYPALVLLQYVDDLLLAAATRTECLEGTKALLETLGNKGYRASAKKAQICLQEVTYLGYSLKDGQRWLTKARKEAILSIPVPKNSRQVREFLGKAGYCRLFIPGFAELAAPLYPLTRPGTLFQWGTEQQLAFEDIKKALLSSPALGLPDITKPFELFIDENSGFAKGVLVQKLGPWKRPVAYLSKKLDTVASGWPPCLRMVAAIAILVKDAGKLTLGQPLTILTSHPVEALVRQPPNKWLSNARMTHYQAMLLDAERVHFGPTVSLNPATLLPLPSGGNHHDCLQILAETHGTRPDLTDQPLPDADLTWYTDGSSFIRNGEREAGAAVTTESEVIWAAPLPPGTSAQRAELIALTQALKMAEGKKLTVYTDSRYAFATTHVHGEIYRRRGWLTSEGKEIKNKNEILALLEALFLPKRLSIIHCPGHQKGDSPQAKGNRLADDTAKKAATETHSSLTVLPAGKRTADGSEFEKRTADGSEFESPKKKAKVE

SEQ ID NO: 1254 - protein, 2095 aa, synthetic construct
MPAAKRVKLDGGDKKYSIGLDIGTNSVGWAVITDEYKVPSKKFKVLGNTDRHSIKKNLIGALLFDSGETAEATRLKRTARRRYTRRKNRICYLQEIFSNEMAKVDDSFFHRLEESFLVEEDKKHERHPIFGNIVDEVAYHEKYPTIYHLRKKLVDSTDKADLRLIYLALAHMIKFRGHFLIEGDLNPDNSDVDKLFIQLVQTYNQLFEENPINASGVDAKAILSARLSKSRRLENLIAQLPGEKKNGLFGNLIALSLGLTPNFKSNFDLAEDAKLQLSKDTYDDDLDNLLAQIGDQYADLFLAAKNLSDAILLSDILRVNTEITKAPLSASMIKRYDEHHQDLTLLKALVRQQLPEKYKEIFFDQSKNGYAGYIDGGASQEEFYKFIKPILEKMDGTEELLVKLNREDLLRKQRTFDNGSIPHQIHLGELHAILRRQEDFYPFLKDNREKIEKILTFRIPYYVGPLARGNSRFAWMTRKSEETITPWNFEEVVDKGASAQSFIERMTNFDKNLPNEKVLPKHSLLYEYFTVYNELTKVKYVTEGMRKPAFLSGEQKKAIVDLLFKTNRKVTVKQLKEDYFKKIECFDSVEISGVEDRFNASLGTYHDLLKIIKDKDFLDNEENEDILEDIVLTLTLFEDREMIEERLKTYAHLFDDKVMKQLKRRRYTGWGRLSRKLINGIRDKQSGKTILDFLKSDGFANRNFMQLIHDDSLTFKEDIQKAQVSGQGDSLHEHIANLAGSPAIKKGILQTVKVVDELVKVMGRHKPENIVIEMARENQTTQKGQKNSRERMKRIEEGIKELGSQILKEHPVENTQLQNEKLYLYYLQNGRDMYVDQELDINRLSDYDVDHIVPQSFLKDDSIDNKVLTRSDKARGKSDNVPSEEVVKKMKNYWRQLLNAKLITQRKFDNLTKAERGGLSELDKAGFIKRQLVETRQITKHVAQILDSRMNTKYDENDKLIREVKVITLKSKLVSDFRKDFQFYKVREINNYHHAHDAYLNAVVGTALIKKYPKLESEFVYGDYKVYDVRKMIAKSEQEIGKATAKYFFYSNIMNFFKTEITLANGEIRKRPLIETNGETGEIVWDKGRDFATVRKVLSMPQVNIVKKTEVQTGGFSKESILPKRNSDKLIARKKDWDPKKYGGFDSPTVAYSVLVVAKVEKGKSKKLKSVKELLGITIMERSSFEKNPIDFLEAKGYKEVKKDLIIKLPKYSLFELENGRKRMLASAGELQKGNELALPSKYVNFLYLASHYEKLKGSPEDNEQKQLFVEQHKHYLDEIIEQISEFSKRVILADANLDKVLSAYNKHRDKPIREQAENIIHLFTLTNLGAPAAFKYFDTTIDRKRYTSTKEVLDATLIHQSITGLYETRIDLSQLGGDGGEAAAKPAPGGSGGTLQLEEEYRLFEPESTQKQEMDIWLKNFPQAWAETGGMGTAHCQAPVLIQLKATATPISIRQYPMPHEAYQGIKPHIRRMLDQGILKPCQSPWNTPLLPVKKPGTEDYRPVQDLREVNKRVEDIHPTVPNPYNLLSTLPPSHPWYTVLDLKDAFFCLRLHSESQLLFAFEWRDPEIGLSGQLTWTRLPQGFKNSPTLFNEALHSDLADFRVRYPALVLLQYVDDLLLAAATRTECLEGTKALLETLGNKGYRASAKKAQICLQEVTYLGYSLKDGQRWLTKARKEAILSIPVPKNSRQVREFLGKAGYCRLFIPGFAELAAPLYPLTRPGTLFQWGTEQQLAFEDIKKALLSSPALGLPDITKPFELFIDENSGFAKGVLVQKLGPWKRPVAYLSKKLDTVASGWPPCLRMVAAIAILVKDAGKLTLGQPLTILTSHPVEALVRQPPNKWLSNARMTHYQAMLLDAERVHFGPTVSLNPATLLPLPSGGNHHDCLQILAETHGTRPDLTDQPLPDADLTWYTDGSSFIRNGEREAGAAVTTESEVIWAAPLPPGTSAQRAELIALTQALKMAEGKKLTVYTDSRYAFATTHVHGEIYRRRGWLTSEGKEIKNKNEILALLEALFLPKRLSIIHCPGHQKGDSPQAKGNRLADDTAKKAATETHSSLTVLPAGKRTADGSEFEKRTADGSEFESPKKKAKVE

SEQ ID NO: 1255 - protein, 2093 aa, synthetic construct
MPAAKRVKLDGGDKKYSIGLDIGTNSVGWAVITDEYKVPSKKFKVLGNTDRHSIKKNLIGALLFDSGETAEATRLKRTARRRYTRRKNRICYLQEIFSNEMAKVDDSFFHRLEESFLVEEDKKHERHPIFGNIVDEVAYHEKYPTIYHLRKKLVDSTDKADLRLIYLALAHMIKFRGHFLIEGDLNPDNSDVDKLFIQLVQTYNQLFEENPINASGVDAKAILSARLSKSRRLENLIAQLPGEKKNGLFGNLIALSLGLTPNFKSNFDLAEDAKLQLSKDTYDDDLDNLLAQIGDQYADLFLAAKNLSDAILLSDILRVNTEITKAPLSASMIKRYDEHHQDLTLLKALVRQQLPEKYKEIFFDQSKNGYAGYIDGGASQEEFYKFIKPILEKMDGTEELLVKLNREDLLRKQRTFDNGSIPHQIHLGELHAILRRQEDFYPFLKDNREKIEKILTFRIPYYVGPLARGNSRFAWMTRKSEETITPWNFEEVVDKGASAQSFIERMTNFDKNLPNEKVLPKHSLLYEYFTVYNELTKVKYVTEGMRKPAFLSGEQKKAIVDLLFKTNRKVTVKQLKEDYFKKIECFDSVEISGVEDRFNASLGTYHDLLKIIKDKDFLDNEENEDILEDIVLTLTLFEDREMIEERLKTYAHLFDDKVMKQLKRRRYTGWGRLSRKLINGIRDKQSGKTILDFLKSDGFANRNFMQLIHDDSLTFKEDIQKAQVSGQGDSLHEHIANLAGSPAIKKGILQTVKVVDELVKVMGRHKPENIVIEMARENQTTQKGQKNSRERMKRIEEGIKELGSQILKEHPVENTQLQNEKLYLYYLQNGRDMYVDQELDINRLSDYDVDHIVPQSFLKDDSIDNKVLTRSDKARGKSDNVPSEEVVKKMKNYWRQLLNAKLITQRKFDNLTKAERGGLSELDKAGFIKRQLVETRQITKHVAQILDSRMNTKYDENDKLIREVKVITLKSKLVSDFRKDFQFYKVREINNYHHAHDAYLNAVVGTALIKKYPKLESEFVYGDYKVYDVRKMIAKSEQEIGKATAKYFFYSNIMNFFKTEITLANGEIRKRPLIETNGETGEIVWDKGRDFATVRKVLSMPQVNIVKKTEVQTGGFSKESILPKRNSDKLIARKKDWDPKKYGGFDSPTVAYSVLVVAKVEKGKSKKLKSVKELLGITIMERSSFEKNPIDFLEAKGYKEVKKDLIIKLPKYSLFELENGRKRMLASAGELQKGNELALPSKYVNFLYLASHYEKLKGSPEDNEQKQLFVEQHKHYLDEIIEQISEFSKRVILADANLDKVLSAYNKHRDKPIREQAENIIHLFTLTNLGAPAAFKYFDTTIDRKRYTSTKEVLDATLIHQSITGLYETRIDLSQLGGDGGGSSGSSGSSGGTLQLEEEYRLFEPESTQKQEMDIWLKNFPQAWAETGGMGTAHCQAPVLIQLKATATPISIRQYPMPHEAYQGIKPHIRRMLDQGILKPCQSPWNTPLLPVKKPGTEDYRPVQDLREVNKRVEDIHPTVPNPYNLLSTLPPSHPWYTVLDLKDAFFCLRLHSESQLLFAFEWRDPEIGLSGQLTWTRLPQGFKNSPTLFNEALHSDLADFRVRYPALVLLQYVDDLLLAAATRTECLEGTKALLETLGNKGYRASAKKAQICLQEVTYLGYSLKDGQRWLTKARKEAILSIPVPKNSRQVREFLGKAGYCRLFIPGFAELAAPLYPLTRPGTLFQWGTEQQLAFEDIKKALLSSPALGLPDITKPFELFIDENSGFAKGVLVQKLGPWKRPVAYLSKKLDTVASGWPPCLRMVAAIAILVKDAGKLTLGQPLTILTSHPVEALVRQPPNKWLSNARMTHYQAMLLDAERVHFGPTVSLNPATLLPLPSGGNHHDCLQILAETHGTRPDLTDQPLPDADLTWYTDGSSFIRNGEREAGAAVTTESEVIWAAPLPPGTSAQRAELIALTQALKMAEGKKLTVYTDSRYAFATTHVHGEIYRRRGWLTSEGKEIKNKNEILALLEALFLPKRLSIIHCPGHQKGDSPQAKGNRLADDTAKKAATETHSSLTVLPAGKRTADGSEFEKRTADGSEFESPKKKAKVE

SEQ ID NO: 1256 - protein, 2093 aa, synthetic construct
MPAAKRVKLDGGDKKYSIGLDIGTNSVGWAVITDEYKVPSKKFKVLGNTDRHSIKKNLIGALLFDSGETAEATRLKRTARRRYTRRKNRICYLQEIFSNEMAKVDDSFFHRLEESFLVEEDKKHERHPIFGNIVDEVAYHEKYPTIYHLRKKLVDSTDKADLRLIYLALAHMIKFRGHFLIEGDLNPDNSDVDKLFIQLVQTYNQLFEENPINASGVDAKAILSARLSKSRRLENLIAQLPGEKKNGLFGNLIALSLGLTPNFKSNFDLAEDAKLQLSKDTYDDDLDNLLAQIGDQYADLFLAAKNLSDAILLSDILRVNTEITKAPLSASMIKRYDEHHQDLTLLKALVRQQLPEKYKEIFFDQSKNGYAGYIDGGASQEEFYKFIKPILEKMDGTEELLVKLNREDLLRKQRTFDNGSIPHQIHLGELHAILRRQEDFYPFLKDNREKIEKILTFRIPYYVGPLARGNSRFAWMTRKSEETITPWNFEEVVDKGASAQSFIERMTNFDKNLPNEKVLPKHSLLYEYFTVYNELTKVKYVTEGMRKPAFLSGEQKKAIVDLLFKTNRKVTVKQLKEDYFKKIECFDSVEISGVEDRFNASLGTYHDLLKIIKDKDFLDNEENEDILEDIVLTLTLFEDREMIEERLKTYAHLFDDKVMKQLKRRRYTGWGRLSRKLINGIRDKQSGKTILDFLKSDGFANRNFMQLIHDDSLTFKEDIQKAQVSGQGDSLHEHIANLAGSPAIKKGILQTVKVVDELVKVMGRHKPENIVIEMARENQTTQKGQKNSRERMKRIEEGIKELGSQILKEHPVENTQLQNEKLYLYYLQNGRDMYVDQELDINRLSDYDVDHIVPQSFLKDDSIDNKVLTRSDKARGKSDNVPSEEVVKKMKNYWRQLLNAKLITQRKFDNLTKAERGGLSELDKAGFIKRQLVETRQITKHVAQILDSRMNTKYDENDKLIREVKVITLKSKLVSDFRKDFQFYKVREINNYHHAHDAYLNAVVGTALIKKYPKLESEFVYGDYKVYDVRKMIAKSEQEIGKATAKYFFYSNIMNFFKTEITLANGEIRKRPLIETNGETGEIVWDKGRDFATVRKVLSMPQVNIVKKTEVQTGGFSKESILPKRNSDKLIARKKDWDPKKYGGFDSPTVAYSVLVVAKVEKGKSKKLKSVKELLGITIMERSSFEKNPIDFLEAKGYKEVKKDLIIKLPKYSLFELENGRKRMLASAGELQKGNELALPSKYVNFLYLASHYEKLKGSPEDNEQKQLFVEQHKHYLDEIIEQISEFSKRVILADANLDKVLSAYNKHRDKPIREQAENIIHLFTLTNLGAPAAFKYFDTTIDRKRYTSTKEVLDATLIHQSITGLYETRIDLSQLGGDGGPAPGGSGGGGGTLQLEEEYRLFEPESTQKQEMDIWLKNFPQAWAETGGMGTAHCQAPVLIQLKATATPISIRQYPMPHEAYQGIKPHIRRMLDQGILKPCQSPWNTPLLPVKKPGTEDYRPVQDLREVNKRVEDIHPTVPNPYNLLSTLPPSHPWYTVLDLKDAFFCLRLHSESQLLFAFEWRDPEIGLSGQLTWTRLPQGFKNSPTLFNEALHSDLADFRVRYPALVLLQYVDDLLLAAATRTECLEGTKALLETLGNKGYRASAKKAQICLQEVTYLGYSLKDGQRWLTKARKEAILSIPVPKNSRQVREFLGKAGYCRLFIPGFAELAAPLYPLTRPGTLFQWGTEQQLAFEDIKKALLSSPALGLPDITKPFELFIDENSGFAKGVLVQKLGPWKRPVAYLSKKLDTVASGWPPCLRMVAAIAILVKDAGKLTLGQPLTILTSHPVEALVRQPPNKWLSNARMTHYQAMLLDAERVHFGPTVSLNPATLLPLPSGGNHHDCLQILAETHGTRPDLTDQPLPDADLTWYTDGSSFIRNGEREAGAAVTTESEVIWAAPLPPGTSAQRAELIALTQALKMAEGKKLTVYTDSRYAFATTHVHGEIYRRRGWLTSEGKEIKNKNEILALLEALFLPKRLSIIHCPGHQKGDSPQAKGNRLADDTAKKAATETHSSLTVLPAGKRTADGSEFEKRTADGSEFESPKKKAKVE

SEQ ID NO: 1257 - protein, 2093 aa, synthetic construct
MPAAKRVKLDGGDKKYSIGLDIGTNSVGWAVITDEYKVPSKKFKVLGNTDRHSIKKNLIGALLFDSGETAEATRLKRTARRRYTRRKNRICYLQEIFSNEMAKVDDSFFHRLEESFLVEEDKKHERHPIFGNIVDEVAYHEKYPTIYHLRKKLVDSTDKADLRLIYLALAHMIKFRGHFLIEGDLNPDNSDVDKLFIQLVQTYNQLFEENPINASGVDAKAILSARLSKSRRLENLIAQLPGEKKNGLFGNLIALSLGLTPNFKSNFDLAEDAKLQLSKDTYDDDLDNLLAQIGDQYADLFLAAKNLSDAILLSDILRVNTEITKAPLSASMIKRYDEHHQDLTLLKALVRQQLPEKYKEIFFDQSKNGYAGYIDGGASQEEFYKFIKPILEKMDGTEELLVKLNREDLLRKQRTFDNGSIPHQIHLGELHAILRRQEDFYPFLKDNREKIEKILTFRIPYYVGPLARGNSRFAWMTRKSEETITPWNFEEVVDKGASAQSFIERMTNFDKNLPNEKVLPKHSLLYEYFTVYNELTKVKYVTEGMRKPAFLSGEQKKAIVDLLFKTNRKVTVKQLKEDYFKKIECFDSVEISGVEDRFNASLGTYHDLLKIIKDKDFLDNEENEDILEDIVLTLTLFEDREMIEERLKTYAHLFDDKVMKQLKRRRYTGWGRLSRKLINGIRDKQSGKTILDFLKSDGFANRNFMQLIHDDSLTFKEDIQKAQVSGQGDSLHEHIANLAGSPAIKKGILQTVKVVDELVKVMGRHKPENIVIEMARENQTTQKGQKNSRERMKRIEEGIKELGSQILKEHPVENTQLQNEKLYLYYLQNGRDMYVDQELDINRLSDYDVDHIVPQSFLKDDSIDNKVLTRSDKARGKSDNVPSEEVVKKMKNYWRQLLNAKLITQRKFDNLTKAERGGLSELDKAGFIKRQLVETRQITKHVAQILDSRMNTKYDENDKLIREVKVITLKSKLVSDFRKDFQFYKVREINNYHHAHDAYLNAVVGTALIKKYPKLESEFVYGDYKVYDVRKMIAKSEQEIGKATAKYFFYSNIMNFFKTEITLANGEIRKRPLIETNGETGEIVWDKGRDFATVRKVLSMPQVNIVKKTEVQTGGFSKESILPKRNSDKLIARKKDWDPKKYGGFDSPTVAYSVLVVAKVEKGKSKKLKSVKELLGITIMERSSFEKNPIDFLEAKGYKEVKKDLIIKLPKYSLFELENGRKRMLASAGELQKGNELALPSKYVNFLYLASHYEKLKGSPEDNEQKQLFVEQHKHYLDEIIEQISEFSKRVILADANLDKVLSAYNKHRDKPIREQAENIIHLFTLTNLGAPAAFKYFDTTIDRKRYTSTKEVLDATLIHQSITGLYETRIDLSQLGGDGGGGSPAPGGGGGTLQLEEEYRLFEPESTQKQEMDIWLKNFPQAWAETGGMGTAHCQAPVLIQLKATATPISIRQYPMPHEAYQGIKPHIRRMLDQGILKPCQSPWNTPLLPVKKPGTEDYRPVQDLREVNKRVEDIHPTVPNPYNLLSTLPPSHPWYTVLDLKDAFFCLRLHSESQLLFAFEWRDPEIGLSGQLTWTRLPQGFKNSPTLFNEALHSDLADFRVRYPALVLLQYVDDLLLAAATRTECLEGTKALLETLGNKGYRASAKKAQICLQEVTYLGYSLKDGQRWLTKARKEAILSIPVPKNSRQVREFLGKAGYCRLFIPGFAELAAPLYPLTRPGTLFQWGTEQQLAFEDIKKALLSSPALGLPDITKPFELFIDENSGFAKGVLVQKLGPWKRPVAYLSKKLDTVASGWPPCLRMVAAIAILVKDAGKLTLGQPLTILTSHPVEALVRQPPNKWLSNARMTHYQAMLLDAERVHFGPTVSLNPATLLPLPSGGNHHDCLQILAETHGTRPDLTDQPLPDADLTWYTDGSSFIRNGEREAGAAVTTESEVIWAAPLPPGTSAQRAELIALTQALKMAEGKKLTVYTDSRYAFATTHVHGEIYRRRGWLTSEGKEIKNKNEILALLEALFLPKRLSIIHCPGHQKGDSPQAKGNRLADDTAKKAATETHSSLTVLPAGKRTADGSEFEKRTADGSEFESPKKKAKVE

SEQ ID NO: 1258 - protein, 2093 aa, synthetic construct
MPAAKRVKLDGGDKKYSIGLDIGTNSVGWAVITDEYKVPSKKFKVLGNTDRHSIKKNLIGALLFDSGETAEATRLKRTARRRYTRRKNRICYLQEIFSNEMAKVDDSFFHRLEESFLVEEDKKHERHPIFGNIVDEVAYHEKYPTIYHLRKKLVDSTDKADLRLIYLALAHMIKFRGHFLIEGDLNPDNSDVDKLFIQLVQTYNQLFEENPINASGVDAKAILSARLSKSRRLENLIAQLPGEKKNGLFGNLIALSLGLTPNFKSNFDLAEDAKLQLSKDTYDDDLDNLLAQIGDQYADLFLAAKNLSDAILLSDILRVNTEITKAPLSASMIKRYDEHHQDLTLLKALVRQQLPEKYKEIFFDQSKNGYAGYIDGGASQEEFYKFIKPILEKMDGTEELLVKLNREDLLRKQRTFDNGSIPHQIHLGELHAILRRQEDFYPFLKDNREKIEKILTFRIPYYVGPLARGNSRFAWMTRKSEETITPWNFEEVVDKGASAQSFIERMTNFDKNLPNEKVLPKHSLLYEYFTVYNELTKVKYVTEGMRKPAFLSGEQKKAIVDLLFKTNRKVTVKQLKEDYFKKIECFDSVEISGVEDRFNASLGTYHDLLKIIKDKDFLDNEENEDILEDIVLTLTLFEDREMIEERLKTYAHLFDDKVMKQLKRRRYTGWGRLSRKLINGIRDKQSGKTILDFLKSDGFANRNFMQLIHDDSLTFKEDIQKAQVSGQGDSLHEHIANLAGSPAIKKGILQTVKVVDELVKVMGRHKPENIVIEMARENQTTQKGQKNSRERMKRIEEGIKELGSQILKEHPVENTQLQNEKLYLYYLQNGRDMYVDQELDINRLSDYDVDHIVPQSFLKDDSIDNKVLTRSDKARGKSDNVPSEEVVKKMKNYWRQLLNAKLITQRKFDNLTKAERGGLSELDKAGFIKRQLVETRQITKHVAQILDSRMNTKYDENDKLIREVKVITLKSKLVSDFRKDFQFYKVREINNYHHAHDAYLNAVVGTALIKKYPKLESEFVYGDYKVYDVRKMIAKSEQEIGKATAKYFFYSNIMNFFKTEITLANGEIRKRPLIETNGETGEIVWDKGRDFATVRKVLSMPQVNIVKKTEVQTGGFSKESILPKRNSDKLIARKKDWDPKKYGGFDSPTVAYSVLVVAKVEKGKSKKLKSVKELLGITIMERSSFEKNPIDFLEAKGYKEVKKDLIIKLPKYSLFELENGRKRMLASAGELQKGNELALPSKYVNFLYLASHYEKLKGSPEDNEQKQLFVEQHKHYLDEIIEQISEFSKRVILADANLDKVLSAYNKHRDKPIREQAENIIHLFTLTNLGAPAAFKYFDTTIDRKRYTSTKEVLDATLIHQSITGLYETRIDLSQLGGDGGGSSGGGGGSGGTLQLEEEYRLFEPESTQKQEMDIWLKNFPQAWAETGGMGTAHCQAPVLIQLKATATPISIRQYPMPHEAYQGIKPHIRRMLDQGILKPCQSPWNTPLLPVKKPGTEDYRPVQDLREVNKRVEDIHPTVPNPYNLLSTLPPSHPWYTVLDLKDAFFCLRLHSESQLLFAFEWRDPEIGLSGQLTWTRLPQGFKNSPTLFNEALHSDLADFRVRYPALVLLQYVDDLLLAAATRTECLEGTKALLETLGNKGYRASAKKAQICLQEVTYLGYSLKDGQRWLTKARKEAILSIPVPKNSRQVREFLGKAGYCRLFIPGFAELAAPLYPLTRPGTLFQWGTEQQLAFEDIKKALLSSPALGLPDITKPFELFIDENSGFAKGVLVQKLGPWKRPVAYLSKKLDTVASGWPPCLRMVAAIAILVKDAGKLTLGQPLTILTSHPVEALVRQPPNKWLSNARMTHYQAMLLDAERVHFGPTVSLNPATLLPLPSGGNHHDCLQILAETHGTRPDLTDQPLPDADLTWYTDGSSFIRNGEREAGAAVTTESEVIWAAPLPPGTSAQRAELIALTQALKMAEGKKLTVYTDSRYAFATTHVHGEIYRRRGWLTSEGKEIKNKNEILALLEALFLPKRLSIIHCPGHQKGDSPQAKGNRLADDTAKKAATETHSSLTVLPAGKRTADGSEFEKRTADGSEFESPKKKAKVE

SEQ ID NO: 1259 - protein, 2095 aa, synthetic construct
MPAAKRVKLDGGDKKYSIGLDIGTNSVGWAVITDEYKVPSKKFKVLGNTDRHSIKKNLIGALLFDSGETAEATRLKRTARRRYTRRKNRICYLQEIFSNEMAKVDDSFFHRLEESFLVEEDKKHERHPIFGNIVDEVAYHEKYPTIYHLRKKLVDSTDKADLRLIYLALAHMIKFRGHFLIEGDLNPDNSDVDKLFIQLVQTYNQLFEENPINASGVDAKAILSARLSKSRRLENLIAQLPGEKKNGLFGNLIALSLGLTPNFKSNFDLAEDAKLQLSKDTYDDDLDNLLAQIGDQYADLFLAAKNLSDAILLSDILRVNTEITKAPLSASMIKRYDEHHQDLTLLKALVRQQLPEKYKEIFFDQSKNGYAGYIDGGASQEEFYKFIKPILEKMDGTEELLVKLNREDLLRKQRTFDNGSIPHQIHLGELHAILRRQEDFYPFLKDNREKIEKILTFRIPYYVGPLARGNSRFAWMTRKSEETITPWNFEEVVDKGASAQSFIERMTNFDKNLPNEKVLPKHSLLYEYFTVYNELTKVKYVTEGMRKPAFLSGEQKKAIVDLLFKTNRKVTVKQLKEDYFKKIECFDSVEISGVEDRFNASLGTYHDLLKIIKDKDFLDNEENEDILEDIVLTLTLFEDREMIEERLKTYAHLFDDKVMKQLKRRRYTGWGRLSRKLINGIRDKQSGKTILDFLKSDGFANRNFMQLIHDDSLTFKEDIQKAQVSGQGDSLHEHIANLAGSPAIKKGILQTVKVVDELVKVMGRHKPENIVIEMARENQTTQKGQKNSRERMKRIEEGIKELGSQILKEHPVENTQLQNEKLYLYYLQNGRDMYVDQELDINRLSDYDVDHIVPQSFLKDDSIDNKVLTRSDKARGKSDNVPSEEVVKKMKNYWRQLLNAKLITQRKFDNLTKAERGGLSELDKAGFIKRQLVETRQITKHVAQILDSRMNTKYDENDKLIREVKVITLKSKLVSDFRKDFQFYKVREINNYHHAHDAYLNAVVGTALIKKYPKLESEFVYGDYKVYDVRKMIAKSEQEIGKATAKYFFYSNIMNFFKTEITLANGEIRKRPLIETNGETGEIVWDKGRDFATVRKVLSMPQVNIVKKTEVQTGGFSKESILPKRNSDKLIARKKDWDPKKYGGFDSPTVAYSVLVVAKVEKGKSKKLKSVKELLGITIMERSSFEKNPIDFLEAKGYKEVKKDLIIKLPKYSLFELENGRKRMLASAGELQKGNELALPSKYVNFLYLASHYEKLKGSPEDNEQKQLFVEQHKHYLDEIIEQISEFSKRVILADANLDKVLSAYNKHRDKPIREQAENIIHLFTLTNLGAPAAFKYFDTTIDRKRYTSTKEVLDATLIHQSITGLYETRIDLSQLGGDGGGGGEAAAKGGSGGTLQLEEEYRLFEPESTQKQEMDIWLKNFPQAWAETGGMGTAHCQAPVLIQLKATATPISIRQYPMPHEAYQGIKPHIRRMLDQGILKPCQSPWNTPLLPVKKPGTEDYRPVQDLREVNKRVEDIHPTVPNPYNLLSTLPPSHPWYTVLDLKDAFFCLRLHSESQLLFAFEWRDPEIGLSGQLTWTRLPQGFKNSPTLFNEALHSDLADFRVRYPALVLLQYVDDLLLAAATRTECLEGTKALLETLGNKGYRASAKKAQICLQEVTYLGYSLKDGQRWLTKARKEAILSIPVPKNSRQVREFLGKAGYCRLFIPGFAELAAPLYPLTRPGTLFQWGTEQQLAFEDIKKALLSSPALGLPDITKPFELFIDENSGFAKGVLVQKLGPWKRPVAYLSKKLDTVASGWPPCLRMVAAIAILVKDAGKLTLGQPLTILTSHPVEALVRQPPNKWLSNARMTHYQAMLLDAERVHFGPTVSLNPATLLPLPSGGNHHDCLQILAETHGTRPDLTDQPLPDADLTWYTDGSSFIRNGEREAGAAVTTESEVIWAAPLPPGTSAQRAELIALTQALKMAEGKKLTVYTDSRYAFATTHVHGEIYRRRGWLTSEGKEIKNKNEILALLEALFLPKRLSIIHCPGHQKGDSPQAKGNRLADDTAKKAATETHSSLTVLPAGKRTADGSEFEKRTADGSEFESPKKKAKVE

SEQ ID NO: 1260 - protein, 2089 aa, synthetic construct
MPAAKRVKLDGGDKKYSIGLDIGTNSVGWAVITDEYKVPSKKFKVLGNTDRHSIKKNLIGALLFDSGETAEATRLKRTARRRYTRRKNRICYLQEIFSNEMAKVDDSFFHRLEESFLVEEDKKHERHPIFGNIVDEVAYHEKYPTIYHLRKKLVDSTDKADLRLIYLALAHMIKFRGHFLIEGDLNPDNSDVDKLFIQLVQTYNQLFEENPINASGVDAKAILSARLSKSRRLENLIAQLPGEKKNGLFGNLIALSLGLTPNFKSNFDLAEDAKLQLSKDTYDDDLDNLLAQIGDQYADLFLAAKNLSDAILLSDILRVNTEITKAPLSASMIKRYDEHHQDLTLLKALVRQQLPEKYKEIFFDQSKNGYAGYIDGGASQEEFYKFIKPILEKMDGTEELLVKLNREDLLRKQRTFDNGSIPHQIHLGELHAILRRQEDFYPFLKDNREKIEKILTFRIPYYVGPLARGNSRFAWMTRKSEETITPWNFEEVVDKGASAQSFIERMTNFDKNLPNEKVLPKHSLLYEYFTVYNELTKVKYVTEGMRKPAFLSGEQKKAIVDLLFKTNRKVTVKQLKEDYFKKIECFDSVEISGVEDRFNASLGTYHDLLKIIKDKDFLDNEENEDILEDIVLTLTLFEDREMIEERLKTYAHLFDDKVMKQLKRRRYTGWGRLSRKLINGIRDKQSGKTILDFLKSDGFANRNFMQLIHDDSLTFKEDIQKAQVSGQGDSLHEHIANLAGSPAIKKGILQTVKVVDELVKVMGRHKPENIVIEMARENQTTQKGQKNSRERMKRIEEGIKELGSQILKEHPVENTQLQNEKLYLYYLQNGRDMYVDQELDINRLSDYDVDHIVPQSFLKDDSIDNKVLTRSDKARGKSDNVPSEEVVKKMKNYWRQLLNAKLITQRKFDNLTKAERGGLSELDKAGFIKRQLVETRQITKHVAQILDSRMNTKYDENDKLIREVKVITLKSKLVSDFRKDFQFYKVREINNYHHAHDAYLNAVVGTALIKKYPKLESEFVYGDYKVYDVRKMIAKSEQEIGKATAKYFFYSNIMNFFKTEITLANGEIRKRPLIETNGETGEIVWDKGRDFATVRKVLSMPQVNIVKKTEVQTGGFSKESILPKRNSDKLIARKKDWDPKKYGGFDSPTVAYSVLVVAKVEKGKSKKLKSVKELLGITIMERSSFEKNPIDFLEAKGYKEVKKDLIIKLPKYSLFELENGRKRMLASAGELQKGNELALPSKYVNFLYLASHYEKLKGSPEDNEQKQLFVEQHKHYLDEIIEQISEFSKRVILADANLDKVLSAYNKHRDKPIREQAENIIHLFTLTNLGAPAAFKYFDTTIDRKRYTSTKEVLDATLIHQSITGLYETRIDLSQLGGDGGEAAAKGGTLQLEEEYRLFEPESTQKQEMDIWLKNFPQAWAETGGMGTAHCQAPVLIQLKATATPISIRQYPMPHEAYQGIKPHIRRMLDQGILKPCQSPWNTPLLPVKKPGTEDYRPVQDLREVNKRVEDIHPTVPNPYNLLSTLPPSHPWYTVLDLKDAFFCLRLHSESQLLFAFEWRDPEIGLSGQLTWTRLPQGFKNSPTLFNEALHSDLADFRVRYPALVLLQYVDDLLLAAATRTECLEGTKALLETLGNKGYRASAKKAQICLQEVTYLGYSLKDGQRWLTKARKEAILSIPVPKNSRQVREFLGKAGYCRLFIPGFAELAAPLYPLTRPGTLFQWGTEQQLAFEDIKKALLSSPALGLPDITKPFELFIDENSGFAKGVLVQKLGPWKRPVAYLSKKLDTVASGWPPCLRMVAAIAILVKDAGKLTLGQPLTILTSHPVEALVRQPPNKWLSNARMTHYQAMLLDAERVHFGPTVSLNPATLLPLPSGGNHHDCLQILAETHGTRPDLTDQPLPDADLTWYTDGSSFIRNGEREAGAAVTTESEVIWAAPLPPGTSAQRAELIALTQALKMAEGKKLTVYTDSRYAFATTHVHGEIYRRRGWLTSEGKEIKNKNEILALLEALFLPKRLSIIHCPGHQKGDSPQAKGNRLADDTAKKAATETHSSLTVLPAGKRTADGSEFEKRTADGSEFESPKKKAKVE

SEQ ID NO: 1261 - protein, 2095 aa, synthetic construct
MPAAKRVKLDGGDKKYSIGLDIGTNSVGWAVITDEYKVPSKKFKVLGNTDRHSIKKNLIGALLFDSGETAEATRLKRTARRRYTRRKNRICYLQEIFSNEMAKVDDSFFHRLEESFLVEEDKKHERHPIFGNIVDEVAYHEKYPTIYHLRKKLVDSTDKADLRLIYLALAHMIKFRGHFLIEGDLNPDNSDVDKLFIQLVQTYNQLFEENPINASGVDAKAILSARLSKSRRLENLIAQLPGEKKNGLFGNLIALSLGLTPNFKSNFDLAEDAKLQLSKDTYDDDLDNLLAQIGDQYADLFLAAKNLSDAILLSDILRVNTEITKAPLSASMIKRYDEHHQDLTLLKALVRQQLPEKYKEIFFDQSKNGYAGYIDGGASQEEFYKFIKPILEKMDGTEELLVKLNREDLLRKQRTFDNGSIPHQIHLGELHAILRRQEDFYPFLKDNREKIEKILTFRIPYYVGPLARGNSRFAWMTRKSEETITPWNFEEVVDKGASAQSFIERMTNFDKNLPNEKVLPKHSLLYEYFTVYNELTKVKYVTEGMRKPAFLSGEQKKAIVDLLFKTNRKVTVKQLKEDYFKKIECFDSVEISGVEDRFNASLGTYHDLLKIIKDKDFLDNEENEDILEDIVLTLTLFEDREMIEERLKTYAHLFDDKVMKQLKRRRYTGWGRLSRKLINGIRDKQSGKTILDFLKSDGFANRNFMQLIHDDSLTFKEDIQKAQVSGQGDSLHEHIANLAGSPAIKKGILQTVKVVDELVKVMGRHKPENIVIEMARENQTTQKGQKNSRERMKRIEEGIKELGSQILKEHPVENTQLQNEKLYLYYLQNGRDMYVDQELDINRLSDYDVDHIVPQSFLKDDSIDNKVLTRSDKARGKSDNVPSEEVVKKMKNYWRQLLNAKLITQRKFDNLTKAERGGLSELDKAGFIKRQLVETRQITKHVAQILDSRMNTKYDENDKLIREVKVITLKSKLVSDFRKDFQFYKVREINNYHHAHDAYLNAVVGTALIKKYPKLESEFVYGDYKVYDVRKMIAKSEQEIGKATAKYFFYSNIMNFFKTEITLANGEIRKRPLIETNGETGEIVWDKGRDFATVRKVLSMPQVNIVKKTEVQTGGFSKESILPKRNSDKLIARKKDWDPKKYGGFDSPTVAYSVLVVAKVEKGKSKKLKSVKELLGITIMERSSFEKNPIDFLEAKGYKEVKKDLIIKLPKYSLFELENGRKRMLASAGELQKGNELALPSKYVNFLYLASHYEKLKGSPEDNEQKQLFVEQHKHYLDEIIEQISEFSKRVILADANLDKVLSAYNKHRDKPIREQAENIIHLFTLTNLGAPAAFKYFDTTIDRKRYTSTKEVLDATLIHQSITGLYETRIDLSQLGGDGGGGGGSSEAAAKGGTLQLEEEYRLFEPESTQKQEMDIWLKNFPQAWAETGGMGTAHCQAPVLIQLKATATPISIRQYPMPHEAYQGIKPHIRRMLDQGILKPCQSPWNTPLLPVKKPGTEDYRPVQDLREVNKRVEDIHPTVPNPYNLLSTLPPSHPWYTVLDLKDAFFCLRLHSESQLLFAFEWRDPEIGLSGQLTWTRLPQGFKNSPTLFNEALHSDLADFRVRYPALVLLQYVDDLLLAAATRTECLEGTKALLETLGNKGYRASAKKAQICLQEVTYLGYSLKDGQRWLTKARKEAILSIPVPKNSRQVREFLGKAGYCRLFIPGFAELAAPLYPLTRPGTLFQWGTEQQLAFEDIKKALLSSPALGLPDITKPFELFIDENSGFAKGVLVQKLGPWKRPVAYLSKKLDTVASGWPPCLRMVAAIAILVKDAGKLTLGQPLTILTSHPVEALVRQPPNKWLSNARMTHYQAMLLDAERVHFGPTVSLNPATLLPLPSGGNHHDCLQILAETHGTRPDLTDQPLPDADLTWYTDGSSFIRNGEREAGAAVTTESEVIWAAPLPPGTSAQRAELIALTQALKMAEGKKLTVYTDSRYAFATTHVHGEIYRRRGWLTSEGKEIKNKNEILALLEALFLPKRLSIIHCPGHQKGDSPQAKGNRLADDTAKKAATETHSSLTVLPAGKRTADGSEFEKRTADGSEFESPKKKAKVE

SEQ ID NO: 1262 - protein, 2095 aa, synthetic construct
MPAAKRVKLDGGDKKYSIGLDIGTNSVGWAVITDEYKVPSKKFKVLGNTDRHSIKKNLIGALLFDSGETAEATRLKRTARRRYTRRKNRICYLQEIFSNEMAKVDDSFFHRLEESFLVEEDKKHERHPIFGNIVDEVAYHEKYPTIYHLRKKLVDSTDKADLRLIYLALAHMIKFRGHFLIEGDLNPDNSDVDKLFIQLVQTYNQLFEENPINASGVDAKAILSARLSKSRRLENLIAQLPGEKKNGLFGNLIALSLGLTPNFKSNFDLAEDAKLQLSKDTYDDDLDNLLAQIGDQYADLFLAAKNLSDAILLSDILRVNTEITKAPLSASMIKRYDEHHQDLTLLKALVRQQLPEKYKEIFFDQSKNGYAGYIDGGASQEEFYKFIKPILEKMDGTEELLVKLNREDLLRKQRTFDNGSIPHQIHLGELHAILRRQEDFYPFLKDNREKIEKILTFRIPYYVGPLARGNSRFAWMTRKSEETITPWNFEEVVDKGASAQSFIERMTNFDKNLPNEKVLPKHSLLYEYFTVYNELTKVKYVTEGMRKPAFLSGEQKKAIVDLLFKTNRKVTVKQLKEDYFKKIECFDSVEISGVEDRFNASLGTYHDLLKIIKDKDFLDNEENEDILEDIVLTLTLFEDREMIEERLKTYAHLFDDKVMKQLKRRRYTGWGRLSRKLINGIRDKQSGKTILDFLKSDGFANRNFMQLIHDDSLTFKEDIQKAQVSGQGDSLHEHIANLAGSPAIKKGILQTVKVVDELVKVMGRHKPENIVIEMARENQTTQKGQKNSRERMKRIEEGIKELGSQILKEHPVENTQLQNEKLYLYYLQNGRDMYVDQELDINRLSDYDVDHIVPQSFLKDDSIDNKVLTRSDKARGKSDNVPSEEVVKKMKNYWRQLLNAKLITQRKFDNLTKAERGGLSELDKAGFIKRQLVETRQITKHVAQILDSRMNTKYDENDKLIREVKVITLKSKLVSDFRKDFQFYKVREINNYHHAHDAYLNAVVGTALIKKYPKLESEFVYGDYKVYDVRKMIAKSEQEIGKATAKYFFYSNIMNFFKTEITLANGEIRKRPLIETNGETGEIVWDKGRDFATVRKVLSMPQVNIVKKTEVQTGGFSKESILPKRNSDKLIARKKDWDPKKYGGFDSPTVAYSVLVVAKVEKGKSKKLKSVKELLGITIMERSSFEKNPIDFLEAKGYKEVKKDLIIKLPKYSLFELENGRKRMLASAGELQKGNELALPSKYVNFLYLASHYEKLKGSPEDNEQKQLFVEQHKHYLDEIIEQISEFSKRVILADANLDKVLSAYNKHRDKPIREQAENIIHLFTLTNLGAPAAFKYFDTTIDRKRYTSTKEVLDATLIHQSITGLYETRIDLSQLGGDGGGGGEAAAKPAPGGTLQLEEEYRLFEPESTQKQEMDIWLKNFPQAWAETGGMGTAHCQAPVLIQLKATATPISIRQYPMPHEAYQGIKPHIRRMLDQGILKPCQSPWNTPLLPVKKPGTEDYRPVQDLREVNKRVEDIHPTVPNPYNLLSTLPPSHPWYTVLDLKDAFFCLRLHSESQLLFAFEWRDPEIGLSGQLTWTRLPQGFKNSPTLFNEALHSDLADFRVRYPALVLLQYVDDLLLAAATRTECLEGTKALLETLGNKGYRASAKKAQICLQEVTYLGYSLKDGQRWLTKARKEAILSIPVPKNSRQVREFLGKAGYCRLFIPGFAELAAPLYPLTRPGTLFQWGTEQQLAFEDIKKALLSSPALGLPDITKPFELFIDENSGFAKGVLVQKLGPWKRPVAYLSKKLDTVASGWPPCLRMVAAIAILVKDAGKLTLGQPLTILTSHPVEALVRQPPNKWLSNARMTHYQAMLLDAERVHFGPTVSLNPATLLPLPSGGNHHDCLQILAETHGTRPDLTDQPLPDADLTWYTDGSSFIRNGEREAGAAVTTESEVIWAAPLPPGTSAQRAELIALTQALKMAEGKKLTVYTDSRYAFATTHVHGEIYRRRGWLTSEGKEIKNKNEILALLEALFLPKRLSIIHCPGHQKGDSPQAKGNRLADDTAKKAATETHSSLTVLPAGKRTADGSEFEKRTADGSEFESPKKKAKVE

SEQ ID NO: 1263 - protein, 2093 aa, synthetic construct
MPAAKRVKLDGGDKKYSIGLDIGTNSVGWAVITDEYKVPSKKFKVLGNTDRHSIKKNLIGALLFDSGETAEATRLKRTARRRYTRRKNRICYLQEIFSNEMAKVDDSFFHRLEESFLVEEDKKHERHPIFGNIVDEVAYHEKYPTIYHLRKKLVDSTDKADLRLIYLALAHMIKFRGHFLIEGDLNPDNSDVDKLFIQLVQTYNQLFEENPINASGVDAKAILSARLSKSRRLENLIAQLPGEKKNGLFGNLIALSLGLTPNFKSNFDLAEDAKLQLSKDTYDDDLDNLLAQIGDQYADLFLAAKNLSDAILLSDILRVNTEITKAPLSASMIKRYDEHHQDLTLLKALVRQQLPEKYKEIFFDQSKNGYAGYIDGGASQEEFYKFIKPILEKMDGTEELLVKLNREDLLRKQRTFDNGSIPHQIHLGELHAILRRQEDFYPFLKDNREKIEKILTFRIPYYVGPLARGNSRFAWMTRKSEETITPWNFEEVVDKGASAQSFIERMTNFDKNLPNEKVLPKHSLLYEYFTVYNELTKVKYVTEGMRKPAFLSGEQKKAIVDLLFKTNRKVTVKQLKEDYFKKIECFDSVEISGVEDRFNASLGTYHDLLKIIKDKDFLDNEENEDILEDIVLTLTLFEDREMIEERLKTYAHLFDDKVMKQLKRRRYTGWGRLSRKLINGIRDKQSGKTILDFLKSDGFANRNFMQLIHDDSLTFKEDIQKAQVSGQGDSLHEHIANLAGSPAIKKGILQTVKVVDELVKVMGRHKPENIVIEMARENQTTQKGQKNSRERMKRIEEGIKELGSQILKEHPVENTQLQNEKLYLYYLQNGRDMYVDQELDINRLSDYDVDHIVPQSFLKDDSIDNKVLTRSDKARGKSDNVPSEEVVKKMKNYWRQLLNAKLITQRKFDNLTKAERGGLSELDKAGFIKRQLVETRQITKHVAQILDSRMNTKYDENDKLIREVKVITLKSKLVSDFRKDFQFYKVREINNYHHAHDAYLNAVVGTALIKKYPKLESEFVYGDYKVYDVRKMIAKSEQEIGKATAKYFFYSNIMNFFKTEITLANGEIRKRPLIETNGETGEIVWDKGRDFATVRKVLSMPQVNIVKKTEVQTGGFSKESILPKRNSDKLIARKKDWDPKKYGGFDSPTVAYSVLVVAKVEKGKSKKLKSVKELLGITIMERSSFEKNPIDFLEAKGYKEVKKDLIIKLPKYSLFELENGRKRMLASAGELQKGNELALPSKYVNFLYLASHYEKLKGSPEDNEQKQLFVEQHKHYLDEIIEQISEFSKRVILADANLDKVLSAYNKHRDKPIREQAENIIHLFTLTNLGAPAAFKYFDTTIDRKRYTSTKEVLDATLIHQSITGLYETRIDLSQLGGDGGGGSPAPGSSGGTLQLEEEYRLFEPESTQKQEMDIWLKNFPQAWAETGGMGTAHCQAPVLIQLKATATPISIRQYPMPHEAYQGIKPHIRRMLDQGILKPCQSPWNTPLLPVKKPGTEDYRPVQDLREVNKRVEDIHPTVPNPYNLLSTLPPSHPWYTVLDLKDAFFCLRLHSESQLLFAFEWRDPEIGLSGQLTWTRLPQGFKNSPTLFNEALHSDLADFRVRYPALVLLQYVDDLLLAAATRTECLEGTKALLETLGNKGYRASAKKAQICLQEVTYLGYSLKDGQRWLTKARKEAILSIPVPKNSRQVREFLGKAGYCRLFIPGFAELAAPLYPLTRPGTLFQWGTEQQLAFEDIKKALLSSPALGLPDITKPFELFIDENSGFAKGVLVQKLGPWKRPVAYLSKKLDTVASGWPPCLRMVAAIAILVKDAGKLTLGQPLTILTSHPVEALVRQPPNKWLSNARMTHYQAMLLDAERVHFGPTVSLNPATLLPLPSGGNHHDCLQILAETHGTRPDLTDQPLPDADLTWYTDGSSFIRNGEREAGAAVTTESEVIWAAPLPPGTSAQRAELIALTQALKMAEGKKLTVYTDSRYAFATTHVHGEIYRRRGWLTSEGKEIKNKNEILALLEALFLPKRLSIIHCPGHQKGDSPQAKGNRLADDTAKKAATETHSSLTVLPAGKRTADGSEFEKRTADGSEFESPKKKAKVE

SEQ ID NO: 1264 - protein, 2095 aa, synthetic construct
MPAAKRVKLDGGDKKYSIGLDIGTNSVGWAVITDEYKVPSKKFKVLGNTDRHSIKKNLIGALLFDSGETAEATRLKRTARRRYTRRKNRICYLQEIFSNEMAKVDDSFFHRLEESFLVEEDKKHERHPIFGNIVDEVAYHEKYPTIYHLRKKLVDSTDKADLRLIYLALAHMIKFRGHFLIEGDLNPDNSDVDKLFIQLVQTYNQLFEENPINASGVDAKAILSARLSKSRRLENLIAQLPGEKKNGLFGNLIALSLGLTPNFKSNFDLAEDAKLQLSKDTYDDDLDNLLAQIGDQYADLFLAAKNLSDAILLSDILRVNTEITKAPLSASMIKRYDEHHQDLTLLKALVRQQLPEKYKEIFFDQSKNGYAGYIDGGASQEEFYKFIKPILEKMDGTEELLVKLNREDLLRKQRTFDNGSIPHQIHLGELHAILRRQEDFYPFLKDNREKIEKILTFRIPYYVGPLARGNSRFAWMTRKSEETITPWNFEEVVDKGASAQSFIERMTNFDKNLPNEKVLPKHSLLYEYFTVYNELTKVKYVTEGMRKPAFLSGEQKKAIVDLLFKTNRKVTVKQLKEDYFKKIECFDSVEISGVEDRFNASLGTYHDLLKIIKDKDFLDNEENEDILEDIVLTLTLFEDREMIEERLKTYAHLFDDKVMKQLKRRRYTGWGRLSRKLINGIRDKQSGKTILDFLKSDGFANRNFMQLIHDDSLTFKEDIQKAQVSGQGDSLHEHIANLAGSPAIKKGILQTVKVVDELVKVMGRHKPENIVIEMARENQTTQKGQKNSRERMKRIEEGIKELGSQILKEHPVENTQLQNEKLYLYYLQNGRDMYVDQELDINRLSDYDVDHIVPQSFLKDDSIDNKVLTRSDKARGKSDNVPSEEVVKKMKNYWRQLLNAKLITQRKFDNLTKAERGGLSELDKAGFIKRQLVETRQITKHVAQILDSRMNTKYDENDKLIREVKVITLKSKLVSDFRKDFQFYKVREINNYHHAHDAYLNAVVGTALIKKYPKLESEFVYGDYKVYDVRKMIAKSEQEIGKATAKYFFYSNIMNFFKTEITLANGEIRKRPLIETNGETGEIVWDKGRDFATVRKVLSMPQVNIVKKTEVQTGGFSKESILPKRNSDKLIARKKDWDPKKYGGFDSPTVAYSVLVVAKVEKGKSKKLKSVKELLGITIMERSSFEKNPIDFLEAKGYKEVKKDLIIKLPKYSLFELENGRKRMLASAGELQKGNELALPSKYVNFLYLASHYEKLKGSPEDNEQKQLFVEQHKHYLDEIIEQISEFSKRVILADANLDKVLSAYNKHRDKPIREQAENIIHLFTLTNLGAPAAFKYFDTTIDRKRYTSTKEVLDATLIHQSITGLYETRIDLSQLGGDGGPAPEAAAKGGSGGTLQLEEEYRLFEPESTQKQEMDIWLKNFPQAWAETGGMGTAHCQAPVLIQLKATATPISIRQYPMPHEAYQGIKPHIRRMLDQGILKPCQSPWNTPLLPVKKPGTEDYRPVQDLREVNKRVEDIHPTVPNPYNLLSTLPPSHPWYTVLDLKDAFFCLRLHSESQLLFAFEWRDPEIGLSGQLTWTRLPQGFKNSPTLFNEALHSDLADFRVRYPALVLLQYVDDLLLAAATRTECLEGTKALLETLGNKGYRASAKKAQICLQEVTYLGYSLKDGQRWLTKARKEAILSIPVPKNSRQVREFLGKAGYCRLFIPGFAELAAPLYPLTRPGTLFQWGTEQQLAFEDIKKALLSSPALGLPDITKPFELFIDENSGFAKGVLVQKLGPWKRPVAYLSKKLDTVASGWPPCLRMVAAIAILVKDAGKLTLGQPLTILTSHPVEALVRQPPNKWLSNARMTHYQAMLLDAERVHFGPTVSLNPATLLPLPSGGNHHDCLQILAETHGTRPDLTDQPLPDADLTWYTDGSSFIRNGEREAGAAVTTESEVIWAAPLPPGTSAQRAELIALTQALKMAEGKKLTVYTDSRYAFATTHVHGEIYRRRGWLTSEGKEIKNKNEILALLEALFLPKRLSIIHCPGHQKGDSPQAKGNRLADDTAKKAATETHSSLTVLPAGKRTADGSEFEKRTADGSEFESPKKKAKVE

SEQ ID NO: 1265 - protein, 2095 aa, synthetic construct
MPAAKRVKLDGGDKKYSIGLDIGTNSVGWAVITDEYKVPSKKFKVLGNTDRHSIKKNLIGALLFDSGETAEATRLKRTARRRYTRRKNRICYLQEIFSNEMAKVDDSFFHRLEESFLVEEDKKHERHPIFGNIVDEVAYHEKYPTIYHLRKKLVDSTDKADLRLIYLALAHMIKFRGHFLIEGDLNPDNSDVDKLFIQLVQTYNQLFEENPINASGVDAKAILSARLSKSRRLENLIAQLPGEKKNGLFGNLIALSLGLTPNFKSNFDLAEDAKLQLSKDTYDDDLDNLLAQIGDQYADLFLAAKNLSDAILLSDILRVNTEITKAPLSASMIKRYDEHHQDLTLLKALVRQQLPEKYKEIFFDQSKNGYAGYIDGGASQEEFYKFIKPILEKMDGTEELLVKLNREDLLRKQRTFDNGSIPHQIHLGELHAILRRQEDFYPFLKDNREKIEKILTFRIPYYVGPLARGNSRFAWMTRKSEETITPWNFEEVVDKGASAQSFIERMTNFDKNLPNEKVLPKHSLLYEYFTVYNELTKVKYVTEGMRKPAFLSGEQKKAIVDLLFKTNRKVTVKQLKEDYFKKIECFDSVEISGVEDRFNASLGTYHDLLKIIKDKDFLDNEENEDILEDIVLTLTLFEDREMIEERLKTYAHLFDDKVMKQLKRRRYTGWGRLSRKLINGIRDKQSGKTILDFLKSDGFANRNFMQLIHDDSLTFKEDIQKAQVSGQGDSLHEHIANLAGSPAIKKGILQTVKVVDELVKVMGRHKPENIVIEMARENQTTQKGQKNSRERMKRIEEGIKELGSQILKEHPVENTQLQNEKLYLYYLQNGRDMYVDQELDINRLSDYDVDHIVPQSFLKDDSIDNKVLTRSDKARGKSDNVPSEEVVKKMKNYWRQLLNAKLITQRKFDNLTKAERGGLSELDKAGFIKRQLVETRQITKHVAQILDSRMNTKYDENDKLIREVKVITLKSKLVSDFRKDFQFYKVREINNYHHAHDAYLNAVVGTALIKKYPKLESEFVYGDYKVYDVRKMIAKSEQEIGKATAKYFFYSNIMNFFKTEITLANGEIRKRPLIETNGETGEIVWDKGRDFATVRKVLSMPQVNIVKKTEVQTGGFSKESILPKRNSDKLIARKKDWDPKKYGGFDSPTVAYSVLVVAKVEKGKSKKLKSVKELLGITIMERSSFEKNPIDFLEAKGYKEVKKDLIIKLPKYSLFELENGRKRMLASAGELQKGNELALPSKYVNFLYLASHYEKLKGSPEDNEQKQLFVEQHKHYLDEIIEQISEFSKRVILADANLDKVLSAYNKHRDKPIREQAENIIHLFTLTNLGAPAAFKYFDTTIDRKRYTSTKEVLDATLIHQSITGLYETRIDLSQLGGDGGGSSEAAAKGGSGGTLQLEEEYRLFEPESTQKQEMDIWLKNFPQAWAETGGMGTAHCQAPVLIQLKATATPISIRQYPMPHEAYQGIKPHIRRMLDQGILKPCQSPWNTPLLPVKKPGTEDYRPVQDLREVNKRVEDIHPTVPNPYNLLSTLPPSHPWYTVLDLKDAFFCLRLHSESQLLFAFEWRDPEIGLSGQLTWTRLPQGFKNSPTLFNEALHSDLADFRVRYPALVLLQYVDDLLLAAATRTECLEGTKALLETLGNKGYRASAKKAQICLQEVTYLGYSLKDGQRWLTKARKEAILSIPVPKNSRQVREFLGKAGYCRLFIPGFAELAAPLYPLTRPGTLFQWGTEQQLAFEDIKKALLSSPALGLPDITKPFELFIDENSGFAKGVLVQKLGPWKRPVAYLSKKLDTVASGWPPCLRMVAAIAILVKDAGKLTLGQPLTILTSHPVEALVRQPPNKWLSNARMTHYQAMLLDAERVHFGPTVSLNPATLLPLPSGGNHHDCLQILAETHGTRPDLTDQPLPDADLTWYTDGSSFIRNGEREAGAAVTTESEVIWAAPLPPGTSAQRAELIALTQALKMAEGKKLTVYTDSRYAFATTHVHGEIYRRRGWLTSEGKEIKNKNEILALLEALFLPKRLSIIHCPGHQKGDSPQAKGNRLADDTAKKAATETHSSLTVLPAGKRTADGSEFEKRTADGSEFESPKKKAKVE

SEQ ID NO: 1266 - protein, 2095 aa, synthetic construct
MPAAKRVKLDGGDKKYSIGLDIGTNSVGWAVITDEYKVPSKKFKVLGNTDRHSIKKNLIGALLFDSGETAEATRLKRTARRRYTRRKNRICYLQEIFSNEMAKVDDSFFHRLEESFLVEEDKKHERHPIFGNIVDEVAYHEKYPTIYHLRKKLVDSTDKADLRLIYLALAHMIKFRGHFLIEGDLNPDNSDVDKLFIQLVQTYNQLFEENPINASGVDAKAILSARLSKSRRLENLIAQLPGEKKNGLFGNLIALSLGLTPNFKSNFDLAEDAKLQLSKDTYDDDLDNLLAQIGDQYADLFLAAKNLSDAILLSDILRVNTEITKAPLSASMIKRYDEHHQDLTLLKALVRQQLPEKYKEIFFDQSKNGYAGYIDGGASQEEFYKFIKPILEKMDGTEELLVKLNREDLLRKQRTFDNGSIPHQIHLGELHAILRRQEDFYPFLKDNREKIEKILTFRIPYYVGPLARGNSRFAWMTRKSEETITPWNFEEVVDKGASAQSFIERMTNFDKNLPNEKVLPKHSLLYEYFTVYNELTKVKYVTEGMRKPAFLSGEQKKAIVDLLFKTNRKVTVKQLKEDYFKKIECFDSVEISGVEDRFNASLGTYHDLLKIIKDKDFLDNEENEDILEDIVLTLTLFEDREMIEERLKTYAHLFDDKVMKQLKRRRYTGWGRLSRKLINGIRDKQSGKTILDFLKSDGFANRNFMQLIHDDSLTFKEDIQKAQVSGQGDSLHEHIANLAGSPAIKKGILQTVKVVDELVKVMGRHKPENIVIEMARENQTTQKGQKNSRERMKRIEEGIKELGSQILKEHPVENTQLQNEKLYLYYLQNGRDMYVDQELDINRLSDYDVDHIVPQSFLKDDSIDNKVLTRSDKARGKSDNVPSEEVVKKMKNYWRQLLNAKLITQRKFDNLTKAERGGLSELDKAGFIKRQLVETRQITKHVAQILDSRMNTKYDENDKLIREVKVITLKSKLVSDFRKDFQFYKVREINNYHHAHDAYLNAVVGTALIKKYPKLESEFVYGDYKVYDVRKMIAKSEQEIGKATAKYFFYSNIMNFFKTEITLANGEIRKRPLIETNGETGEIVWDKGRDFATVRKVLSMPQVNIVKKTEVQTGGFSKESILPKRNSDKLIARKKDWDPKKYGGFDSPTVAYSVLVVAKVEKGKSKKLKSVKELLGITIMERSSFEKNPIDFLEAKGYKEVKKDLIIKLPKYSLFELENGRKRMLASAGELQKGNELALPSKYVNFLYLASHYEKLKGSPEDNEQKQLFVEQHKHYLDEIIEQISEFSKRVILADANLDKVLSAYNKHRDKPIREQAENIIHLFTLTNLGAPAAFKYFDTTIDRKRYTSTKEVLDATLIHQSITGLYETRIDLSQLGGDGGGGSPAPEAAAKGGTLQLEEEYRLFEPESTQKQEMDIWLKNFPQAWAETGGMGTAHCQAPVLIQLKATATPISIRQYPMPHEAYQGIKPHIRRMLDQGILKPCQSPWNTPLLPVKKPGTEDYRPVQDLREVNKRVEDIHPTVPNPYNLLSTLPPSHPWYTVLDLKDAFFCLRLHSESQLLFAFEWRDPEIGLSGQLTWTRLPQGFKNSPTLFNEALHSDLADFRVRYPALVLLQYVDDLLLAAATRTECLEGTKALLETLGNKGYRASAKKAQICLQEVTYLGYSLKDGQRWLTKARKEAILSIPVPKNSRQVREFLGKAGYCRLFIPGFAELAAPLYPLTRPGTLFQWGTEQQLAFEDIKKALLSSPALGLPDITKPFELFIDENSGFAKGVLVQKLGPWKRPVAYLSKKLDTVASGWPPCLRMVAAIAILVKDAGKLTLGQPLTILTSHPVEALVRQPPNKWLSNARMTHYQAMLLDAERVHFGPTVSLNPATLLPLPSGGNHHDCLQILAETHGTRPDLTDQPLPDADLTWYTDGSSFIRNGEREAGAAVTTESEVIWAAPLPPGTSAQRAELIALTQALKMAEGKKLTVYTDSRYAFATTHVHGEIYRRRGWLTSEGKEIKNKNEILALLEALFLPKRLSIIHCPGHQKGDSPQAKGNRLADDTAKKAATETHSSLTVLPAGKRTADGSEFEKRTADGSEFESPKKKAKVE

SEQ ID NO: 1267 - protein, 2092 aa, synthetic construct
MPAAKRVKLDGGDKKYSIGLDIGTNSVGWAVITDEYKVPSKKFKVLGNTDRHSIKKNLIGALLFDSGETAEATRLKRTARRRYTRRKNRICYLQEIFSNEMAKVDDSFFHRLEESFLVEEDKKHERHPIFGNIVDEVAYHEKYPTIYHLRKKLVDSTDKADLRLIYLALAHMIKFRGHFLIEGDLNPDNSDVDKLFIQLVQTYNQLFEENPINASGVDAKAILSARLSKSRRLENLIAQLPGEKKNGLFGNLIALSLGLTPNFKSNFDLAEDAKLQLSKDTYDDDLDNLLAQIGDQYADLFLAAKNLSDAILLSDILRVNTEITKAPLSASMIKRYDEHHQDLTLLKALVRQQLPEKYKEIFFDQSKNGYAGYIDGGASQEEFYKFIKPILEKMDGTEELLVKLNREDLLRKQRTFDNGSIPHQIHLGELHAILRRQEDFYPFLKDNREKIEKILTFRIPYYVGPLARGNSRFAWMTRKSEETITPWNFEEVVDKGASAQSFIERMTNFDKNLPNEKVLPKHSLLYEYFTVYNELTKVKYVTEGMRKPAFLSGEQKKAIVDLLFKTNRKVTVKQLKEDYFKKIECFDSVEISGVEDRFNASLGTYHDLLKIIKDKDFLDNEENEDILEDIVLTLTLFEDREMIEERLKTYAHLFDDKVMKQLKRRRYTGWGRLSRKLINGIRDKQSGKTILDFLKSDGFANRNFMQLIHDDSLTFKEDIQKAQVSGQGDSLHEHIANLAGSPAIKKGILQTVKVVDELVKVMGRHKPENIVIEMARENQTTQKGQKNSRERMKRIEEGIKELGSQILKEHPVENTQLQNEKLYLYYLQNGRDMYVDQELDINRLSDYDVDHIVPQSFLKDDSIDNKVLTRSDKARGKSDNVPSEEVVKKMKNYWRQLLNAKLITQRKFDNLTKAERGGLSELDKAGFIKRQLVETRQITKHVAQILDSRMNTKYDENDKLIREVKVITLKSKLVSDFRKDFQFYKVREINNYHHAHDAYLNAVVGTALIKKYPKLESEFVYGDYKVYDVRKMIAKSEQEIGKATAKYFFYSNIMNFFKTEITLANGEIRKRPLIETNGETGEIVWDKGRDFATVRKVLSMPQVNIVKKTEVQTGGFSKESILPKRNSDKLIARKKDWDPKKYGGFDSPTVAYSVLVVAKVEKGKSKKLKSVKELLGITIMERSSFEKNPIDFLEAKGYKEVKKDLIIKLPKYSLFELENGRKRMLASAGELQKGNELALPSKYVNFLYLASHYEKLKGSPEDNEQKQLFVEQHKHYLDEIIEQISEFSKRVILADANLDKVLSAYNKHRDKPIREQAENIIHLFTLTNLGAPAAFKYFDTTIDRKRYTSTKEVLDATLIHQSITGLYETRIDLSQLGGDGGEAAAKPAPGGTLQLEEEYRLFEPESTQKQEMDIWLKNFPQAWAETGGMGTAHCQAPVLIQLKATATPISIRQYPMPHEAYQGIKPHIRRMLDQGILKPCQSPWNTPLLPVKKPGTEDYRPVQDLREVNKRVEDIHPTVPNPYNLLSTLPPSHPWYTVLDLKDAFFCLRLHSESQLLFAFEWRDPEIGLSGQLTWTRLPQGFKNSPTLFNEALHSDLADFRVRYPALVLLQYVDDLLLAAATRTECLEGTKALLETLGNKGYRASAKKAQICLQEVTYLGYSLKDGQRWLTKARKEAILSIPVPKNSRQVREFLGKAGYCRLFIPGFAELAAPLYPLTRPGTLFQWGTEQQLAFEDIKKALLSSPALGLPDITKPFELFIDENSGFAKGVLVQKLGPWKRPVAYLSKKLDTVASGWPPCLRMVAAIAILVKDAGKLTLGQPLTILTSHPVEALVRQPPNKWLSNARMTHYQAMLLDAERVHFGPTVSLNPATLLPLPSGGNHHDCLQILAETHGTRPDLTDQPLPDADLTWYTDGSSFIRNGEREAGAAVTTESEVIWAAPLPPGTSAQRAELIALTQALKMAEGKKLTVYTDSRYAFATTHVHGEIYRRRGWLTSEGKEIKNKNEILALLEALFLPKRLSIIHCPGHQKGDSPQAKGNRLADDTAKKAATETHSSLTVLPAGKRTADGSEFEKRTADGSEFESPKKKAKVE

SEQ ID NO: 1268 - protein, 2093 aa, synthetic construct
MPAAKRVKLDGGDKKYSIGLDIGTNSVGWAVITDEYKVPSKKFKVLGNTDRHSIKKNLIGALLFDSGETAEATRLKRTARRRYTRRKNRICYLQEIFSNEMAKVDDSFFHRLEESFLVEEDKKHERHPIFGNIVDEVAYHEKYPTIYHLRKKLVDSTDKADLRLIYLALAHMIKFRGHFLIEGDLNPDNSDVDKLFIQLVQTYNQLFEENPINASGVDAKAILSARLSKSRRLENLIAQLPGEKKNGLFGNLIALSLGLTPNFKSNFDLAEDAKLQLSKDTYDDDLDNLLAQIGDQYADLFLAAKNLSDAILLSDILRVNTEITKAPLSASMIKRYDEHHQDLTLLKALVRQQLPEKYKEIFFDQSKNGYAGYIDGGASQEEFYKFIKPILEKMDGTEELLVKLNREDLLRKQRTFDNGSIPHQIHLGELHAILRRQEDFYPFLKDNREKIEKILTFRIPYYVGPLARGNSRFAWMTRKSEETITPWNFEEVVDKGASAQSFIERMTNFDKNLPNEKVLPKHSLLYEYFTVYNELTKVKYVTEGMRKPAFLSGEQKKAIVDLLFKTNRKVTVKQLKEDYFKKIECFDSVEISGVEDRFNASLGTYHDLLKIIKDKDFLDNEENEDILEDIVLTLTLFEDREMIEERLKTYAHLFDDKVMKQLKRRRYTGWGRLSRKLINGIRDKQSGKTILDFLKSDGFANRNFMQLIHDDSLTFKEDIQKAQVSGQGDSLHEHIANLAGSPAIKKGILQTVKVVDELVKVMGRHKPENIVIEMARENQTTQKGQKNSRERMKRIEEGIKELGSQILKEHPVENTQLQNEKLYLYYLQNGRDMYVDQELDINRLSDYDVDHIVPQSFLKDDSIDNKVLTRSDKARGKSDNVPSEEVVKKMKNYWRQLLNAKLITQRKFDNLTKAERGGLSELDKAGFIKRQLVETRQITKHVAQILDSRMNTKYDENDKLIREVKVITLKSKLVSDFRKDFQFYKVREINNYHHAHDAYLNAVVGTALIKKYPKLESEFVYGDYKVYDVRKMIAKSEQEIGKATAKYFFYSNIMNFFKTEITLANGEIRKRPLIETNGETGEIVWDKGRDFATVRKVLSMPQVNIVKKTEVQTGGFSKESILPKRNSDKLIARKKDWDPKKYGGFDSPTVAYSVLVVAKVEKGKSKKLKSVKELLGITIMERSSFEKNPIDFLEAKGYKEVKKDLIIKLPKYSLFELENGRKRMLASAGELQKGNELALPSKYVNFLYLASHYEKLKGSPEDNEQKQLFVEQHKHYLDEIIEQISEFSKRVILADANLDKVLSAYNKHRDKPIREQAENIIHLFTLTNLGAPAAFKYFDTTIDRKRYTSTKEVLDATLIHQSITGLYETRIDLSQLGGDGGGGGPAPGGSGGTLQLEEEYRLFEPESTQKQEMDIWLKNFPQAWAETGGMGTAHCQAPVLIQLKATATPISIRQYPMPHEAYQGIKPHIRRMLDQGILKPCQSPWNTPLLPVKKPGTEDYRPVQDLREVNKRVEDIHPTVPNPYNLLSTLPPSHPWYTVLDLKDAFFCLRLHSESQLLFAFEWRDPEIGLSGQLTWTRLPQGFKNSPTLFNEALHSDLADFRVRYPALVLLQYVDDLLLAAATRTECLEGTKALLETLGNKGYRASAKKAQICLQEVTYLGYSLKDGQRWLTKARKEAILSIPVPKNSRQVREFLGKAGYCRLFIPGFAELAAPLYPLTRPGTLFQWGTEQQLAFEDIKKALLSSPALGLPDITKPFELFIDENSGFAKGVLVQKLGPWKRPVAYLSKKLDTVASGWPPCLRMVAAIAILVKDAGKLTLGQPLTILTSHPVEALVRQPPNKWLSNARMTHYQAMLLDAERVHFGPTVSLNPATLLPLPSGGNHHDCLQILAETHGTRPDLTDQPLPDADLTWYTDGSSFIRNGEREAGAAVTTESEVIWAAPLPPGTSAQRAELIALTQALKMAEGKKLTVYTDSRYAFATTHVHGEIYRRRGWLTSEGKEIKNKNEILALLEALFLPKRLSIIHCPGHQKGDSPQAKGNRLADDTAKKAATETHSSLTVLPAGKRTADGSEFEKRTADGSEFESPKKKAKVE

SEQ ID NO: 1269 - protein, 2095 aa, synthetic construct
MPAAKRVKLDGGDKKYSIGLDIGTNSVGWAVITDEYKVPSKKFKVLGNTDRHSIKKNLIGALLFDSGETAEATRLKRTARRRYTRRKNRICYLQEIFSNEMAKVDDSFFHRLEESFLVEEDKKHERHPIFGNIVDEVAYHEKYPTIYHLRKKLVDSTDKADLRLIYLALAHMIKFRGHFLIEGDLNPDNSDVDKLFIQLVQTYNQLFEENPINASGVDAKAILSARLSKSRRLENLIAQLPGEKKNGLFGNLIALSLGLTPNFKSNFDLAEDAKLQLSKDTYDDDLDNLLAQIGDQYADLFLAAKNLSDAILLSDILRVNTEITKAPLSASMIKRYDEHHQDLTLLKALVRQQLPEKYKEIFFDQSKNGYAGYIDGGASQEEFYKFIKPILEKMDGTEELLVKLNREDLLRKQRTFDNGSIPHQIHLGELHAILRRQEDFYPFLKDNREKIEKILTFRIPYYVGPLARGNSRFAWMTRKSEETITPWNFEEVVDKGASAQSFIERMTNFDKNLPNEKVLPKHSLLYEYFTVYNELTKVKYVTEGMRKPAFLSGEQKKAIVDLLFKTNRKVTVKQLKEDYFKKIECFDSVEISGVEDRFNASLGTYHDLLKIIKDKDFLDNEENEDILEDIVLTLTLFEDREMIEERLKTYAHLFDDKVMKQLKRRRYTGWGRLSRKLINGIRDKQSGKTILDFLKSDGFANRNFMQLIHDDSLTFKEDIQKAQVSGQGDSLHEHIANLAGSPAIKKGILQTVKVVDELVKVMGRHKPENIVIEMARENQTTQKGQKNSRERMKRIEEGIKELGSQILKEHPVENTQLQNEKLYLYYLQNGRDMYVDQELDINRLSDYDVDHIVPQSFLKDDSIDNKVLTRSDKARGKSDNVPSEEVVKKMKNYWRQLLNAKLITQRKFDNLTKAERGGLSELDKAGFIKRQLVETRQITKHVAQILDSRMNTKYDENDKLIREVKVITLKSKLVSDFRKDFQFYKVREINNYHHAHDAYLNAVVGTALIKKYPKLESEFVYGDYKVYDVRKMIAKSEQEIGKATAKYFFYSNIMNFFKTEITLANGEIRKRPLIETNGETGEIVWDKGRDFATVRKVLSMPQVNIVKKTEVQTGGFSKESILPKRNSDKLIARKKDWDPKKYGGFDSPTVAYSVLVVAKVEKGKSKKLKSVKELLGITIMERSSFEKNPIDFLEAKGYKEVKKDLIIKLPKYSLFELENGRKRMLASAGELQKGNELALPSKYVNFLYLASHYEKLKGSPEDNEQKQLFVEQHKHYLDEIIEQISEFSKRVILADANLDKVLSAYNKHRDKPIREQAENIIHLFTLTNLGAPAAFKYFDTTIDRKRYTSTKEVLDATLIHQSITGLYETRIDLSQLGGDGGGGSGGGEAAAKGGTLQLEEEYRLFEPESTQKQEMDIWLKNFPQAWAETGGMGTAHCQAPVLIQLKATATPISIRQYPMPHEAYQGIKPHIRRMLDQGILKPCQSPWNTPLLPVKKPGTEDYRPVQDLREVNKRVEDIHPTVPNPYNLLSTLPPSHPWYTVLDLKDAFFCLRLHSESQLLFAFEWRDPEIGLSGQLTWTRLPQGFKNSPTLFNEALHSDLADFRVRYPALVLLQYVDDLLLAAATRTECLEGTKALLETLGNKGYRASAKKAQICLQEVTYLGYSLKDGQRWLTKARKEAILSIPVPKNSRQVREFLGKAGYCRLFIPGFAELAAPLYPLTRPGTLFQWGTEQQLAFEDIKKALLSSPALGLPDITKPFELFIDENSGFAKGVLVQKLGPWKRPVAYLSKKLDTVASGWPPCLRMVAAIAILVKDAGKLTLGQPLTILTSHPVEALVRQPPNKWLSNARMTHYQAMLLDAERVHFGPTVSLNPATLLPLPSGGNHHDCLQILAETHGTRPDLTDQPLPDADLTWYTDGSSFIRNGEREAGAAVTTESEVIWAAPLPPGTSAQRAELIALTQALKMAEGKKLTVYTDSRYAFATTHVHGEIYRRRGWLTSEGKEIKNKNEILALLEALFLPKRLSIIHCPGHQKGDSPQAKGNRLADDTAKKAATETHSSLTVLPAGKRTADGSEFEKRTADGSEFESPKKKAKVE

SEQ ID NO: 1270 - protein, 2093 aa, synthetic construct
MPAAKRVKLDGGDKKYSIGLDIGTNSVGWAVITDEYKVPSKKFKVLGNTDRHSIKKNLIGALLFDSGETAEATRLKRTARRRYTRRKNRICYLQEIFSNEMAKVDDSFFHRLEESFLVEEDKKHERHPIFGNIVDEVAYHEKYPTIYHLRKKLVDSTDKADLRLIYLALAHMIKFRGHFLIEGDLNPDNSDVDKLFIQLVQTYNQLFEENPINASGVDAKAILSARLSKSRRLENLIAQLPGEKKNGLFGNLIALSLGLTPNFKSNFDLAEDAKLQLSKDTYDDDLDNLLAQIGDQYADLFLAAKNLSDAILLSDILRVNTEITKAPLSASMIKRYDEHHQDLTLLKALVRQQLPEKYKEIFFDQSKNGYAGYIDGGASQEEFYKFIKPILEKMDGTEELLVKLNREDLLRKQRTFDNGSIPHQIHLGELHAILRRQEDFYPFLKDNREKIEKILTFRIPYYVGPLARGNSRFAWMTRKSEETITPWNFEEVVDKGASAQSFIERMTNFDKNLPNEKVLPKHSLLYEYFTVYNELTKVKYVTEGMRKPAFLSGEQKKAIVDLLFKTNRKVTVKQLKEDYFKKIECFDSVEISGVEDRFNASLGTYHDLLKIIKDKDFLDNEENEDILEDIVLTLTLFEDREMIEERLKTYAHLFDDKVMKQLKRRRYTGWGRLSRKLINGIRDKQSGKTILDFLKSDGFANRNFMQLIHDDSLTFKEDIQKAQVSGQGDSLHEHIANLAGSPAIKKGILQTVKVVDELVKVMGRHKPENIVIEMARENQTTQKGQKNSRERMKRIEEGIKELGSQILKEHPVENTQLQNEKLYLYYLQNGRDMYVDQELDINRLSDYDVDHIVPQSFLKDDSIDNKVLTRSDKARGKSDNVPSEEVVKKMKNYWRQLLNAKLITQRKFDNLTKAERGGLSELDKAGFIKRQLVETRQITKHVAQILDSRMNTKYDENDKLIREVKVITLKSKLVSDFRKDFQFYKVREINNYHHAHDAYLNAVVGTALIKKYPKLESEFVYGDYKVYDVRKMIAKSEQEIGKATAKYFFYSNIMNFFKTEITLANGEIRKRPLIETNGETGEIVWDKGRDFATVRKVLSMPQVNIVKKTEVQTGGFSKESILPKRNSDKLIARKKDWDPKKYGGFDSPTVAYSVLVVAKVEKGKSKKLKSVKELLGITIMERSSFEKNPIDFLEAKGYKEVKKDLIIKLPKYSLFELENGRKRMLASAGELQKGNELALPSKYVNFLYLASHYEKLKGSPEDNEQKQLFVEQHKHYLDEIIEQISEFSKRVILADANLDKVLSAYNKHRDKPIREQAENIIHLFTLTNLGAPAAFKYFDTTIDRKRYTSTKEVLDATLIHQSITGLYETRIDLSQLGGDGGGGSGSSGGGGGTLQLEEEYRLFEPESTQKQEMDIWLKNFPQAWAETGGMGTAHCQAPVLIQLKATATPISIRQYPMPHEAYQGIKPHIRRMLDQGILKPCQSPWNTPLLPVKKPGTEDYRPVQDLREVNKRVEDIHPTVPNPYNLLSTLPPSHPWYTVLDLKDAFFCLRLHSESQLLFAFEWRDPEIGLSGQLTWTRLPQGFKNSPTLFNEALHSDLADFRVRYPALVLLQYVDDLLLAAATRTECLEGTKALLETLGNKGYRASAKKAQICLQEVTYLGYSLKDGQRWLTKARKEAILSIPVPKNSRQVREFLGKAGYCRLFIPGFAELAAPLYPLTRPGTLFQWGTEQQLAFEDIKKALLSSPALGLPDITKPFELFIDENSGFAKGVLVQKLGPWKRPVAYLSKKLDTVASGWPPCLRMVAAIAILVKDAGKLTLGQPLTILTSHPVEALVRQPPNKWLSNARMTHYQAMLLDAERVHFGPTVSLNPATLLPLPSGGNHHDCLQILAETHGTRPDLTDQPLPDADLTWYTDGSSFIRNGEREAGAAVTTESEVIWAAPLPPGTSAQRAELIALTQALKMAEGKKLTVYTDSRYAFATTHVHGEIYRRRGWLTSEGKEIKNKNEILALLEALFLPKRLSIIHCPGHQKGDSPQAKGNRLADDTAKKAATETHSSLTVLPAGKRTADGSEFEKRTADGSEFESPKKKAKVE

SEQ ID NO: 1271 - protein, 2092 aa, synthetic construct
MPAAKRVKLDGGDKKYSIGLDIGTNSVGWAVITDEYKVPSKKFKVLGNTDRHSIKKNLIGALLFDSGETAEATRLKRTARRRYTRRKNRICYLQEIFSNEMAKVDDSFFHRLEESFLVEEDKKHERHPIFGNIVDEVAYHEKYPTIYHLRKKLVDSTDKADLRLIYLALAHMIKFRGHFLIEGDLNPDNSDVDKLFIQLVQTYNQLFEENPINASGVDAKAILSARLSKSRRLENLIAQLPGEKKNGLFGNLIALSLGLTPNFKSNFDLAEDAKLQLSKDTYDDDLDNLLAQIGDQYADLFLAAKNLSDAILLSDILRVNTEITKAPLSASMIKRYDEHHQDLTLLKALVRQQLPEKYKEIFFDQSKNGYAGYIDGGASQEEFYKFIKPILEKMDGTEELLVKLNREDLLRKQRTFDNGSIPHQIHLGELHAILRRQEDFYPFLKDNREKIEKILTFRIPYYVGPLARGNSRFAWMTRKSEETITPWNFEEVVDKGASAQSFIERMTNFDKNLPNEKVLPKHSLLYEYFTVYNELTKVKYVTEGMRKPAFLSGEQKKAIVDLLFKTNRKVTVKQLKEDYFKKIECFDSVEISGVEDRFNASLGTYHDLLKIIKDKDFLDNEENEDILEDIVLTLTLFEDREMIEERLKTYAHLFDDKVMKQLKRRRYTGWGRLSRKLINGIRDKQSGKTILDFLKSDGFANRNFMQLIHDDSLTFKEDIQKAQVSGQGDSLHEHIANLAGSPAIKKGILQTVKVVDELVKVMGRHKPENIVIEMARENQTTQKGQKNSRERMKRIEEGIKELGSQILKEHPVENTQLQNEKLYLYYLQNGRDMYVDQELDINRLSDYDVDHIVPQSFLKDDSIDNKVLTRSDKARGKSDNVPSEEVVKKMKNYWRQLLNAKLITQRKFDNLTKAERGGLSELDKAGFIKRQLVETRQITKHVAQILDSRMNTKYDENDKLIREVKVITLKSKLVSDFRKDFQFYKVREINNYHHAHDAYLNAVVGTALIKKYPKLESEFVYGDYKVYDVRKMIAKSEQEIGKATAKYFFYSNIMNFFKTEITLANGEIRKRPLIETNGETGEIVWDKGRDFATVRKVLSMPQVNIVKKTEVQTGGFSKESILPKRNSDKLIARKKDWDPKKYGGFDSPTVAYSVLVVAKVEKGKSKKLKSVKELLGITIMERSSFEKNPIDFLEAKGYKEVKKDLIIKLPKYSLFELENGRKRMLASAGELQKGNELALPSKYVNFLYLASHYEKLKGSPEDNEQKQLFVEQHKHYLDEIIEQISEFSKRVILADANLDKVLSAYNKHRDKPIREQAENIIHLFTLTNLGAPAAFKYFDTTIDRKRYTSTKEVLDATLIHQSITGLYETRIDLSQLGGDGGEAAAKGGGGGTLQLEEEYRLFEPESTQKQEMDIWLKNFPQAWAETGGMGTAHCQAPVLIQLKATATPISIRQYPMPHEAYQGIKPHIRRMLDQGILKPCQSPWNTPLLPVKKPGTEDYRPVQDLREVNKRVEDIHPTVPNPYNLLSTLPPSHPWYTVLDLKDAFFCLRLHSESQLLFAFEWRDPEIGLSGQLTWTRLPQGFKNSPTLFNEALHSDLADFRVRYPALVLLQYVDDLLLAAATRTECLEGTKALLETLGNKGYRASAKKAQICLQEVTYLGYSLKDGQRWLTKARKEAILSIPVPKNSRQVREFLGKAGYCRLFIPGFAELAAPLYPLTRPGTLFQWGTEQQLAFEDIKKALLSSPALGLPDITKPFELFIDENSGFAKGVLVQKLGPWKRPVAYLSKKLDTVASGWPPCLRMVAAIAILVKDAGKLTLGQPLTILTSHPVEALVRQPPNKWLSNARMTHYQAMLLDAERVHFGPTVSLNPATLLPLPSGGNHHDCLQILAETHGTRPDLTDQPLPDADLTWYTDGSSFIRNGEREAGAAVTTESEVIWAAPLPPGTSAQRAELIALTQALKMAEGKKLTVYTDSRYAFATTHVHGEIYRRRGWLTSEGKEIKNKNEILALLEALFLPKRLSIIHCPGHQKGDSPQAKGNRLADDTAKKAATETHSSLTVLPAGKRTADGSEFEKRTADGSEFESPKKKAKVE

SEQ ID NO: 1272 - protein, 2090 aa, synthetic construct
MPAAKRVKLDGGDKKYSIGLDIGTNSVGWAVITDEYKVPSKKFKVLGNTDRHSIKKNLIGALLFDSGETAEATRLKRTARRRYTRRKNRICYLQEIFSNEMAKVDDSFFHRLEESFLVEEDKKHERHPIFGNIVDEVAYHEKYPTIYHLRKKLVDSTDKADLRLIYLALAHMIKFRGHFLIEGDLNPDNSDVDKLFIQLVQTYNQLFEENPINASGVDAKAILSARLSKSRRLENLIAQLPGEKKNGLFGNLIALSLGLTPNFKSNFDLAEDAKLQLSKDTYDDDLDNLLAQIGDQYADLFLAAKNLSDAILLSDILRVNTEITKAPLSASMIKRYDEHHQDLTLLKALVRQQLPEKYKEIFFDQSKNGYAGYIDGGASQEEFYKFIKPILEKMDGTEELLVKLNREDLLRKQRTFDNGSIPHQIHLGELHAILRRQEDFYPFLKDNREKIEKILTFRIPYYVGPLARGNSRFAWMTRKSEETITPWNFEEVVDKGASAQSFIERMTNFDKNLPNEKVLPKHSLLYEYFTVYNELTKVKYVTEGMRKPAFLSGEQKKAIVDLLFKTNRKVTVKQLKEDYFKKIECFDSVEISGVEDRFNASLGTYHDLLKIIKDKDFLDNEENEDILEDIVLTLTLFEDREMIEERLKTYAHLFDDKVMKQLKRRRYTGWGRLSRKLINGIRDKQSGKTILDFLKSDGFANRNFMQLIHDDSLTFKEDIQKAQVSGQGDSLHEHIANLAGSPAIKKGILQTVKVVDELVKVMGRHKPENIVIEMARENQTTQKGQKNSRERMKRIEEGIKELGSQILKEHPVENTQLQNEKLYLYYLQNGRDMYVDQELDINRLSDYDVDHIVPQSFLKDDSIDNKVLTRSDKARGKSDNVPSEEVVKKMKNYWRQLLNAKLITQRKFDNLTKAERGGLSELDKAGFIKRQLVETRQITKHVAQILDSRMNTKYDENDKLIREVKVITLKSKLVSDFRKDFQFYKVREINNYHHAHDAYLNAVVGTALIKKYPKLESEFVYGDYKVYDVRKMIAKSEQEIGKATAKYFFYSNIMNFFKTEITLANGEIRKRPLIETNGETGEIVWDKGRDFATVRKVLSMPQVNIVKKTEVQTGGFSKESILPKRNSDKLIARKKDWDPKKYGGFDSPTVAYSVLVVAKVEKGKSKKLKSVKELLGITIMERSSFEKNPIDFLEAKGYKEVKKDLIIKLPKYSLFELENGRKRMLASAGELQKGNELALPSKYVNFLYLASHYEKLKGSPEDNEQKQLFVEQHKHYLDEIIEQISEFSKRVILADANLDKVLSAYNKHRDKPIREQAENIIHLFTLTNLGAPAAFKYFDTTIDRKRYTSTKEVLDATLIHQSITGLYETRIDLSQLGGDGGGGGGSSGGTLQLEEEYRLFEPESTQKQEMDIWLKNFPQAWAETGGMGTAHCQAPVLIQLKATATPISIRQYPMPHEAYQGIKPHIRRMLDQGILKPCQSPWNTPLLPVKKPGTEDYRPVQDLREVNKRVEDIHPTVPNPYNLLSTLPPSHPWYTVLDLKDAFFCLRLHSESQLLFAFEWRDPEIGLSGQLTWTRLPQGFKNSPTLFNEALHSDLADFRVRYPALVLLQYVDDLLLAAATRTECLEGTKALLETLGNKGYRASAKKAQICLQEVTYLGYSLKDGQRWLTKARKEAILSIPVPKNSRQVREFLGKAGYCRLFIPGFAELAAPLYPLTRPGTLFQWGTEQQLAFEDIKKALLSSPALGLPDITKPFELFIDENSGFAKGVLVQKLGPWKRPVAYLSKKLDTVASGWPPCLRMVAAIAILVKDAGKLTLGQPLTILTSHPVEALVRQPPNKWLSNARMTHYQAMLLDAERVHFGPTVSLNPATLLPLPSGGNHHDCLQILAETHGTRPDLTDQPLPDADLTWYTDGSSFIRNGEREAGAAVTTESEVIWAAPLPPGTSAQRAELIALTQALKMAEGKKLTVYTDSRYAFATTHVHGEIYRRRGWLTSEGKEIKNKNEILALLEALFLPKRLSIIHCPGHQKGDSPQAKGNRLADDTAKKAATETHSSLTVLPAGKRTADGSEFEKRTADGSEFESPKKKAKVE

SEQ ID NO: 1273 - protein, 2089 aa, synthetic construct
MPAAKRVKLDGGDKKYSIGLDIGTNSVGWAVITDEYKVPSKKFKVLGNTDRHSIKKNLIGALLFDSGETAEATRLKRTARRRYTRRKNRICYLQEIFSNEMAKVDDSFFHRLEESFLVEEDKKHERHPIFGNIVDEVAYHEKYPTIYHLRKKLVDSTDKADLRLIYLALAHMIKFRGHFLIEGDLNPDNSDVDKLFIQLVQTYNQLFEENPINASGVDAKAILSARLSKSRRLENLIAQLPGEKKNGLFGNLIALSLGLTPNFKSNFDLAEDAKLQLSKDTYDDDLDNLLAQIGDQYADLFLAAKNLSDAILLSDILRVNTEITKAPLSASMIKRYDEHHQDLTLLKALVRQQLPEKYKEIFFDQSKNGYAGYIDGGASQEEFYKFIKPILEKMDGTEELLVKLNREDLLRKQRTFDNGSIPHQIHLGELHAILRRQEDFYPFLKDNREKIEKILTFRIPYYVGPLARGNSRFAWMTRKSEETITPWNFEEVVDKGASAQSFIERMTNFDKNLPNEKVLPKHSLLYEYFTVYNELTKVKYVTEGMRKPAFLSGEQKKAIVDLLFKTNRKVTVKQLKEDYFKKIECFDSVEISGVEDRFNASLGTYHDLLKIIKDKDFLDNEENEDILEDIVLTLTLFEDREMIEERLKTYAHLFDDKVMKQLKRRRYTGWGRLSRKLINGIRDKQSGKTILDFLKSDGFANRNFMQLIHDDSLTFKEDIQKAQVSGQGDSLHEHIANLAGSPAIKKGILQTVKVVDELVKVMGRHKPENIVIEMARENQTTQKGQKNSRERMKRIEEGIKELGSQILKEHPVENTQLQNEKLYLYYLQNGRDMYVDQELDINRLSDYDVDHIVPQSFLKDDSIDNKVLTRSDKARGKSDNVPSEEVVKKMKNYWRQLLNAKLITQRKFDNLTKAERGGLSELDKAGFIKRQLVETRQITKHVAQILDSRMNTKYDENDKLIREVKVITLKSKLVSDFRKDFQFYKVREINNYHHAHDAYLNAVVGTALIKKYPKLESEFVYGDYKVYDVRKMIAKSEQEIGKATAKYFFYSNIMNFFKTEITLANGEIRKRPLIETNGETGEIVWDKGRDFATVRKVLSMPQVNIVKKTEVQTGGFSKESILPKRNSDKLIARKKDWDPKKYGGFDSPTVAYSVLVVAKVEKGKSKKLKSVKELLGITIMERSSFEKNPIDFLEAKGYKEVKKDLIIKLPKYSLFELENGRKRMLASAGELQKGNELALPSKYVNFLYLASHYEKLKGSPEDNEQKQLFVEQHKHYLDEIIEQISEFSKRVILADANLDKVLSAYNKHRDKPIREQAENIIHLFTLTNLGAPAAFKYFDTTIDRKRYTSTKEVLDATLIHQSITGLYETRIDLSQLGGDGGGGGGSGGTLQLEEEYRLFEPESTQKQEMDIWLKNFPQAWAETGGMGTAHCQAPVLIQLKATATPISIRQYPMPHEAYQGIKPHIRRMLDQGILKPCQSPWNTPLLPVKKPGTEDYRPVQDLREVNKRVEDIHPTVPNPYNLLSTLPPSHPWYTVLDLKDAFFCLRLHSESQLLFAFEWRDPEIGLSGQLTWTRLPQGFKNSPTLFNEALHSDLADFRVRYPALVLLQYVDDLLLAAATRTECLEGTKALLETLGNKGYRASAKKAQICLQEVTYLGYSLKDGQRWLTKARKEAILSIPVPKNSRQVREFLGKAGYCRLFIPGFAELAAPLYPLTRPGTLFQWGTEQQLAFEDIKKALLSSPALGLPDITKPFELFIDENSGFAKGVLVQKLGPWKRPVAYLSKKLDTVASGWPPCLRMVAAIAILVKDAGKLTLGQPLTILTSHPVEALVRQPPNKWLSNARMTHYQAMLLDAERVHFGPTVSLNPATLLPLPSGGNHHDCLQILAETHGTRPDLTDQPLPDADLTWYTDGSSFIRNGEREAGAAVTTESEVIWAAPLPPGTSAQRAELIALTQALKMAEGKKLTVYTDSRYAFATTHVHGEIYRRRGWLTSEGKEIKNKNEILALLEALFLPKRLSIIHCPGHQKGDSPQAKGNRLADDTAKKAATETHSSLTVLPAGKRTADGSEFEKRTADGSEFESPKKKAKVE

SEQ ID NO: 1274 - protein, 2099 aa, synthetic construct
MPAAKRVKLDGGDKKYSIGLDIGTNSVGWAVITDEYKVPSKKFKVLGNTDRHSIKKNLIGALLFDSGETAEATRLKRTARRRYTRRKNRICYLQEIFSNEMAKVDDSFFHRLEESFLVEEDKKHERHPIFGNIVDEVAYHEKYPTIYHLRKKLVDSTDKADLRLIYLALAHMIKFRGHFLIEGDLNPDNSDVDKLFIQLVQTYNQLFEENPINASGVDAKAILSARLSKSRRLENLIAQLPGEKKNGLFGNLIALSLGLTPNFKSNFDLAEDAKLQLSKDTYDDDLDNLLAQIGDQYADLFLAAKNLSDAILLSDILRVNTEITKAPLSASMIKRYDEHHQDLTLLKALVRQQLPEKYKEIFFDQSKNGYAGYIDGGASQEEFYKFIKPILEKMDGTEELLVKLNREDLLRKQRTFDNGSIPHQIHLGELHAILRRQEDFYPFLKDNREKIEKILTFRIPYYVGPLARGNSRFAWMTRKSEETITPWNFEEVVDKGASAQSFIERMTNFDKNLPNEKVLPKHSLLYEYFTVYNELTKVKYVTEGMRKPAFLSGEQKKAIVDLLFKTNRKVTVKQLKEDYFKKIECFDSVEISGVEDRFNASLGTYHDLLKIIKDKDFLDNEENEDILEDIVLTLTLFEDREMIEERLKTYAHLFDDKVMKQLKRRRYTGWGRLSRKLINGIRDKQSGKTILDFLKSDGFANRNFMQLIHDDSLTFKEDIQKAQVSGQGDSLHEHIANLAGSPAIKKGILQTVKVVDELVKVMGRHKPENIVIEMARENQTTQKGQKNSRERMKRIEEGIKELGSQILKEHPVENTQLQNEKLYLYYLQNGRDMYVDQELDINRLSDYDVDHIVPQSFLKDDSIDNKVLTRSDKARGKSDNVPSEEVVKKMKNYWRQLLNAKLITQRKFDNLTKAERGGLSELDKAGFIKRQLVETRQITKHVAQILDSRMNTKYDENDKLIREVKVITLKSKLVSDFRKDFQFYKVREINNYHHAHDAYLNAVVGTALIKKYPKLESEFVYGDYKVYDVRKMIAKSEQEIGKATAKYFFYSNIMNFFKTEITLANGEIRKRPLIETNGETGEIVWDKGRDFATVRKVLSMPQVNIVKKTEVQTGGFSKESILPKRNSDKLIARKKDWDPKKYGGFDSPTVAYSVLVVAKVEKGKSKKLKSVKELLGITIMERSSFEKNPIDFLEAKGYKEVKKDLIIKLPKYSLFELENGRKRMLASAGELQKGNELALPSKYVNFLYLASHYEKLKGSPEDNEQKQLFVEQHKHYLDEIIEQISEFSKRVILADANLDKVLSAYNKHRDKPIREQAENIIHLFTLTNLGAPAAFKYFDTTIDRKRYTSTKEVLDATLIHQSITGLYETRIDLSQLGGDGGGSSGSSGSSGSSGSSGGTLQLEEEYRLFEPESTQKQEMDIWLKNFPQAWAETGGMGTAHCQAPVLIQLKATATPISIRQYPMPHEAYQGIKPHIRRMLDQGILKPCQSPWNTPLLPVKKPGTEDYRPVQDLREVNKRVEDIHPTVPNPYNLLSTLPPSHPWYTVLDLKDAFFCLRLHSESQLLFAFEWRDPEIGLSGQLTWTRLPQGFKNSPTLFNEALHSDLADFRVRYPALVLLQYVDDLLLAAATRTECLEGTKALLETLGNKGYRASAKKAQICLQEVTYLGYSLKDGQRWLTKARKEAILSIPVPKNSRQVREFLGKAGYCRLFIPGFAELAAPLYPLTRPGTLFQWGTEQQLAFEDIKKALLSSPALGLPDITKPFELFIDENSGFAKGVLVQKLGPWKRPVAYLSKKLDTVASGWPPCLRMVAAIAILVKDAGKLTLGQPLTILTSHPVEALVRQPPNKWLSNARMTHYQAMLLDAERVHFGPTVSLNPATLLPLPSGGNHHDCLQILAETHGTRPDLTDQPLPDADLTWYTDGSSFIRNGEREAGAAVTTESEVIWAAPLPPGTSAQRAELIALTQALKMAEGKKLTVYTDSRYAFATTHVHGEIYRRRGWLTSEGKEIKNKNEILALLEALFLPKRLSIIHCPGHQKGDSPQAKGNRLADDTAKKAATETHSSLTVLPAGKRTADGSEFEKRTADGSEFESPKKKAKVE

SEQ ID NO: 1275 - protein, 2093 aa, synthetic construct
MPAAKRVKLDGGDKKYSIGLDIGTNSVGWAVITDEYKVPSKKFKVLGNTDRHSIKKNLIGALLFDSGETAEATRLKRTARRRYTRRKNRICYLQEIFSNEMAKVDDSFFHRLEESFLVEEDKKHERHPIFGNIVDEVAYHEKYPTIYHLRKKLVDSTDKADLRLIYLALAHMIKFRGHFLIEGDLNPDNSDVDKLFIQLVQTYNQLFEENPINASGVDAKAILSARLSKSRRLENLIAQLPGEKKNGLFGNLIALSLGLTPNFKSNFDLAEDAKLQLSKDTYDDDLDNLLAQIGDQYADLFLAAKNLSDAILLSDILRVNTEITKAPLSASMIKRYDEHHQDLTLLKALVRQQLPEKYKEIFFDQSKNGYAGYIDGGASQEEFYKFIKPILEKMDGTEELLVKLNREDLLRKQRTFDNGSIPHQIHLGELHAILRRQEDFYPFLKDNREKIEKILTFRIPYYVGPLARGNSRFAWMTRKSEETITPWNFEEVVDKGASAQSFIERMTNFDKNLPNEKVLPKHSLLYEYFTVYNELTKVKYVTEGMRKPAFLSGEQKKAIVDLLFKTNRKVTVKQLKEDYFKKIECFDSVEISGVEDRFNASLGTYHDLLKIIKDKDFLDNEENEDILEDIVLTLTLFEDREMIEERLKTYAHLFDDKVMKQLKRRRYTGWGRLSRKLINGIRDKQSGKTILDFLKSDGFANRNFMQLIHDDSLTFKEDIQKAQVSGQGDSLHEHIANLAGSPAIKKGILQTVKVVDELVKVMGRHKPENIVIEMARENQTTQKGQKNSRERMKRIEEGIKELGSQILKEHPVENTQLQNEKLYLYYLQNGRDMYVDQELDINRLSDYDVDHIVPQSFLKDDSIDNKVLTRSDKARGKSDNVPSEEVVKKMKNYWRQLLNAKLITQRKFDNLTKAERGGLSELDKAGFIKRQLVETRQITKHVAQILDSRMNTKYDENDKLIREVKVITLKSKLVSDFRKDFQFYKVREINNYHHAHDAYLNAVVGTALIKKYPKLESEFVYGDYKVYDVRKMIAKSEQEIGKATAKYFFYSNIMNFFKTEITLANGEIRKRPLIETNGETGEIVWDKGRDFATVRKVLSMPQVNIVKKTEVQTGGFSKESILPKRNSDKLIARKKDWDPKKYGGFDSPTVAYSVLVVAKVEKGKSKKLKSVKELLGITIMERSSFEKNPIDFLEAKGYKEVKKDLIIKLPKYSLFELENGRKRMLASAGELQKGNELALPSKYVNFLYLASHYEKLKGSPEDNEQKQLFVEQHKHYLDEIIEQISEFSKRVILADANLDKVLSAYNKHRDKPIREQAENIIHLFTLTNLGAPAAFKYFDTTIDRKRYTSTKEVLDATLIHQSITGLYETRIDLSQLGGDGGGGSGGGGSSGGTLQLEEEYRLFEPESTQKQEMDIWLKNFPQAWAETGGMGTAHCQAPVLIQLKATATPISIRQYPMPHEAYQGIKPHIRRMLDQGILKPCQSPWNTPLLPVKKPGTEDYRPVQDLREVNKRVEDIHPTVPNPYNLLSTLPPSHPWYTVLDLKDAFFCLRLHSESQLLFAFEWRDPEIGLSGQLTWTRLPQGFKNSPTLFNEALHSDLADFRVRYPALVLLQYVDDLLLAAATRTECLEGTKALLETLGNKGYRASAKKAQICLQEVTYLGYSLKDGQRWLTKARKEAILSIPVPKNSRQVREFLGKAGYCRLFIPGFAELAAPLYPLTRPGTLFQWGTEQQLAFEDIKKALLSSPALGLPDITKPFELFIDENSGFAKGVLVQKLGPWKRPVAYLSKKLDTVASGWPPCLRMVAAIAILVKDAGKLTLGQPLTILTSHPVEALVRQPPNKWLSNARMTHYQAMLLDAERVHFGPTVSLNPATLLPLPSGGNHHDCLQILAETHGTRPDLTDQPLPDADLTWYTDGSSFIRNGEREAGAAVTTESEVIWAAPLPPGTSAQRAELIALTQALKMAEGKKLTVYTDSRYAFATTHVHGEIYRRRGWLTSEGKEIKNKNEILALLEALFLPKRLSIIHCPGHQKGDSPQAKGNRLADDTAKKAATETHSSLTVLPAGKRTADGSEFEKRTADGSEFESPKKKAKVE

SEQ ID NO: 1276 - protein, 2093 aa, synthetic construct
MPAAKRVKLDGGDKKYSIGLDIGTNSVGWAVITDEYKVPSKKFKVLGNTDRHSIKKNLIGALLFDSGETAEATRLKRTARRRYTRRKNRICYLQEIFSNEMAKVDDSFFHRLEESFLVEEDKKHERHPIFGNIVDEVAYHEKYPTIYHLRKKLVDSTDKADLRLIYLALAHMIKFRGHFLIEGDLNPDNSDVDKLFIQLVQTYNQLFEENPINASGVDAKAILSARLSKSRRLENLIAQLPGEKKNGLFGNLIALSLGLTPNFKSNFDLAEDAKLQLSKDTYDDDLDNLLAQIGDQYADLFLAAKNLSDAILLSDILRVNTEITKAPLSASMIKRYDEHHQDLTLLKALVRQQLPEKYKEIFFDQSKNGYAGYIDGGASQEEFYKFIKPILEKMDGTEELLVKLNREDLLRKQRTFDNGSIPHQIHLGELHAILRRQEDFYPFLKDNREKIEKILTFRIPYYVGPLARGNSRFAWMTRKSEETITPWNFEEVVDKGASAQSFIERMTNFDKNLPNEKVLPKHSLLYEYFTVYNELTKVKYVTEGMRKPAFLSGEQKKAIVDLLFKTNRKVTVKQLKEDYFKKIECFDSVEISGVEDRFNASLGTYHDLLKIIKDKDFLDNEENEDILEDIVLTLTLFEDREMIEERLKTYAHLFDDKVMKQLKRRRYTGWGRLSRKLINGIRDKQSGKTILDFLKSDGFANRNFMQLIHDDSLTFKEDIQKAQVSGQGDSLHEHIANLAGSPAIKKGILQTVKVVDELVKVMGRHKPENIVIEMARENQTTQKGQKNSRERMKRIEEGIKELGSQILKEHPVENTQLQNEKLYLYYLQNGRDMYVDQELDINRLSDYDVDHIVPQSFLKDDSIDNKVLTRSDKARGKSDNVPSEEVVKKMKNYWRQLLNAKLITQRKFDNLTKAERGGLSELDKAGFIKRQLVETRQITKHVAQILDSRMNTKYDENDKLIREVKVITLKSKLVSDFRKDFQFYKVREINNYHHAHDAYLNAVVGTALIKKYPKLESEFVYGDYKVYDVRKMIAKSEQEIGKATAKYFFYSNIMNFFKTEITLANGEIRKRPLIETNGETGEIVWDKGRDFATVRKVLSMPQVNIVKKTEVQTGGFSKESILPKRNSDKLIARKKDWDPKKYGGFDSPTVAYSVLVVAKVEKGKSKKLKSVKELLGITIMERSSFEKNPIDFLEAKGYKEVKKDLIIKLPKYSLFELENGRKRMLASAGELQKGNELALPSKYVNFLYLASHYEKLKGSPEDNEQKQLFVEQHKHYLDEIIEQISEFSKRVILADANLDKVLSAYNKHRDKPIREQAENIIHLFTLTNLGAPAAFKYFDTTIDRKRYTSTKEVLDATLIHQSITGLYETRIDLSQLGGDGGPAPGSSGGSGGTLQLEEEYRLFEPESTQKQEMDIWLKNFPQAWAETGGMGTAHCQAPVLIQLKATATPISIRQYPMPHEAYQGIKPHIRRMLDQGILKPCQSPWNTPLLPVKKPGTEDYRPVQDLREVNKRVEDIHPTVPNPYNLLSTLPPSHPWYTVLDLKDAFFCLRLHSESQLLFAFEWRDPEIGLSGQLTWTRLPQGFKNSPTLFNEALHSDLADFRVRYPALVLLQYVDDLLLAAATRTECLEGTKALLETLGNKGYRASAKKAQICLQEVTYLGYSLKDGQRWLTKARKEAILSIPVPKNSRQVREFLGKAGYCRLFIPGFAELAAPLYPLTRPGTLFQWGTEQQLAFEDIKKALLSSPALGLPDITKPFELFIDENSGFAKGVLVQKLGPWKRPVAYLSKKLDTVASGWPPCLRMVAAIAILVKDAGKLTLGQPLTILTSHPVEALVRQPPNKWLSNARMTHYQAMLLDAERVHFGPTVSLNPATLLPLPSGGNHHDCLQILAETHGTRPDLTDQPLPDADLTWYTDGSSFIRNGEREAGAAVTTESEVIWAAPLPPGTSAQRAELIALTQALKMAEGKKLTVYTDSRYAFATTHVHGEIYRRRGWLTSEGKEIKNKNEILALLEALFLPKRLSIIHCPGHQKGDSPQAKGNRLADDTAKKAATETHSSLTVLPAGKRTADGSEFEKRTADGSEFESPKKKAKVE

SEQ ID NO: 1277 - protein, 2093 aa, synthetic construct
MPAAKRVKLDGGDKKYSIGLDIGTNSVGWAVITDEYKVPSKKFKVLGNTDRHSIKKNLIGALLFDSGETAEATRLKRTARRRYTRRKNRICYLQEIFSNEMAKVDDSFFHRLEESFLVEEDKKHERHPIFGNIVDEVAYHEKYPTIYHLRKKLVDSTDKADLRLIYLALAHMIKFRGHFLIEGDLNPDNSDVDKLFIQLVQTYNQLFEENPINASGVDAKAILSARLSKSRRLENLIAQLPGEKKNGLFGNLIALSLGLTPNFKSNFDLAEDAKLQLSKDTYDDDLDNLLAQIGDQYADLFLAAKNLSDAILLSDILRVNTEITKAPLSASMIKRYDEHHQDLTLLKALVRQQLPEKYKEIFFDQSKNGYAGYIDGGASQEEFYKFIKPILEKMDGTEELLVKLNREDLLRKQRTFDNGSIPHQIHLGELHAILRRQEDFYPFLKDNREKIEKILTFRIPYYVGPLARGNSRFAWMTRKSEETITPWNFEEVVDKGASAQSFIERMTNFDKNLPNEKVLPKHSLLYEYFTVYNELTKVKYVTEGMRKPAFLSGEQKKAIVDLLFKTNRKVTVKQLKEDYFKKIECFDSVEISGVEDRFNASLGTYHDLLKIIKDKDFLDNEENEDILEDIVLTLTLFEDREMIEERLKTYAHLFDDKVMKQLKRRRYTGWGRLSRKLINGIRDKQSGKTILDFLKSDGFANRNFMQLIHDDSLTFKEDIQKAQVSGQGDSLHEHIANLAGSPAIKKGILQTVKVVDELVKVMGRHKPENIVIEMARENQTTQKGQKNSRERMKRIEEGIKELGSQILKEHPVENTQLQNEKLYLYYLQNGRDMYVDQELDINRLSDYDVDHIVPQSFLKDDSIDNKVLTRSDKARGKSDNVPSEEVVKKMKNYWRQLLNAKLITQRKFDNLTKAERGGLSELDKAGFIKRQLVETRQITKHVAQILDSRMNTKYDENDKLIREVKVITLKSKLVSDFRKDFQFYKVREINNYHHAHDAYLNAVVGTALIKKYPKLESEFVYGDYKVYDVRKMIAKSEQEIGKATAKYFFYSNIMNFFKTEITLANGEIRKRPLIETNGETGEIVWDKGRDFATVRKVLSMPQVNIVKKTEVQTGGFSKESILPKRNSDKLIARKKDWDPKKYGGFDSPTVAYSVLVVAKVEKGKSKKLKSVKELLGITIMERSSFEKNPIDFLEAKGYKEVKKDLIIKLPKYSLFELENGRKRMLASAGELQKGNELALPSKYVNFLYLASHYEKLKGSPEDNEQKQLFVEQHKHYLDEIIEQISEFSKRVILADANLDKVLSAYNKHRDKPIREQAENIIHLFTLTNLGAPAAFKYFDTTIDRKRYTSTKEVLDATLIHQSITGLYETRIDLSQLGGDGGPAPGGGGSSGGTLQLEEEYRLFEPESTQKQEMDIWLKNFPQAWAETGGMGTAHCQAPVLIQLKATATPISIRQYPMPHEAYQGIKPHIRRMLDQGILKPCQSPWNTPLLPVKKPGTEDYRPVQDLREVNKRVEDIHPTVPNPYNLLSTLPPSHPWYTVLDLKDAFFCLRLHSESQLLFAFEWRDPEIGLSGQLTWTRLPQGFKNSPTLFNEALHSDLADFRVRYPALVLLQYVDDLLLAAATRTECLEGTKALLETLGNKGYRASAKKAQICLQEVTYLGYSLKDGQRWLTKARKEAILSIPVPKNSRQVREFLGKAGYCRLFIPGFAELAAPLYPLTRPGTLFQWGTEQQLAFEDIKKALLSSPALGLPDITKPFELFIDENSGFAKGVLVQKLGPWKRPVAYLSKKLDTVASGWPPCLRMVAAIAILVKDAGKLTLGQPLTILTSHPVEALVRQPPNKWLSNARMTHYQAMLLDAERVHFGPTVSLNPATLLPLPSGGNHHDCLQILAETHGTRPDLTDQPLPDADLTWYTDGSSFIRNGEREAGAAVTTESEVIWAAPLPPGTSAQRAELIALTQALKMAEGKKLTVYTDSRYAFATTHVHGEIYRRRGWLTSEGKEIKNKNEILALLEALFLPKRLSIIHCPGHQKGDSPQAKGNRLADDTAKKAATETHSSLTVLPAGKRTADGSEFEKRTADGSEFESPKKKAKVE

SEQ ID NO: 1278 - protein, 2095 aa, synthetic construct
MPAAKRVKLDGGDKKYSIGLDIGTNSVGWAVITDEYKVPSKKFKVLGNTDRHSIKKNLIGALLFDSGETAEATRLKRTARRRYTRRKNRICYLQEIFSNEMAKVDDSFFHRLEESFLVEEDKKHERHPIFGNIVDEVAYHEKYPTIYHLRKKLVDSTDKADLRLIYLALAHMIKFRGHFLIEGDLNPDNSDVDKLFIQLVQTYNQLFEENPINASGVDAKAILSARLSKSRRLENLIAQLPGEKKNGLFGNLIALSLGLTPNFKSNFDLAEDAKLQLSKDTYDDDLDNLLAQIGDQYADLFLAAKNLSDAILLSDILRVNTEITKAPLSASMIKRYDEHHQDLTLLKALVRQQLPEKYKEIFFDQSKNGYAGYIDGGASQEEFYKFIKPILEKMDGTEELLVKLNREDLLRKQRTFDNGSIPHQIHLGELHAILRRQEDFYPFLKDNREKIEKILTFRIPYYVGPLARGNSRFAWMTRKSEETITPWNFEEVVDKGASAQSFIERMTNFDKNLPNEKVLPKHSLLYEYFTVYNELTKVKYVTEGMRKPAFLSGEQKKAIVDLLFKTNRKVTVKQLKEDYFKKIECFDSVEISGVEDRFNASLGTYHDLLKIIKDKDFLDNEENEDILEDIVLTLTLFEDREMIEERLKTYAHLFDDKVMKQLKRRRYTGWGRLSRKLINGIRDKQSGKTILDFLKSDGFANRNFMQLIHDDSLTFKEDIQKAQVSGQGDSLHEHIANLAGSPAIKKGILQTVKVVDELVKVMGRHKPENIVIEMARENQTTQKGQKNSRERMKRIEEGIKELGSQILKEHPVENTQLQNEKLYLYYLQNGRDMYVDQELDINRLSDYDVDHIVPQSFLKDDSIDNKVLTRSDKARGKSDNVPSEEVVKKMKNYWRQLLNAKLITQRKFDNLTKAERGGLSELDKAGFIKRQLVETRQITKHVAQILDSRMNTKYDENDKLIREVKVITLKSKLVSDFRKDFQFYKVREINNYHHAHDAYLNAVVGTALIKKYPKLESEFVYGDYKVYDVRKMIAKSEQEIGKATAKYFFYSNIMNFFKTEITLANGEIRKRPLIETNGETGEIVWDKGRDFATVRKVLSMPQVNIVKKTEVQTGGFSKESILPKRNSDKLIARKKDWDPKKYGGFDSPTVAYSVLVVAKVEKGKSKKLKSVKELLGITIMERSSFEKNPIDFLEAKGYKEVKKDLIIKLPKYSLFELENGRKRMLASAGELQKGNELALPSKYVNFLYLASHYEKLKGSPEDNEQKQLFVEQHKHYLDEIIEQISEFSKRVILADANLDKVLSAYNKHRDKPIREQAENIIHLFTLTNLGAPAAFKYFDTTIDRKRYTSTKEVLDATLIHQSITGLYETRIDLSQLGGDGGGGSEAAAKGSSGGTLQLEEEYRLFEPESTQKQEMDIWLKNFPQAWAETGGMGTAHCQAPVLIQLKATATPISIRQYPMPHEAYQGIKPHIRRMLDQGILKPCQSPWNTPLLPVKKPGTEDYRPVQDLREVNKRVEDIHPTVPNPYNLLSTLPPSHPWYTVLDLKDAFFCLRLHSESQLLFAFEWRDPEIGLSGQLTWTRLPQGFKNSPTLFNEALHSDLADFRVRYPALVLLQYVDDLLLAAATRTECLEGTKALLETLGNKGYRASAKKAQICLQEVTYLGYSLKDGQRWLTKARKEAILSIPVPKNSRQVREFLGKAGYCRLFIPGFAELAAPLYPLTRPGTLFQWGTEQQLAFEDIKKALLSSPALGLPDITKPFELFIDENSGFAKGVLVQKLGPWKRPVAYLSKKLDTVASGWPPCLRMVAAIAILVKDAGKLTLGQPLTILTSHPVEALVRQPPNKWLSNARMTHYQAMLLDAERVHFGPTVSLNPATLLPLPSGGNHHDCLQILAETHGTRPDLTDQPLPDADLTWYTDGSSFIRNGEREAGAAVTTESEVIWAAPLPPGTSAQRAELIALTQALKMAEGKKLTVYTDSRYAFATTHVHGEIYRRRGWLTSEGKEIKNKNEILALLEALFLPKRLSIIHCPGHQKGDSPQAKGNRLADDTAKKAATETHSSLTVLPAGKRTADGSEFEKRTADGSEFESPKKKAKVE

SEQ ID NO: 1279 - protein, 2095 aa, synthetic construct
MPAAKRVKLDGGDKKYSIGLDIGTNSVGWAVITDEYKVPSKKFKVLGNTDRHSIKKNLIGALLFDSGETAEATRLKRTARRRYTRRKNRICYLQEIFSNEMAKVDDSFFHRLEESFLVEEDKKHERHPIFGNIVDEVAYHEKYPTIYHLRKKLVDSTDKADLRLIYLALAHMIKFRGHFLIEGDLNPDNSDVDKLFIQLVQTYNQLFEENPINASGVDAKAILSARLSKSRRLENLIAQLPGEKKNGLFGNLIALSLGLTPNFKSNFDLAEDAKLQLSKDTYDDDLDNLLAQIGDQYADLFLAAKNLSDAILLSDILRVNTEITKAPLSASMIKRYDEHHQDLTLLKALVRQQLPEKYKEIFFDQSKNGYAGYIDGGASQEEFYKFIKPILEKMDGTEELLVKLNREDLLRKQRTFDNGSIPHQIHLGELHAILRRQEDFYPFLKDNREKIEKILTFRIPYYVGPLARGNSRFAWMTRKSEETITPWNFEEVVDKGASAQSFIERMTNFDKNLPNEKVLPKHSLLYEYFTVYNELTKVKYVTEGMRKPAFLSGEQKKAIVDLLFKTNRKVTVKQLKEDYFKKIECFDSVEISGVEDRFNASLGTYHDLLKIIKDKDFLDNEENEDILEDIVLTLTLFEDREMIEERLKTYAHLFDDKVMKQLKRRRYTGWGRLSRKLINGIRDKQSGKTILDFLKSDGFANRNFMQLIHDDSLTFKEDIQKAQVSGQGDSLHEHIANLAGSPAIKKGILQTVKVVDELVKVMGRHKPENIVIEMARENQTTQKGQKNSRERMKRIEEGIKELGSQILKEHPVENTQLQNEKLYLYYLQNGRDMYVDQELDINRLSDYDVDHIVPQSFLKDDSIDNKVLTRSDKARGKSDNVPSEEVVKKMKNYWRQLLNAKLITQRKFDNLTKAERGGLSELDKAGFIKRQLVETRQITKHVAQILDSRMNTKYDENDKLIREVKVITLKSKLVSDFRKDFQFYKVREINNYHHAHDAYLNAVVGTALIKKYPKLESEFVYGDYKVYDVRKMIAKSEQEIGKATAKYFFYSNIMNFFKTEITLANGEIRKRPLIETNGETGEIVWDKGRDFATVRKVLSMPQVNIVKKTEVQTGGFSKESILPKRNSDKLIARKKDWDPKKYGGFDSPTVAYSVLVVAKVEKGKSKKLKSVKELLGITIMERSSFEKNPIDFLEAKGYKEVKKDLIIKLPKYSLFELENGRKRMLASAGELQKGNELALPSKYVNFLYLASHYEKLKGSPEDNEQKQLFVEQHKHYLDEIIEQISEFSKRVILADANLDKVLSAYNKHRDKPIREQAENIIHLFTLTNLGAPAAFKYFDTTIDRKRYTSTKEVLDATLIHQSITGLYETRIDLSQLGGDGGEAAAKGGSGGGGGTLQLEEEYRLFEPESTQKQEMDIWLKNFPQAWAETGGMGTAHCQAPVLIQLKATATPISIRQYPMPHEAYQGIKPHIRRMLDQGILKPCQSPWNTPLLPVKKPGTEDYRPVQDLREVNKRVEDIHPTVPNPYNLLSTLPPSHPWYTVLDLKDAFFCLRLHSESQLLFAFEWRDPEIGLSGQLTWTRLPQGFKNSPTLFNEALHSDLADFRVRYPALVLLQYVDDLLLAAATRTECLEGTKALLETLGNKGYRASAKKAQICLQEVTYLGYSLKDGQRWLTKARKEAILSIPVPKNSRQVREFLGKAGYCRLFIPGFAELAAPLYPLTRPGTLFQWGTEQQLAFEDIKKALLSSPALGLPDITKPFELFIDENSGFAKGVLVQKLGPWKRPVAYLSKKLDTVASGWPPCLRMVAAIAILVKDAGKLTLGQPLTILTSHPVEALVRQPPNKWLSNARMTHYQAMLLDAERVHFGPTVSLNPATLLPLPSGGNHHDCLQILAETHGTRPDLTDQPLPDADLTWYTDGSSFIRNGEREAGAAVTTESEVIWAAPLPPGTSAQRAELIALTQALKMAEGKKLTVYTDSRYAFATTHVHGEIYRRRGWLTSEGKEIKNKNEILALLEALFLPKRLSIIHCPGHQKGDSPQAKGNRLADDTAKKAATETHSSLTVLPAGKRTADGSEFEKRTADGSEFESPKKKAKVE

SEQ ID NO: 1280 - protein, 2092 aa, synthetic construct
MPAAKRVKLDGGDKKYSIGLDIGTNSVGWAVITDEYKVPSKKFKVLGNTDRHSIKKNLIGALLFDSGETAEATRLKRTARRRYTRRKNRICYLQEIFSNEMAKVDDSFFHRLEESFLVEEDKKHERHPIFGNIVDEVAYHEKYPTIYHLRKKLVDSTDKADLRLIYLALAHMIKFRGHFLIEGDLNPDNSDVDKLFIQLVQTYNQLFEENPINASGVDAKAILSARLSKSRRLENLIAQLPGEKKNGLFGNLIALSLGLTPNFKSNFDLAEDAKLQLSKDTYDDDLDNLLAQIGDQYADLFLAAKNLSDAILLSDILRVNTEITKAPLSASMIKRYDEHHQDLTLLKALVRQQLPEKYKEIFFDQSKNGYAGYIDGGASQEEFYKFIKPILEKMDGTEELLVKLNREDLLRKQRTFDNGSIPHQIHLGELHAILRRQEDFYPFLKDNREKIEKILTFRIPYYVGPLARGNSRFAWMTRKSEETITPWNFEEVVDKGASAQSFIERMTNFDKNLPNEKVLPKHSLLYEYFTVYNELTKVKYVTEGMRKPAFLSGEQKKAIVDLLFKTNRKVTVKQLKEDYFKKIECFDSVEISGVEDRFNASLGTYHDLLKIIKDKDFLDNEENEDILEDIVLTLTLFEDREMIEERLKTYAHLFDDKVMKQLKRRRYTGWGRLSRKLINGIRDKQSGKTILDFLKSDGFANRNFMQLIHDDSLTFKEDIQKAQVSGQGDSLHEHIANLAGSPAIKKGILQTVKVVDELVKVMGRHKPENIVIEMARENQTTQKGQKNSRERMKRIEEGIKELGSQILKEHPVENTQLQNEKLYLYYLQNGRDMYVDQELDINRLSDYDVDHIVPQSFLKDDSIDNKVLTRSDKARGKSDNVPSEEVVKKMKNYWRQLLNAKLITQRKFDNLTKAERGGLSELDKAGFIKRQLVETRQITKHVAQILDSRMNTKYDENDKLIREVKVITLKSKLVSDFRKDFQFYKVREINNYHHAHDAYLNAVVGTALIKKYPKLESEFVYGDYKVYDVRKMIAKSEQEIGKATAKYFFYSNIMNFFKTEITLANGEIRKRPLIETNGETGEIVWDKGRDFATVRKVLSMPQVNIVKKTEVQTGGFSKESILPKRNSDKLIARKKDWDPKKYGGFDSPTVAYSVLVVAKVEKGKSKKLKSVKELLGITIMERSSFEKNPIDFLEAKGYKEVKKDLIIKLPKYSLFELENGRKRMLASAGELQKGNELALPSKYVNFLYLASHYEKLKGSPEDNEQKQLFVEQHKHYLDEIIEQISEFSKRVILADANLDKVLSAYNKHRDKPIREQAENIIHLFTLTNLGAPAAFKYFDTTIDRKRYTSTKEVLDATLIHQSITGLYETRIDLSQLGGDGGGGGEAAAKGGTLQLEEEYRLFEPESTQKQEMDIWLKNFPQAWAETGGMGTAHCQAPVLIQLKATATPISIRQYPMPHEAYQGIKPHIRRMLDQGILKPCQSPWNTPLLPVKKPGTEDYRPVQDLREVNKRVEDIHPTVPNPYNLLSTLPPSHPWYTVLDLKDAFFCLRLHSESQLLFAFEWRDPEIGLSGQLTWTRLPQGFKNSPTLFNEALHSDLADFRVRYPALVLLQYVDDLLLAAATRTECLEGTKALLETLGNKGYRASAKKAQICLQEVTYLGYSLKDGQRWLTKARKEAILSIPVPKNSRQVREFLGKAGYCRLFIPGFAELAAPLYPLTRPGTLFQWGTEQQLAFEDIKKALLSSPALGLPDITKPFELFIDENSGFAKGVLVQKLGPWKRPVAYLSKKLDTVASGWPPCLRMVAAIAILVKDAGKLTLGQPLTILTSHPVEALVRQPPNKWLSNARMTHYQAMLLDAERVHFGPTVSLNPATLLPLPSGGNHHDCLQILAETHGTRPDLTDQPLPDADLTWYTDGSSFIRNGEREAGAAVTTESEVIWAAPLPPGTSAQRAELIALTQALKMAEGKKLTVYTDSRYAFATTHVHGEIYRRRGWLTSEGKEIKNKNEILALLEALFLPKRLSIIHCPGHQKGDSPQAKGNRLADDTAKKAATETHSSLTVLPAGKRTADGSEFEKRTADGSEFESPKKKAKVE

SEQ ID NO: 1281 - protein, 2090 aa, synthetic construct
MPAAKRVKLDGGDKKYSIGLDIGTNSVGWAVITDEYKVPSKKFKVLGNTDRHSIKKNLIGALLFDSGETAEATRLKRTARRRYTRRKNRICYLQEIFSNEMAKVDDSFFHRLEESFLVEEDKKHERHPIFGNIVDEVAYHEKYPTIYHLRKKLVDSTDKADLRLIYLALAHMIKFRGHFLIEGDLNPDNSDVDKLFIQLVQTYNQLFEENPINASGVDAKAILSARLSKSRRLENLIAQLPGEKKNGLFGNLIALSLGLTPNFKSNFDLAEDAKLQLSKDTYDDDLDNLLAQIGDQYADLFLAAKNLSDAILLSDILRVNTEITKAPLSASMIKRYDEHHQDLTLLKALVRQQLPEKYKEIFFDQSKNGYAGYIDGGASQEEFYKFIKPILEKMDGTEELLVKLNREDLLRKQRTFDNGSIPHQIHLGELHAILRRQEDFYPFLKDNREKIEKILTFRIPYYVGPLARGNSRFAWMTRKSEETITPWNFEEVVDKGASAQSFIERMTNFDKNLPNEKVLPKHSLLYEYFTVYNELTKVKYVTEGMRKPAFLSGEQKKAIVDLLFKTNRKVTVKQLKEDYFKKIECFDSVEISGVEDRFNASLGTYHDLLKIIKDKDFLDNEENEDILEDIVLTLTLFEDREMIEERLKTYAHLFDDKVMKQLKRRRYTGWGRLSRKLINGIRDKQSGKTILDFLKSDGFANRNFMQLIHDDSLTFKEDIQKAQVSGQGDSLHEHIANLAGSPAIKKGILQTVKVVDELVKVMGRHKPENIVIEMARENQTTQKGQKNSRERMKRIEEGIKELGSQILKEHPVENTQLQNEKLYLYYLQNGRDMYVDQELDINRLSDYDVDHIVPQSFLKDDSIDNKVLTRSDKARGKSDNVPSEEVVKKMKNYWRQLLNAKLITQRKFDNLTKAERGGLSELDKAGFIKRQLVETRQITKHVAQILDSRMNTKYDENDKLIREVKVITLKSKLVSDFRKDFQFYKVREINNYHHAHDAYLNAVVGTALIKKYPKLESEFVYGDYKVYDVRKMIAKSEQEIGKATAKYFFYSNIMNFFKTEITLANGEIRKRPLIETNGETGEIVWDKGRDFATVRKVLSMPQVNIVKKTEVQTGGFSKESILPKRNSDKLIARKKDWDPKKYGGFDSPTVAYSVLVVAKVEKGKSKKLKSVKELLGITIMERSSFEKNPIDFLEAKGYKEVKKDLIIKLPKYSLFELENGRKRMLASAGELQKGNELALPSKYVNFLYLASHYEKLKGSPEDNEQKQLFVEQHKHYLDEIIEQISEFSKRVILADANLDKVLSAYNKHRDKPIREQAENIIHLFTLTNLGAPAAFKYFDTTIDRKRYTSTKEVLDATLIHQSITGLYETRIDLSQLGGDGGGGGGGSGGTLQLEEEYRLFEPESTQKQEMDIWLKNFPQAWAETGGMGTAHCQAPVLIQLKATATPISIRQYPMPHEAYQGIKPHIRRMLDQGILKPCQSPWNTPLLPVKKPGTEDYRPVQDLREVNKRVEDIHPTVPNPYNLLSTLPPSHPWYTVLDLKDAFFCLRLHSESQLLFAFEWRDPEIGLSGQLTWTRLPQGFKNSPTLFNEALHSDLADFRVRYPALVLLQYVDDLLLAAATRTECLEGTKALLETLGNKGYRASAKKAQICLQEVTYLGYSLKDGQRWLTKARKEAILSIPVPKNSRQVREFLGKAGYCRLFIPGFAELAAPLYPLTRPGTLFQWGTEQQLAFEDIKKALLSSPALGLPDITKPFELFIDENSGFAKGVLVQKLGPWKRPVAYLSKKLDTVASGWPPCLRMVAAIAILVKDAGKLTLGQPLTILTSHPVEALVRQPPNKWLSNARMTHYQAMLLDAERVHFGPTVSLNPATLLPLPSGGNHHDCLQILAETHGTRPDLTDQPLPDADLTWYTDGSSFIRNGEREAGAAVTTESEVIWAAPLPPGTSAQRAELIALTQALKMAEGKKLTVYTDSRYAFATTHVHGEIYRRRGWLTSEGKEIKNKNEILALLEALFLPKRLSIIHCPGHQKGDSPQAKGNRLADDTAKKAATETHSSLTVLPAGKRTADGSEFEKRTADGSEFESPKKKAKVE

SEQ ID NO: 1282 - protein, 2211 aa, synthetic construct
MPAAKRVKLDGGDKKYSIGLDIGTNSVGWAVITDEYKVPSKKFKVLGNTDRHSIKKNLIGALLFDSGETAEATRLKRTARRRYTRRKNRICYLQEIFSNEMAKVDDSFFHRLEESFLVEEDKKHERHPIFGNIVDEVAYHEKYPTIYHLRKKLVDSTDKADLRLIYLALAHMIKFRGHFLIEGDLNPDNSDVDKLFIQLVQTYNQLFEENPINASGVDAKAILSARLSKSRRLENLIAQLPGEKKNGLFGNLIALSLGLTPNFKSNFDLAEDAKLQLSKDTYDDDLDNLLAQIGDQYADLFLAAKNLSDAILLSDILRVNTEITKAPLSASMIKRYDEHHQDLTLLKALVRQQLPEKYKEIFFDQSKNGYAGYIDGGASQEEFYKFIKPILEKMDGTEELLVKLNREDLLRKQRTFDNGSIPHQIHLGELHAILRRQEDFYPFLKDNREKIEKILTFRIPYYVGPLARGNSRFAWMTRKSEETITPWNFEEVVDKGASAQSFIERMTNFDKNLPNEKVLPKHSLLYEYFTVYNELTKVKYVTEGMRKPAFLSGEQKKAIVDLLFKTNRKVTVKQLKEDYFKKIECFDSVEISGVEDRFNASLGTYHDLLKIIKDKDFLDNEENEDILEDIVLTLTLFEDREMIEERLKTYAHLFDDKVMKQLKRRRYTGWGRLSRKLINGIRDKQSGKTILDFLKSDGFANRNFMQLIHDDSLTFKEDIQKAQVSGQGDSLHEHIANLAGSPAIKKGILQTVKVVDELVKVMGRHKPENIVIEMARENQTTQKGQKNSRERMKRIEEGIKELGSQILKEHPVENTQLQNEKLYLYYLQNGRDMYVDQELDINRLSDYDVDHIVPQSFLKDDSIDNKVLTRSDKARGKSDNVPSEEVVKKMKNYWRQLLNAKLITQRKFDNLTKAERGGLSELDKAGFIKRQLVETRQITKHVAQILDSRMNTKYDENDKLIREVKVITLKSKLVSDFRKDFQFYKVREINNYHHAHDAYLNAVVGTALIKKYPKLESEFVYGDYKVYDVRKMIAKSEQEIGKATAKYFFYSNIMNFFKTEITLANGEIRKRPLIETNGETGEIVWDKGRDFATVRKVLSMPQVNIVKKTEVQTGGFSKESILPKRNSDKLIARKKDWDPKKYGGFDSPTVAYSVLVVAKVEKGKSKKLKSVKELLGITIMERSSFEKNPIDFLEAKGYKEVKKDLIIKLPKYSLFELENGRKRMLASAGELQKGNELALPSKYVNFLYLASHYEKLKGSPEDNEQKQLFVEQHKHYLDEIIEQISEFSKRVILADANLDKVLSAYNKHRDKPIREQAENIIHLFTLTNLGAPAAFKYFDTTIDRKRYTSTKEVLDATLIHQSITGLYETRIDLSQLGGDGGAEAAAKEAAAKEAAAKEAAAKALEAEAAAKEAAAKEAAAKEAAAKAGGMNPLQLLQPLPAEIKGTKLLAHWNSGATITCIPESFLEDEQPIKKTLIKTIHGEKQQNVYYVTFKVKGRKVEAEVIASPYEYILLSPTDVPWLTQQPLQLTILVPLQEYQEKILSKTALPEDQKQQLKTLFVKYDNLWQHWENQVGHRKIRPHNIATGDYPPRPQKQYPINPKAKPSIQIVIDDLLKQGVLTPQNSTMNTPVYPVPKPDGRWRMVLDYREVNKTIPLTAAQNQHSAGILATIVRQKYKTTLDLANGFWAHPITPESYWLTAFTWQGKQYCWTRLPQGFLNSPALFTADVVDLLKEIPNVQVYVDDIYLSHDDPKEHVQQLEKVFQILLQAGYVVSLKKSEIGQKTVEFLGFNITKEGRGLTDTFKTKLLNITPPKDLKQLQSILGLLNFARNFIPNFAELVQPLYNLIASAKGKYIEWSEENTKQLNMVIEALNTASNLEERLPEQRLVIKVNTSPSAGYVRYYNETGKKPIMYLNYVFSKAELKFSMLEKLLTTMHKALIKAMDLAMGQEILVYSPIVSMTKIQKTPLPERKALPIRWITWMTYLEDPRIQFHYDKTLPELKHIPDVYTSSQSPVKHPSQYEGVFYTDGSAIKSPDPTKSNNAGMGIVHATYKPEYQVLNQWSIPLGNHTAQMAEIAAVEFACKKALKIPGPVLVITDSFYVAESANKELPYWKSNGFVNNKKKPLKHISKWKSIAECLSMKPDITIQHEKGISLQIPVFILKGNALADKLATQGSYVVNAGKRTADGSEFEKRTADGSEFESPKKKAKVE

SEQ ID NO: 1283 - protein, 2190 aa, synthetic construct
MPAAKRVKLDGGDKKYSIGLDIGTNSVGWAVITDEYKVPSKKFKVLGNTDRHSIKKNLIGALLFDSGETAEATRLKRTARRRYTRRKNRICYLQEIFSNEMAKVDDSFFHRLEESFLVEEDKKHERHPIFGNIVDEVAYHEKYPTIYHLRKKLVDSTDKADLRLIYLALAHMIKFRGHFLIEGDLNPDNSDVDKLFIQLVQTYNQLFEENPINASGVDAKAILSARLSKSRRLENLIAQLPGEKKNGLFGNLIALSLGLTPNFKSNFDLAEDAKLQLSKDTYDDDLDNLLAQIGDQYADLFLAAKNLSDAILLSDILRVNTEITKAPLSASMIKRYDEHHQDLTLLKALVRQQLPEKYKEIFFDQSKNGYAGYIDGGASQEEFYKFIKPILEKMDGTEELLVKLNREDLLRKQRTFDNGSIPHQIHLGELHAILRRQEDFYPFLKDNREKIEKILTFRIPYYVGPLARGNSRFAWMTRKSEETITPWNFEEVVDKGASAQSFIERMTNFDKNLPNEKVLPKHSLLYEYFTVYNELTKVKYVTEGMRKPAFLSGEQKKAIVDLLFKTNRKVTVKQLKEDYFKKIECFDSVEISGVEDRFNASLGTYHDLLKIIKDKDFLDNEENEDILEDIVLTLTLFEDREMIEERLKTYAHLFDDKVMKQLKRRRYTGWGRLSRKLINGIRDKQSGKTILDFLKSDGFANRNFMQLIHDDSLTFKEDIQKAQVSGQGDSLHEHIANLAGSPAIKKGILQTVKVVDELVKVMGRHKPENIVIEMARENQTTQKGQKNSRERMKRIEEGIKELGSQILKEHPVENTQLQNEKLYLYYLQNGRDMYVDQELDINRLSDYDVDHIVPQSFLKDDSIDNKVLTRSDKARGKSDNVPSEEVVKKMKNYWRQLLNAKLITQRKFDNLTKAERGGLSELDKAGFIKRQLVETRQITKHVAQILDSRMNTKYDENDKLIREVKVITLKSKLVSDFRKDFQFYKVREINNYHHAHDAYLNAVVGTALIKKYPKLESEFVYGDYKVYDVRKMIAKSEQEIGKATAKYFFYSNIMNFFKTEITLANGEIRKRPLIETNGETGEIVWDKGRDFATVRKVLSMPQVNIVKKTEVQTGGFSKESILPKRNSDKLIARKKDWDPKKYGGFDSPTVAYSVLVVAKVEKGKSKKLKSVKELLGITIMERSSFEKNPIDFLEAKGYKEVKKDLIIKLPKYSLFELENGRKRMLASAGELQKGNELALPSKYVNFLYLASHYEKLKGSPEDNEQKQLFVEQHKHYLDEIIEQISEFSKRVILADANLDKVLSAYNKHRDKPIREQAENIIHLFTLTNLGAPAAFKYFDTTIDRKRYTSTKEVLDATLIHQSITGLYETRIDLSQLGGDGGEAAAKEAAAKEAAAKEAAAKEAAAKGGMNPLQLLQPLPAEIKGTKLLAHWNSGATITCIPESFLEDEQPIKKTLIKTIHGEKQQNVYYVTFKVKGRKVEAEVIASPYEYILLSPTDVPWLTQQPLQLTILVPLQEYQEKILSKTALPEDQKQQLKTLFVKYDNLWQHWENQVGHRKIRPHNIATGDYPPRPQKQYPINPKAKPSIQIVIDDLLKQGVLTPQNSTMNTPVYPVPKPDGRWRMVLDYREVNKTIPLTAAQNQHSAGILATIVRQKYKTTLDLANGFWAHPITPESYWLTAFTWQGKQYCWTRLPQGFLNSPALFTADVVDLLKEIPNVQVYVDDIYLSHDDPKEHVQQLEKVFQILLQAGYVVSLKKSEIGQKTVEFLGFNITKEGRGLTDTFKTKLLNITPPKDLKQLQSILGLLNFARNFIPNFAELVQPLYNLIASAKGKYIEWSEENTKQLNMVIEALNTASNLEERLPEQRLVIKVNTSPSAGYVRYYNETGKKPIMYLNYVFSKAELKFSMLEKLLTTMHKALIKAMDLAMGQEILVYSPIVSMTKIQKTPLPERKALPIRWITWMTYLEDPRIQFHYDKTLPELKHIPDVYTSSQSPVKHPSQYEGVFYTDGSAIKSPDPTKSNNAGMGIVHATYKPEYQVLNQWSIPLGNHTAQMAEIAAVEFACKKALKIPGPVLVITDSFYVAESANKELPYWKSNGFVNNKKKPLKHISKWKSIAECLSMKPDITIQHEKGISLQIPVFILKGNALADKLATQGSYVVNAGKRTADGSEFEKRTADGSEFESPKKKAKVE

SEQ ID NO: 1284 - protein, 2183 aa, synthetic construct
MPAAKRVKLDGGDKKYSIGLDIGTNSVGWAVITDEYKVPSKKFKVLGNTDRHSIKKNLIGALLFDSGETAEATRLKRTARRRYTRRKNRICYLQEIFSNEMAKVDDSFFHRLEESFLVEEDKKHERHPIFGNIVDEVAYHEKYPTIYHLRKKLVDSTDKADLRLIYLALAHMIKFRGHFLIEGDLNPDNSDVDKLFIQLVQTYNQLFEENPINASGVDAKAILSARLSKSRRLENLIAQLPGEKKNGLFGNLIALSLGLTPNFKSNFDLAEDAKLQLSKDTYDDDLDNLLAQIGDQYADLFLAAKNLSDAILLSDILRVNTEITKAPLSASMIKRYDEHHQDLTLLKALVRQQLPEKYKEIFFDQSKNGYAGYIDGGASQEEFYKFIKPILEKMDGTEELLVKLNREDLLRKQRTFDNGSIPHQIHLGELHAILRRQEDFYPFLKDNREKIEKILTFRIPYYVGPLARGNSRFAWMTRKSEETITPWNFEEVVDKGASAQSFIERMTNFDKNLPNEKVLPKHSLLYEYFTVYNELTKVKYVTEGMRKPAFLSGEQKKAIVDLLFKTNRKVTVKQLKEDYFKKIECFDSVEISGVEDRFNASLGTYHDLLKIIKDKDFLDNEENEDILEDIVLTLTLFEDREMIEERLKTYAHLFDDKVMKQLKRRRYTGWGRLSRKLINGIRDKQSGKTILDFLKSDGFANRNFMQLIHDDSLTFKEDIQKAQVSGQGDSLHEHIANLAGSPAIKKGILQTVKVVDELVKVMGRHKPENIVIEMARENQTTQKGQKNSRERMKRIEEGIKELGSQILKEHPVENTQLQNEKLYLYYLQNGRDMYVDQELDINRLSDYDVDHIVPQSFLKDDSIDNKVLTRSDKARGKSDNVPSEEVVKKMKNYWRQLLNAKLITQRKFDNLTKAERGGLSELDKAGFIKRQLVETRQITKHVAQILDSRMNTKYDENDKLIREVKVITLKSKLVSDFRKDFQFYKVREINNYHHAHDAYLNAVVGTALIKKYPKLESEFVYGDYKVYDVRKMIAKSEQEIGKATAKYFFYSNIMNFFKTEITLANGEIRKRPLIETNGETGEIVWDKGRDFATVRKVLSMPQVNIVKKTEVQTGGFSKESILPKRNSDKLIARKKDWDPKKYGGFDSPTVAYSVLVVAKVEKGKSKKLKSVKELLGITIMERSSFEKNPIDFLEAKGYKEVKKDLIIKLPKYSLFELENGRKRMLASAGELQKGNELALPSKYVNFLYLASHYEKLKGSPEDNEQKQLFVEQHKHYLDEIIEQISEFSKRVILADANLDKVLSAYNKHRDKPIREQAENIIHLFTLTNLGAPAAFKYFDTTIDRKRYTSTKEVLDATLIHQSITGLYETRIDLSQLGGDGGGSSGSSGSSGSSGSSGSSGGMNPLQLLQPLPAEIKGTKLLAHWNSGATITCIPESFLEDEQPIKKTLIKTIHGEKQQNVYYVTFKVKGRKVEAEVIASPYEYILLSPTDVPWLTQQPLQLTILVPLQEYQEKILSKTALPEDQKQQLKTLFVKYDNLWQHWENQVGHRKIRPHNIATGDYPPRPQKQYPINPKAKPSIQIVIDDLLKQGVLTPQNSTMNTPVYPVPKPDGRWRMVLDYREVNKTIPLTAAQNQHSAGILATIVRQKYKTTLDLANGFWAHPITPESYWLTAFTWQGKQYCWTRLPQGFLNSPALFTADVVDLLKEIPNVQVYVDDIYLSHDDPKEHVQQLEKVFQILLQAGYVVSLKKSEIGQKTVEFLGFNITKEGRGLTDTFKTKLLNITPPKDLKQLQSILGLLNFARNFIPNFAELVQPLYNLIASAKGKYIEWSEENTKQLNMVIEALNTASNLEERLPEQRLVIKVNTSPSAGYVRYYNETGKKPIMYLNYVFSKAELKFSMLEKLLTTMHKALIKAMDLAMGQEILVYSPIVSMTKIQKTPLPERKALPIRWITWMTYLEDPRIQFHYDKTLPELKHIPDVYTSSQSPVKHPSQYEGVFYTDGSAIKSPDPTKSNNAGMGIVHATYKPEYQVLNQWSIPLGNHTAQMAEIAAVEFACKKALKIPGPVLVITDSFYVAESANKELPYWKSNGFVNNKKKPLKHISKWKSIAECLSMKPDITIQHEKGISLQIPVFILKGNALADKLATQGSYVVNAGKRTADGSEFEKRTADGSEFESPKKKAKVE

SEQ ID NO: 1285 - protein, 2176 aa, synthetic construct
MPAAKRVKLDGGDKKYSIGLDIGTNSVGWAVITDEYKVPSKKFKVLGNTDRHSIKKNLIGALLFDSGETAEATRLKRTARRRYTRRKNRICYLQEIFSNEMAKVDDSFFHRLEESFLVEEDKKHERHPIFGNIVDEVAYHEKYPTIYHLRKKLVDSTDKADLRLIYLALAHMIKFRGHFLIEGDLNPDNSDVDKLFIQLVQTYNQLFEENPINASGVDAKAILSARLSKSRRLENLIAQLPGEKKNGLFGNLIALSLGLTPNFKSNFDLAEDAKLQLSKDTYDDDLDNLLAQIGDQYADLFLAAKNLSDAILLSDILRVNTEITKAPLSASMIKRYDEHHQDLTLLKALVRQQLPEKYKEIFFDQSKNGYAGYIDGGASQEEFYKFIKPILEKMDGTEELLVKLNREDLLRKQRTFDNGSIPHQIHLGELHAILRRQEDFYPFLKDNREKIEKILTFRIPYYVGPLARGNSRFAWMTRKSEETITPWNFEEVVDKGASAQSFIERMTNFDKNLPNEKVLPKHSLLYEYFTVYNELTKVKYVTEGMRKPAFLSGEQKKAIVDLLFKTNRKVTVKQLKEDYFKKIECFDSVEISGVEDRFNASLGTYHDLLKIIKDKDFLDNEENEDILEDIVLTLTLFEDREMIEERLKTYAHLFDDKVMKQLKRRRYTGWGRLSRKLINGIRDKQSGKTILDFLKSDGFANRNFMQLIHDDSLTFKEDIQKAQVSGQGDSLHEHIANLAGSPAIKKGILQTVKVVDELVKVMGRHKPENIVIEMARENQTTQKGQKNSRERMKRIEEGIKELGSQILKEHPVENTQLQNEKLYLYYLQNGRDMYVDQELDINRLSDYDVDHIVPQSFLKDDSIDNKVLTRSDKARGKSDNVPSEEVVKKMKNYWRQLLNAKLITQRKFDNLTKAERGGLSELDKAGFIKRQLVETRQITKHVAQILDSRMNTKYDENDKLIREVKVITLKSKLVSDFRKDFQFYKVREINNYHHAHDAYLNAVVGTALIKKYPKLESEFVYGDYKVYDVRKMIAKSEQEIGKATAKYFFYSNIMNFFKTEITLANGEIRKRPLIETNGETGEIVWDKGRDFATVRKVLSMPQVNIVKKTEVQTGGFSKESILPKRNSDKLIARKKDWDPKKYGGFDSPTVAYSVLVVAKVEKGKSKKLKSVKELLGITIMERSSFEKNPIDFLEAKGYKEVKKDLIIKLPKYSLFELENGRKRMLASAGELQKGNELALPSKYVNFLYLASHYEKLKGSPEDNEQKQLFVEQHKHYLDEIIEQISEFSKRVILADANLDKVLSAYNKHRDKPIREQAENIIHLFTLTNLGAPAAFKYFDTTIDRKRYTSTKEVLDATLIHQSITGLYETRIDLSQLGGDGGPAPAPAPAPAPGGMNPLQLLQPLPAEIKGTKLLAHWNSGATITCIPESFLEDEQPIKKTLIKTIHGEKQQNVYYVTFKVKGRKVEAEVIASPYEYILLSPTDVPWLTQQPLQLTILVPLQEYQEKILSKTALPEDQKQQLKTLFVKYDNLWQHWENQVGHRKIRPHNIATGDYPPRPQKQYPINPKAKPSIQIVIDDLLKQGVLTPQNSTMNTPVYPVPKPDGRWRMVLDYREVNKTIPLTAAQNQHSAGILATIVRQKYKTTLDLANGFWAHPITPESYWLTAFTWQGKQYCWTRLPQGFLNSPALFTADVVDLLKEIPNVQVYVDDIYLSHDDPKEHVQQLEKVFQILLQAGYVVSLKKSEIGQKTVEFLGFNITKEGRGLTDTFKTKLLNITPPKDLKQLQSILGLLNFARNFIPNFAELVQPLYNLIASAKGKYIEWSEENTKQLNMVIEALNTASNLEERLPEQRLVIKVNTSPSAGYVRYYNETGKKPIMYLNYVFSKAELKFSMLEKLLTTMHKALIKAMDLAMGQEILVYSPIVSMTKIQKTPLPERKALPIRWITWMTYLEDPRIQFHYDKTLPELKHIPDVYTSSQSPVKHPSQYEGVFYTDGSAIKSPDPTKSNNAGMGIVHATYKPEYQVLNQWSIPLGNHTAQMAEIAAVEFACKKALKIPGPVLVITDSFYVAESANKELPYWKSNGFVNNKKKPLKHISKWKSIAECLSMKPDITIQHEKGISLQIPVFILKGNALADKLATQGSYVVNAGKRTADGSEFEKRTADGSEFESPKKKAKVE

SEQ ID NO: 1286 - protein, 2176 aa, synthetic construct
MPAAKRVKLDGGDKKYSIGLDIGTNSVGWAVITDEYKVPSKKFKVLGNTDRHSIKKNLIGALLFDSGETAEATRLKRTARRRYTRRKNRICYLQEIFSNEMAKVDDSFFHRLEESFLVEEDKKHERHPIFGNIVDEVAYHEKYPTIYHLRKKLVDSTDKADLRLIYLALAHMIKFRGHFLIEGDLNPDNSDVDKLFIQLVQTYNQLFEENPINASGVDAKAILSARLSKSRRLENLIAQLPGEKKNGLFGNLIALSLGLTPNFKSNFDLAEDAKLQLSKDTYDDDLDNLLAQIGDQYADLFLAAKNLSDAILLSDILRVNTEITKAPLSASMIKRYDEHHQDLTLLKALVRQQLPEKYKEIFFDQSKNGYAGYIDGGASQEEFYKFIKPILEKMDGTEELLVKLNREDLLRKQRTFDNGSIPHQIHLGELHAILRRQEDFYPFLKDNREKIEKILTFRIPYYVGPLARGNSRFAWMTRKSEETITPWNFEEVVDKGASAQSFIERMTNFDKNLPNEKVLPKHSLLYEYFTVYNELTKVKYVTEGMRKPAFLSGEQKKAIVDLLFKTNRKVTVKQLKEDYFKKIECFDSVEISGVEDRFNASLGTYHDLLKIIKDKDFLDNEENEDILEDIVLTLTLFEDREMIEERLKTYAHLFDDKVMKQLKRRRYTGWGRLSRKLINGIRDKQSGKTILDFLKSDGFANRNFMQLIHDDSLTFKEDIQKAQVSGQGDSLHEHIANLAGSPAIKKGILQTVKVVDELVKVMGRHKPENIVIEMARENQTTQKGQKNSRERMKRIEEGIKELGSQILKEHPVENTQLQNEKLYLYYLQNGRDMYVDQELDINRLSDYDVDHIVPQSFLKDDSIDNKVLTRSDKARGKSDNVPSEEVVKKMKNYWRQLLNAKLITQRKFDNLTKAERGGLSELDKAGFIKRQLVETRQITKHVAQILDSRMNTKYDENDKLIREVKVITLKSKLVSDFRKDFQFYKVREINNYHHAHDAYLNAVVGTALIKKYPKLESEFVYGDYKVYDVRKMIAKSEQEIGKATAKYFFYSNIMNFFKTEITLANGEIRKRPLIETNGETGEIVWDKGRDFATVRKVLSMPQVNIVKKTEVQTGGFSKESILPKRNSDKLIARKKDWDPKKYGGFDSPTVAYSVLVVAKVEKGKSKKLKSVKELLGITIMERSSFEKNPIDFLEAKGYKEVKKDLIIKLPKYSLFELENGRKRMLASAGELQKGNELALPSKYVNFLYLASHYEKLKGSPEDNEQKQLFVEQHKHYLDEIIEQISEFSKRVILADANLDKVLSAYNKHRDKPIREQAENIIHLFTLTNLGAPAAFKYFDTTIDRKRYTSTKEVLDATLIHQSITGLYETRIDLSQLGGDGGGGSPAPEAAAKGGMNPLQLLQPLPAEIKGTKLLAHWNSGATITCIPESFLEDEQPIKKTLIKTIHGEKQQNVYYVTFKVKGRKVEAEVIASPYEYILLSPTDVPWLTQQPLQLTILVPLQEYQEKILSKTALPEDQKQQLKTLFVKYDNLWQHWENQVGHRKIRPHNIATGDYPPRPQKQYPINPKAKPSIQIVIDDLLKQGVLTPQNSTMNTPVYPVPKPDGRWRMVLDYREVNKTIPLTAAQNQHSAGILATIVRQKYKTTLDLANGFWAHPITPESYWLTAFTWQGKQYCWTRLPQGFLNSPALFTADVVDLLKEIPNVQVYVDDIYLSHDDPKEHVQQLEKVFQILLQAGYVVSLKKSEIGQKTVEFLGFNITKEGRGLTDTFKTKLLNITPPKDLKQLQSILGLLNFARNFIPNFAELVQPLYNLIASAKGKYIEWSEENTKQLNMVIEALNTASNLEERLPEQRLVIKVNTSPSAGYVRYYNETGKKPIMYLNYVFSKAELKFSMLEKLLTTMHKALIKAMDLAMGQEILVYSPIVSMTKIQKTPLPERKALPIRWITWMTYLEDPRIQFHYDKTLPELKHIPDVYTSSQSPVKHPSQYEGVFYTDGSAIKSPDPTKSNNAGMGIVHATYKPEYQVLNQWSIPLGNHTAQMAEIAAVEFACKKALKIPGPVLVITDSFYVAESANKELPYWKSNGFVNNKKKPLKHISKWKSIAECLSMKPDITIQHEKGISLQIPVFILKGNALADKLATQGSYVVNAGKRTADGSEFEKRTADGSEFESPKKKAKVE

SEQ ID NO: 1287 - protein, 2176 aa, synthetic construct
MPAAKRVKLDGGDKKYSIGLDIGTNSVGWAVITDEYKVPSKKFKVLGNTDRHSIKKNLIGALLFDSGETAEATRLKRTARRRYTRRKNRICYLQEIFSNEMAKVDDSFFHRLEESFLVEEDKKHERHPIFGNIVDEVAYHEKYPTIYHLRKKLVDSTDKADLRLIYLALAHMIKFRGHFLIEGDLNPDNSDVDKLFIQLVQTYNQLFEENPINASGVDAKAILSARLSKSRRLENLIAQLPGEKKNGLFGNLIALSLGLTPNFKSNFDLAEDAKLQLSKDTYDDDLDNLLAQIGDQYADLFLAAKNLSDAILLSDILRVNTEITKAPLSASMIKRYDEHHQDLTLLKALVRQQLPEKYKEIFFDQSKNGYAGYIDGGASQEEFYKFIKPILEKMDGTEELLVKLNREDLLRKQRTFDNGSIPHQIHLGELHAILRRQEDFYPFLKDNREKIEKILTFRIPYYVGPLARGNSRFAWMTRKSEETITPWNFEEVVDKGASAQSFIERMTNFDKNLPNEKVLPKHSLLYEYFTVYNELTKVKYVTEGMRKPAFLSGEQKKAIVDLLFKTNRKVTVKQLKEDYFKKIECFDSVEISGVEDRFNASLGTYHDLLKIIKDKDFLDNEENEDILEDIVLTLTLFEDREMIEERLKTYAHLFDDKVMKQLKRRRYTGWGRLSRKLINGIRDKQSGKTILDFLKSDGFANRNFMQLIHDDSLTFKEDIQKAQVSGQGDSLHEHIANLAGSPAIKKGILQTVKVVDELVKVMGRHKPENIVIEMARENQTTQKGQKNSRERMKRIEEGIKELGSQILKEHPVENTQLQNEKLYLYYLQNGRDMYVDQELDINRLSDYDVDHIVPQSFLKDDSIDNKVLTRSDKARGKSDNVPSEEVVKKMKNYWRQLLNAKLITQRKFDNLTKAERGGLSELDKAGFIKRQLVETRQITKHVAQILDSRMNTKYDENDKLIREVKVITLKSKLVSDFRKDFQFYKVREINNYHHAHDAYLNAVVGTALIKKYPKLESEFVYGDYKVYDVRKMIAKSEQEIGKATAKYFFYSNIMNFFKTEITLANGEIRKRPLIETNGETGEIVWDKGRDFATVRKVLSMPQVNIVKKTEVQTGGFSKESILPKRNSDKLIARKKDWDPKKYGGFDSPTVAYSVLVVAKVEKGKSKKLKSVKELLGITIMERSSFEKNPIDFLEAKGYKEVKKDLIIKLPKYSLFELENGRKRMLASAGELQKGNELALPSKYVNFLYLASHYEKLKGSPEDNEQKQLFVEQHKHYLDEIIEQISEFSKRVILADANLDKVLSAYNKHRDKPIREQAENIIHLFTLTNLGAPAAFKYFDTTIDRKRYTSTKEVLDATLIHQSITGLYETRIDLSQLGGDGGEAAAKGGSPAPGGMNPLQLLQPLPAEIKGTKLLAHWNSGATITCIPESFLEDEQPIKKTLIKTIHGEKQQNVYYVTFKVKGRKVEAEVIASPYEYILLSPTDVPWLTQQPLQLTILVPLQEYQEKILSKTALPEDQKQQLKTLFVKYDNLWQHWENQVGHRKIRPHNIATGDYPPRPQKQYPINPKAKPSIQIVIDDLLKQGVLTPQNSTMNTPVYPVPKPDGRWRMVLDYREVNKTIPLTAAQNQHSAGILATIVRQKYKTTLDLANGFWAHPITPESYWLTAFTWQGKQYCWTRLPQGFLNSPALFTADVVDLLKEIPNVQVYVDDIYLSHDDPKEHVQQLEKVFQILLQAGYVVSLKKSEIGQKTVEFLGFNITKEGRGLTDTFKTKLLNITPPKDLKQLQSILGLLNFARNFIPNFAELVQPLYNLIASAKGKYIEWSEENTKQLNMVIEALNTASNLEERLPEQRLVIKVNTSPSAGYVRYYNETGKKPIMYLNYVFSKAELKFSMLEKLLTTMHKALIKAMDLAMGQEILVYSPIVSMTKIQKTPLPERKALPIRWITWMTYLEDPRIQFHYDKTLPELKHIPDVYTSSQSPVKHPSQYEGVFYTDGSAIKSPDPTKSNNAGMGIVHATYKPEYQVLNQWSIPLGNHTAQMAEIAAVEFACKKALKIPGPVLVITDSFYVAESANKELPYWKSNGFVNNKKKPLKHISKWKSIAECLSMKPDITIQHEKGISLQIPVFILKGNALADKLATQGSYVVNAGKRTADGSEFEKRTADGSEFESPKKKAKVE

SEQ ID NO: 1288 - protein, 2180 aa, synthetic construct
MPAAKRVKLDGGDKKYSIGLDIGTNSVGWAVITDEYKVPSKKFKVLGNTDRHSIKKNLIGALLFDSGETAEATRLKRTARRRYTRRKNRICYLQEIFSNEMAKVDDSFFHRLEESFLVEEDKKHERHPIFGNIVDEVAYHEKYPTIYHLRKKLVDSTDKADLRLIYLALAHMIKFRGHFLIEGDLNPDNSDVDKLFIQLVQTYNQLFEENPINASGVDAKAILSARLSKSRRLENLIAQLPGEKKNGLFGNLIALSLGLTPNFKSNFDLAEDAKLQLSKDTYDDDLDNLLAQIGDQYADLFLAAKNLSDAILLSDILRVNTEITKAPLSASMIKRYDEHHQDLTLLKALVRQQLPEKYKEIFFDQSKNGYAGYIDGGASQEEFYKFIKPILEKMDGTEELLVKLNREDLLRKQRTFDNGSIPHQIHLGELHAILRRQEDFYPFLKDNREKIEKILTFRIPYYVGPLARGNSRFAWMTRKSEETITPWNFEEVVDKGASAQSFIERMTNFDKNLPNEKVLPKHSLLYEYFTVYNELTKVKYVTEGMRKPAFLSGEQKKAIVDLLFKTNRKVTVKQLKEDYFKKIECFDSVEISGVEDRFNASLGTYHDLLKIIKDKDFLDNEENEDILEDIVLTLTLFEDREMIEERLKTYAHLFDDKVMKQLKRRRYTGWGRLSRKLINGIRDKQSGKTILDFLKSDGFANRNFMQLIHDDSLTFKEDIQKAQVSGQGDSLHEHIANLAGSPAIKKGILQTVKVVDELVKVMGRHKPENIVIEMARENQTTQKGQKNSRERMKRIEEGIKELGSQILKEHPVENTQLQNEKLYLYYLQNGRDMYVDQELDINRLSDYDVDHIVPQSFLKDDSIDNKVLTRSDKARGKSDNVPSEEVVKKMKNYWRQLLNAKLITQRKFDNLTKAERGGLSELDKAGFIKRQLVETRQITKHVAQILDSRMNTKYDENDKLIREVKVITLKSKLVSDFRKDFQFYKVREINNYHHAHDAYLNAVVGTALIKKYPKLESEFVYGDYKVYDVRKMIAKSEQEIGKATAKYFFYSNIMNFFKTEITLANGEIRKRPLIETNGETGEIVWDKGRDFATVRKVLSMPQVNIVKKTEVQTGGFSKESILPKRNSDKLIARKKDWDPKKYGGFDSPTVAYSVLVVAKVEKGKSKKLKSVKELLGITIMERSSFEKNPIDFLEAKGYKEVKKDLIIKLPKYSLFELENGRKRMLASAGELQKGNELALPSKYVNFLYLASHYEKLKGSPEDNEQKQLFVEQHKHYLDEIIEQISEFSKRVILADANLDKVLSAYNKHRDKPIREQAENIIHLFTLTNLGAPAAFKYFDTTIDRKRYTSTKEVLDATLIHQSITGLYETRIDLSQLGGDGGEAAAKEAAAKEAAAKGGMNPLQLLQPLPAEIKGTKLLAHWNSGATITCIPESFLEDEQPIKKTLIKTIHGEKQQNVYYVTFKVKGRKVEAEVIASPYEYILLSPTDVPWLTQQPLQLTILVPLQEYQEKILSKTALPEDQKQQLKTLFVKYDNLWQHWENQVGHRKIRPHNIATGDYPPRPQKQYPINPKAKPSIQIVIDDLLKQGVLTPQNSTMNTPVYPVPKPDGRWRMVLDYREVNKTIPLTAAQNQHSAGILATIVRQKYKTTLDLANGFWAHPITPESYWLTAFTWQGKQYCWTRLPQGFLNSPALFTADVVDLLKEIPNVQVYVDDIYLSHDDPKEHVQQLEKVFQILLQAGYVVSLKKSEIGQKTVEFLGFNITKEGRGLTDTFKTKLLNITPPKDLKQLQSILGLLNFARNFIPNFAELVQPLYNLIASAKGKYIEWSEENTKQLNMVIEALNTASNLEERLPEQRLVIKVNTSPSAGYVRYYNETGKKPIMYLNYVFSKAELKFSMLEKLLTTMHKALIKAMDLAMGQEILVYSPIVSMTKIQKTPLPERKALPIRWITWMTYLEDPRIQFHYDKTLPELKHIPDVYTSSQSPVKHPSQYEGVFYTDGSAIKSPDPTKSNNAGMGIVHATYKPEYQVLNQWSIPLGNHTAQMAEIAAVEFACKKALKIPGPVLVITDSFYVAESANKELPYWKSNGFVNNKKKPLKHISKWKSIAECLSMKPDITIQHEKGISLQIPVFILKGNALADKLATQGSYVVNAGKRTADGSEFEKRTADGSEFESPKKKAKVE

SEQ ID NO: 1289 - protein, 2177 aa, synthetic construct
MPAAKRVKLDGGDKKYSIGLDIGTNSVGWAVITDEYKVPSKKFKVLGNTDRHSIKKNLIGALLFDSGETAEATRLKRTARRRYTRRKNRICYLQEIFSNEMAKVDDSFFHRLEESFLVEEDKKHERHPIFGNIVDEVAYHEKYPTIYHLRKKLVDSTDKADLRLIYLALAHMIKFRGHFLIEGDLNPDNSDVDKLFIQLVQTYNQLFEENPINASGVDAKAILSARLSKSRRLENLIAQLPGEKKNGLFGNLIALSLGLTPNFKSNFDLAEDAKLQLSKDTYDDDLDNLLAQIGDQYADLFLAAKNLSDAILLSDILRVNTEITKAPLSASMIKRYDEHHQDLTLLKALVRQQLPEKYKEIFFDQSKNGYAGYIDGGASQEEFYKFIKPILEKMDGTEELLVKLNREDLLRKQRTFDNGSIPHQIHLGELHAILRRQEDFYPFLKDNREKIEKILTFRIPYYVGPLARGNSRFAWMTRKSEETITPWNFEEVVDKGASAQSFIERMTNFDKNLPNEKVLPKHSLLYEYFTVYNELTKVKYVTEGMRKPAFLSGEQKKAIVDLLFKTNRKVTVKQLKEDYFKKIECFDSVEISGVEDRFNASLGTYHDLLKIIKDKDFLDNEENEDILEDIVLTLTLFEDREMIEERLKTYAHLFDDKVMKQLKRRRYTGWGRLSRKLINGIRDKQSGKTILDFLKSDGFANRNFMQLIHDDSLTFKEDIQKAQVSGQGDSLHEHIANLAGSPAIKKGILQTVKVVDELVKVMGRHKPENIVIEMARENQTTQKGQKNSRERMKRIEEGIKELGSQILKEHPVENTQLQNEKLYLYYLQNGRDMYVDQELDINRLSDYDVDHIVPQSFLKDDSIDNKVLTRSDKARGKSDNVPSEEVVKKMKNYWRQLLNAKLITQRKFDNLTKAERGGLSELDKAGFIKRQLVETRQITKHVAQILDSRMNTKYDENDKLIREVKVITLKSKLVSDFRKDFQFYKVREINNYHHAHDAYLNAVVGTALIKKYPKLESEFVYGDYKVYDVRKMIAKSEQEIGKATAKYFFYSNIMNFFKTEITLANGEIRKRPLIETNGETGEIVWDKGRDFATVRKVLSMPQVNIVKKTEVQTGGFSKESILPKRNSDKLIARKKDWDPKKYGGFDSPTVAYSVLVVAKVEKGKSKKLKSVKELLGITIMERSSFEKNPIDFLEAKGYKEVKKDLIIKLPKYSLFELENGRKRMLASAGELQKGNELALPSKYVNFLYLASHYEKLKGSPEDNEQKQLFVEQHKHYLDEIIEQISEFSKRVILADANLDKVLSAYNKHRDKPIREQAENIIHLFTLTNLGAPAAFKYFDTTIDRKRYTSTKEVLDATLIHQSITGLYETRIDLSQLGGDGGGGSGGSGGSGGSGGMNPLQLLQPLPAEIKGTKLLAHWNSGATITCIPESFLEDEQPIKKTLIKTIHGEKQQNVYYVTFKVKGRKVEAEVIASPYEYILLSPTDVPWLTQQPLQLTILVPLQEYQEKILSKTALPEDQKQQLKTLFVKYDNLWQHWENQVGHRKIRPHNIATGDYPPRPQKQYPINPKAKPSIQIVIDDLLKQGVLTPQNSTMNTPVYPVPKPDGRWRMVLDYREVNKTIPLTAAQNQHSAGILATIVRQKYKTTLDLANGFWAHPITPESYWLTAFTWQGKQYCWTRLPQGFLNSPALFTADVVDLLKEIPNVQVYVDDIYLSHDDPKEHVQQLEKVFQILLQAGYVVSLKKSEIGQKTVEFLGFNITKEGRGLTDTFKTKLLNITPPKDLKQLQSILGLLNFARNFIPNFAELVQPLYNLIASAKGKYIEWSEENTKQLNMVIEALNTASNLEERLPEQRLVIKVNTSPSAGYVRYYNETGKKPIMYLNYVFSKAELKFSMLEKLLTTMHKALIKAMDLAMGQEILVYSPIVSMTKIQKTPLPERKALPIRWITWMTYLEDPRIQFHYDKTLPELKHIPDVYTSSQSPVKHPSQYEGVFYTDGSAIKSPDPTKSNNAGMGIVHATYKPEYQVLNQWSIPLGNHTAQMAEIAAVEFACKKALKIPGPVLVITDSFYVAESANKELPYWKSNGFVNNKKKPLKHISKWKSIAECLSMKPDITIQHEKGISLQIPVFILKGNALADKLATQGSYVVNAGKRTADGSEFEKRTADGSEFESPKKKAKVE

SEQ ID NO: 1290 - protein, 2174 aa, synthetic construct
MPAAKRVKLDGGDKKYSIGLDIGTNSVGWAVITDEYKVPSKKFKVLGNTDRHSIKKNLIGALLFDSGETAEATRLKRTARRRYTRRKNRICYLQEIFSNEMAKVDDSFFHRLEESFLVEEDKKHERHPIFGNIVDEVAYHEKYPTIYHLRKKLVDSTDKADLRLIYLALAHMIKFRGHFLIEGDLNPDNSDVDKLFIQLVQTYNQLFEENPINASGVDAKAILSARLSKSRRLENLIAQLPGEKKNGLFGNLIALSLGLTPNFKSNFDLAEDAKLQLSKDTYDDDLDNLLAQIGDQYADLFLAAKNLSDAILLSDILRVNTEITKAPLSASMIKRYDEHHQDLTLLKALVRQQLPEKYKEIFFDQSKNGYAGYIDGGASQEEFYKFIKPILEKMDGTEELLVKLNREDLLRKQRTFDNGSIPHQIHLGELHAILRRQEDFYPFLKDNREKIEKILTFRIPYYVGPLARGNSRFAWMTRKSEETITPWNFEEVVDKGASAQSFIERMTNFDKNLPNEKVLPKHSLLYEYFTVYNELTKVKYVTEGMRKPAFLSGEQKKAIVDLLFKTNRKVTVKQLKEDYFKKIECFDSVEISGVEDRFNASLGTYHDLLKIIKDKDFLDNEENEDILEDIVLTLTLFEDREMIEERLKTYAHLFDDKVMKQLKRRRYTGWGRLSRKLINGIRDKQSGKTILDFLKSDGFANRNFMQLIHDDSLTFKEDIQKAQVSGQGDSLHEHIANLAGSPAIKKGILQTVKVVDELVKVMGRHKPENIVIEMARENQTTQKGQKNSRERMKRIEEGIKELGSQILKEHPVENTQLQNEKLYLYYLQNGRDMYVDQELDINRLSDYDVDHIVPQSFLKDDSIDNKVLTRSDKARGKSDNVPSEEVVKKMKNYWRQLLNAKLITQRKFDNLTKAERGGLSELDKAGFIKRQLVETRQITKHVAQILDSRMNTKYDENDKLIREVKVITLKSKLVSDFRKDFQFYKVREINNYHHAHDAYLNAVVGTALIKKYPKLESEFVYGDYKVYDVRKMIAKSEQEIGKATAKYFFYSNIMNFFKTEITLANGEIRKRPLIETNGETGEIVWDKGRDFATVRKVLSMPQVNIVKKTEVQTGGFSKESILPKRNSDKLIARKKDWDPKKYGGFDSPTVAYSVLVVAKVEKGKSKKLKSVKELLGITIMERSSFEKNPIDFLEAKGYKEVKKDLIIKLPKYSLFELENGRKRMLASAGELQKGNELALPSKYVNFLYLASHYEKLKGSPEDNEQKQLFVEQHKHYLDEIIEQISEFSKRVILADANLDKVLSAYNKHRDKPIREQAENIIHLFTLTNLGAPAAFKYFDTTIDRKRYTSTKEVLDATLIHQSITGLYETRIDLSQLGGDGGGGSGGGPAPGGMNPLQLLQPLPAEIKGTKLLAHWNSGATITCIPESFLEDEQPIKKTLIKTIHGEKQQNVYYVTFKVKGRKVEAEVIASPYEYILLSPTDVPWLTQQPLQLTILVPLQEYQEKILSKTALPEDQKQQLKTLFVKYDNLWQHWENQVGHRKIRPHNIATGDYPPRPQKQYPINPKAKPSIQIVIDDLLKQGVLTPQNSTMNTPVYPVPKPDGRWRMVLDYREVNKTIPLTAAQNQHSAGILATIVRQKYKTTLDLANGFWAHPITPESYWLTAFTWQGKQYCWTRLPQGFLNSPALFTADVVDLLKEIPNVQVYVDDIYLSHDDPKEHVQQLEKVFQILLQAGYVVSLKKSEIGQKTVEFLGFNITKEGRGLTDTFKTKLLNITPPKDLKQLQSILGLLNFARNFIPNFAELVQPLYNLIASAKGKYIEWSEENTKQLNMVIEALNTASNLEERLPEQRLVIKVNTSPSAGYVRYYNETGKKPIMYLNYVFSKAELKFSMLEKLLTTMHKALIKAMDLAMGQEILVYSPIVSMTKIQKTPLPERKALPIRWITWMTYLEDPRIQFHYDKTLPELKHIPDVYTSSQSPVKHPSQYEGVFYTDGSAIKSPDPTKSNNAGMGIVHATYKPEYQVLNQWSIPLGNHTAQMAEIAAVEFACKKALKIPGPVLVITDSFYVAESANKELPYWKSNGFVNNKKKPLKHISKWKSIAECLSMKPDITIQHEKGISLQIPVFILKGNALADKLATQGSYVVNAGKRTADGSEFEKRTADGSEFESPKKKAKVE

SEQ ID NO: 1291 - protein, 2176 aa, synthetic construct
MPAAKRVKLDGGDKKYSIGLDIGTNSVGWAVITDEYKVPSKKFKVLGNTDRHSIKKNLIGALLFDSGETAEATRLKRTARRRYTRRKNRICYLQEIFSNEMAKVDDSFFHRLEESFLVEEDKKHERHPIFGNIVDEVAYHEKYPTIYHLRKKLVDSTDKADLRLIYLALAHMIKFRGHFLIEGDLNPDNSDVDKLFIQLVQTYNQLFEENPINASGVDAKAILSARLSKSRRLENLIAQLPGEKKNGLFGNLIALSLGLTPNFKSNFDLAEDAKLQLSKDTYDDDLDNLLAQIGDQYADLFLAAKNLSDAILLSDILRVNTEITKAPLSASMIKRYDEHHQDLTLLKALVRQQLPEKYKEIFFDQSKNGYAGYIDGGASQEEFYKFIKPILEKMDGTEELLVKLNREDLLRKQRTFDNGSIPHQIHLGELHAILRRQEDFYPFLKDNREKIEKILTFRIPYYVGPLARGNSRFAWMTRKSEETITPWNFEEVVDKGASAQSFIERMTNFDKNLPNEKVLPKHSLLYEYFTVYNELTKVKYVTEGMRKPAFLSGEQKKAIVDLLFKTNRKVTVKQLKEDYFKKIECFDSVEISGVEDRFNASLGTYHDLLKIIKDKDFLDNEENEDILEDIVLTLTLFEDREMIEERLKTYAHLFDDKVMKQLKRRRYTGWGRLSRKLINGIRDKQSGKTILDFLKSDGFANRNFMQLIHDDSLTFKEDIQKAQVSGQGDSLHEHIANLAGSPAIKKGILQTVKVVDELVKVMGRHKPENIVIEMARENQTTQKGQKNSRERMKRIEEGIKELGSQILKEHPVENTQLQNEKLYLYYLQNGRDMYVDQELDINRLSDYDVDHIVPQSFLKDDSIDNKVLTRSDKARGKSDNVPSEEVVKKMKNYWRQLLNAKLITQRKFDNLTKAERGGLSELDKAGFIKRQLVETRQITKHVAQILDSRMNTKYDENDKLIREVKVITLKSKLVSDFRKDFQFYKVREINNYHHAHDAYLNAVVGTALIKKYPKLESEFVYGDYKVYDVRKMIAKSEQEIGKATAKYFFYSNIMNFFKTEITLANGEIRKRPLIETNGETGEIVWDKGRDFATVRKVLSMPQVNIVKKTEVQTGGFSKESILPKRNSDKLIARKKDWDPKKYGGFDSPTVAYSVLVVAKVEKGKSKKLKSVKELLGITIMERSSFEKNPIDFLEAKGYKEVKKDLIIKLPKYSLFELENGRKRMLASAGELQKGNELALPSKYVNFLYLASHYEKLKGSPEDNEQKQLFVEQHKHYLDEIIEQISEFSKRVILADANLDKVLSAYNKHRDKPIREQAENIIHLFTLTNLGAPAAFKYFDTTIDRKRYTSTKEVLDATLIHQSITGLYETRIDLSQLGGDGGPAPGGSEAAAKGGMNPLQLLQPLPAEIKGTKLLAHWNSGATITCIPESFLEDEQPIKKTLIKTIHGEKQQNVYYVTFKVKGRKVEAEVIASPYEYILLSPTDVPWLTQQPLQLTILVPLQEYQEKILSKTALPEDQKQQLKTLFVKYDNLWQHWENQVGHRKIRPHNIATGDYPPRPQKQYPINPKAKPSIQIVIDDLLKQGVLTPQNSTMNTPVYPVPKPDGRWRMVLDYREVNKTIPLTAAQNQHSAGILATIVRQKYKTTLDLANGFWAHPITPESYWLTAFTWQGKQYCWTRLPQGFLNSPALFTADVVDLLKEIPNVQVYVDDIYLSHDDPKEHVQQLEKVFQILLQAGYVVSLKKSEIGQKTVEFLGFNITKEGRGLTDTFKTKLLNITPPKDLKQLQSILGLLNFARNFIPNFAELVQPLYNLIASAKGKYIEWSEENTKQLNMVIEALNTASNLEERLPEQRLVIKVNTSPSAGYVRYYNETGKKPIMYLNYVFSKAELKFSMLEKLLTTMHKALIKAMDLAMGQEILVYSPIVSMTKIQKTPLPERKALPIRWITWMTYLEDPRIQFHYDKTLPELKHIPDVYTSSQSPVKHPSQYEGVFYTDGSAIKSPDPTKSNNAGMGIVHATYKPEYQVLNQWSIPLGNHTAQMAEIAAVEFACKKALKIPGPVLVITDSFYVAESANKELPYWKSNGFVNNKKKPLKHISKWKSIAECLSMKPDITIQHEKGISLQIPVFILKGNALADKLATQGSYVVNAGKRTADGSEFEKRTADGSEFESPKKKAKVE

SEQ ID NO: 1292 - protein, 2173 aa, synthetic construct
MPAAKRVKLDGGDKKYSIGLDIGTNSVGWAVITDEYKVPSKKFKVLGNTDRHSIKKNLIGALLFDSGETAEATRLKRTARRRYTRRKNRICYLQEIFSNEMAKVDDSFFHRLEESFLVEEDKKHERHPIFGNIVDEVAYHEKYPTIYHLRKKLVDSTDKADLRLIYLALAHMIKFRGHFLIEGDLNPDNSDVDKLFIQLVQTYNQLFEENPINASGVDAKAILSARLSKSRRLENLIAQLPGEKKNGLFGNLIALSLGLTPNFKSNFDLAEDAKLQLSKDTYDDDLDNLLAQIGDQYADLFLAAKNLSDAILLSDILRVNTEITKAPLSASMIKRYDEHHQDLTLLKALVRQQLPEKYKEIFFDQSKNGYAGYIDGGASQEEFYKFIKPILEKMDGTEELLVKLNREDLLRKQRTFDNGSIPHQIHLGELHAILRRQEDFYPFLKDNREKIEKILTFRIPYYVGPLARGNSRFAWMTRKSEETITPWNFEEVVDKGASAQSFIERMTNFDKNLPNEKVLPKHSLLYEYFTVYNELTKVKYVTEGMRKPAFLSGEQKKAIVDLLFKTNRKVTVKQLKEDYFKKIECFDSVEISGVEDRFNASLGTYHDLLKIIKDKDFLDNEENEDILEDIVLTLTLFEDREMIEERLKTYAHLFDDKVMKQLKRRRYTGWGRLSRKLINGIRDKQSGKTILDFLKSDGFANRNFMQLIHDDSLTFKEDIQKAQVSGQGDSLHEHIANLAGSPAIKKGILQTVKVVDELVKVMGRHKPENIVIEMARENQTTQKGQKNSRERMKRIEEGIKELGSQILKEHPVENTQLQNEKLYLYYLQNGRDMYVDQELDINRLSDYDVDHIVPQSFLKDDSIDNKVLTRSDKARGKSDNVPSEEVVKKMKNYWRQLLNAKLITQRKFDNLTKAERGGLSELDKAGFIKRQLVETRQITKHVAQILDSRMNTKYDENDKLIREVKVITLKSKLVSDFRKDFQFYKVREINNYHHAHDAYLNAVVGTALIKKYPKLESEFVYGDYKVYDVRKMIAKSEQEIGKATAKYFFYSNIMNFFKTEITLANGEIRKRPLIETNGETGEIVWDKGRDFATVRKVLSMPQVNIVKKTEVQTGGFSKESILPKRNSDKLIARKKDWDPKKYGGFDSPTVAYSVLVVAKVEKGKSKKLKSVKELLGITIMERSSFEKNPIDFLEAKGYKEVKKDLIIKLPKYSLFELENGRKRMLASAGELQKGNELALPSKYVNFLYLASHYEKLKGSPEDNEQKQLFVEQHKHYLDEIIEQISEFSKRVILADANLDKVLSAYNKHRDKPIREQAENIIHLFTLTNLGAPAAFKYFDTTIDRKRYTSTKEVLDATLIHQSITGLYETRIDLSQLGGDGGGSSEAAAKGGMNPLQLLQPLPAEIKGTKLLAHWNSGATITCIPESFLEDEQPIKKTLIKTIHGEKQQNVYYVTFKVKGRKVEAEVIASPYEYILLSPTDVPWLTQQPLQLTILVPLQEYQEKILSKTALPEDQKQQLKTLFVKYDNLWQHWENQVGHRKIRPHNIATGDYPPRPQKQYPINPKAKPSIQIVIDDLLKQGVLTPQNSTMNTPVYPVPKPDGRWRMVLDYREVNKTIPLTAAQNQHSAGILATIVRQKYKTTLDLANGFWAHPITPESYWLTAFTWQGKQYCWTRLPQGFLNSPALFTADVVDLLKEIPNVQVYVDDIYLSHDDPKEHVQQLEKVFQILLQAGYVVSLKKSEIGQKTVEFLGFNITKEGRGLTDTFKTKLLNITPPKDLKQLQSILGLLNFARNFIPNFAELVQPLYNLIASAKGKYIEWSEENTKQLNMVIEALNTASNLEERLPEQRLVIKVNTSPSAGYVRYYNETGKKPIMYLNYVFSKAELKFSMLEKLLTTMHKALIKAMDLAMGQEILVYSPIVSMTKIQKTPLPERKALPIRWITWMTYLEDPRIQFHYDKTLPELKHIPDVYTSSQSPVKHPSQYEGVFYTDGSAIKSPDPTKSNNAGMGIVHATYKPEYQVLNQWSIPLGNHTAQMAEIAAVEFACKKALKIPGPVLVITDSFYVAESANKELPYWKSNGFVNNKKKPLKHISKWKSIAECLSMKPDITIQHEKGISLQIPVFILKGNALADKLATQGSYVVNAGKRTADGSEFEKRTADGSEFESPKKKAKVE

SEQ ID NO: 1293 - protein, 2176 aa, synthetic construct
MPAAKRVKLDGGDKKYSIGLDIGTNSVGWAVITDEYKVPSKKFKVLGNTDRHSIKKNLIGALLFDSGETAEATRLKRTARRRYTRRKNRICYLQEIFSNEMAKVDDSFFHRLEESFLVEEDKKHERHPIFGNIVDEVAYHEKYPTIYHLRKKLVDSTDKADLRLIYLALAHMIKFRGHFLIEGDLNPDNSDVDKLFIQLVQTYNQLFEENPINASGVDAKAILSARLSKSRRLENLIAQLPGEKKNGLFGNLIALSLGLTPNFKSNFDLAEDAKLQLSKDTYDDDLDNLLAQIGDQYADLFLAAKNLSDAILLSDILRVNTEITKAPLSASMIKRYDEHHQDLTLLKALVRQQLPEKYKEIFFDQSKNGYAGYIDGGASQEEFYKFIKPILEKMDGTEELLVKLNREDLLRKQRTFDNGSIPHQIHLGELHAILRRQEDFYPFLKDNREKIEKILTFRIPYYVGPLARGNSRFAWMTRKSEETITPWNFEEVVDKGASAQSFIERMTNFDKNLPNEKVLPKHSLLYEYFTVYNELTKVKYVTEGMRKPAFLSGEQKKAIVDLLFKTNRKVTVKQLKEDYFKKIECFDSVEISGVEDRFNASLGTYHDLLKIIKDKDFLDNEENEDILEDIVLTLTLFEDREMIEERLKTYAHLFDDKVMKQLKRRRYTGWGRLSRKLINGIRDKQSGKTILDFLKSDGFANRNFMQLIHDDSLTFKEDIQKAQVSGQGDSLHEHIANLAGSPAIKKGILQTVKVVDELVKVMGRHKPENIVIEMARENQTTQKGQKNSRERMKRIEEGIKELGSQILKEHPVENTQLQNEKLYLYYLQNGRDMYVDQELDINRLSDYDVDHIVPQSFLKDDSIDNKVLTRSDKARGKSDNVPSEEVVKKMKNYWRQLLNAKLITQRKFDNLTKAERGGLSELDKAGFIKRQLVETRQITKHVAQILDSRMNTKYDENDKLIREVKVITLKSKLVSDFRKDFQFYKVREINNYHHAHDAYLNAVVGTALIKKYPKLESEFVYGDYKVYDVRKMIAKSEQEIGKATAKYFFYSNIMNFFKTEITLANGEIRKRPLIETNGETGEIVWDKGRDFATVRKVLSMPQVNIVKKTEVQTGGFSKESILPKRNSDKLIARKKDWDPKKYGGFDSPTVAYSVLVVAKVEKGKSKKLKSVKELLGITIMERSSFEKNPIDFLEAKGYKEVKKDLIIKLPKYSLFELENGRKRMLASAGELQKGNELALPSKYVNFLYLASHYEKLKGSPEDNEQKQLFVEQHKHYLDEIIEQISEFSKRVILADANLDKVLSAYNKHRDKPIREQAENIIHLFTLTNLGAPAAFKYFDTTIDRKRYTSTKEVLDATLIHQSITGLYETRIDLSQLGGDGGGGSGSSEAAAKGGMNPLQLLQPLPAEIKGTKLLAHWNSGATITCIPESFLEDEQPIKKTLIKTIHGEKQQNVYYVTFKVKGRKVEAEVIASPYEYILLSPTDVPWLTQQPLQLTILVPLQEYQEKILSKTALPEDQKQQLKTLFVKYDNLWQHWENQVGHRKIRPHNIATGDYPPRPQKQYPINPKAKPSIQIVIDDLLKQGVLTPQNSTMNTPVYPVPKPDGRWRMVLDYREVNKTIPLTAAQNQHSAGILATIVRQKYKTTLDLANGFWAHPITPESYWLTAFTWQGKQYCWTRLPQGFLNSPALFTADVVDLLKEIPNVQVYVDDIYLSHDDPKEHVQQLEKVFQILLQAGYVVSLKKSEIGQKTVEFLGFNITKEGRGLTDTFKTKLLNITPPKDLKQLQSILGLLNFARNFIPNFAELVQPLYNLIASAKGKYIEWSEENTKQLNMVIEALNTASNLEERLPEQRLVIKVNTSPSAGYVRYYNETGKKPIMYLNYVFSKAELKFSMLEKLLTTMHKALIKAMDLAMGQEILVYSPIVSMTKIQKTPLPERKALPIRWITWMTYLEDPRIQFHYDKTLPELKHIPDVYTSSQSPVKHPSQYEGVFYTDGSAIKSPDPTKSNNAGMGIVHATYKPEYQVLNQWSIPLGNHTAQMAEIAAVEFACKKALKIPGPVLVITDSFYVAESANKELPYWKSNGFVNNKKKPLKHISKWKSIAECLSMKPDITIQHEKGISLQIPVFILKGNALADKLATQGSYVVNAGKRTADGSEFEKRTADGSEFESPKKKAKVE

SEQ ID NO: 1294 - protein, 2171 aa, synthetic construct
MPAAKRVKLDGGDKKYSIGLDIGTNSVGWAVITDEYKVPSKKFKVLGNTDRHSIKKNLIGALLFDSGETAEATRLKRTARRRYTRRKNRICYLQEIFSNEMAKVDDSFFHRLEESFLVEEDKKHERHPIFGNIVDEVAYHEKYPTIYHLRKKLVDSTDKADLRLIYLALAHMIKFRGHFLIEGDLNPDNSDVDKLFIQLVQTYNQLFEENPINASGVDAKAILSARLSKSRRLENLIAQLPGEKKNGLFGNLIALSLGLTPNFKSNFDLAEDAKLQLSKDTYDDDLDNLLAQIGDQYADLFLAAKNLSDAILLSDILRVNTEITKAPLSASMIKRYDEHHQDLTLLKALVRQQLPEKYKEIFFDQSKNGYAGYIDGGASQEEFYKFIKPILEKMDGTEELLVKLNREDLLRKQRTFDNGSIPHQIHLGELHAILRRQEDFYPFLKDNREKIEKILTFRIPYYVGPLARGNSRFAWMTRKSEETITPWNFEEVVDKGASAQSFIERMTNFDKNLPNEKVLPKHSLLYEYFTVYNELTKVKYVTEGMRKPAFLSGEQKKAIVDLLFKTNRKVTVKQLKEDYFKKIECFDSVEISGVEDRFNASLGTYHDLLKIIKDKDFLDNEENEDILEDIVLTLTLFEDREMIEERLKTYAHLFDDKVMKQLKRRRYTGWGRLSRKLINGIRDKQSGKTILDFLKSDGFANRNFMQLIHDDSLTFKEDIQKAQVSGQGDSLHEHIANLAGSPAIKKGILQTVKVVDELVKVMGRHKPENIVIEMARENQTTQKGQKNSRERMKRIEEGIKELGSQILKEHPVENTQLQNEKLYLYYLQNGRDMYVDQELDINRLSDYDVDHIVPQSFLKDDSIDNKVLTRSDKARGKSDNVPSEEVVKKMKNYWRQLLNAKLITQRKFDNLTKAERGGLSELDKAGFIKRQLVETRQITKHVAQILDSRMNTKYDENDKLIREVKVITLKSKLVSDFRKDFQFYKVREINNYHHAHDAYLNAVVGTALIKKYPKLESEFVYGDYKVYDVRKMIAKSEQEIGKATAKYFFYSNIMNFFKTEITLANGEIRKRPLIETNGETGEIVWDKGRDFATVRKVLSMPQVNIVKKTEVQTGGFSKESILPKRNSDKLIARKKDWDPKKYGGFDSPTVAYSVLVVAKVEKGKSKKLKSVKELLGITIMERSSFEKNPIDFLEAKGYKEVKKDLIIKLPKYSLFELENGRKRMLASAGELQKGNELALPSKYVNFLYLASHYEKLKGSPEDNEQKQLFVEQHKHYLDEIIEQISEFSKRVILADANLDKVLSAYNKHRDKPIREQAENIIHLFTLTNLGAPAAFKYFDTTIDRKRYTSTKEVLDATLIHQSITGLYETRIDLSQLGGDGGGGSGGSGGMNPLQLLQPLPAEIKGTKLLAHWNSGATITCIPESFLEDEQPIKKTLIKTIHGEKQQNVYYVTFKVKGRKVEAEVIASPYEYILLSPTDVPWLTQQPLQLTILVPLQEYQEKILSKTALPEDQKQQLKTLFVKYDNLWQHWENQVGHRKIRPHNIATGDYPPRPQKQYPINPKAKPSIQIVIDDLLKQGVLTPQNSTMNTPVYPVPKPDGRWRMVLDYREVNKTIPLTAAQNQHSAGILATIVRQKYKTTLDLANGFWAHPITPESYWLTAFTWQGKQYCWTRLPQGFLNSPALFTADVVDLLKEIPNVQVYVDDIYLSHDDPKEHVQQLEKVFQILLQAGYVVSLKKSEIGQKTVEFLGFNITKEGRGLTDTFKTKLLNITPPKDLKQLQSILGLLNFARNFIPNFAELVQPLYNLIASAKGKYIEWSEENTKQLNMVIEALNTASNLEERLPEQRLVIKVNTSPSAGYVRYYNETGKKPIMYLNYVFSKAELKFSMLEKLLTTMHKALIKAMDLAMGQEILVYSPIVSMTKIQKTPLPERKALPIRWITWMTYLEDPRIQFHYDKTLPELKHIPDVYTSSQSPVKHPSQYEGVFYTDGSAIKSPDPTKSNNAGMGIVHATYKPEYQVLNQWSIPLGNHTAQMAEIAAVEFACKKALKIPGPVLVITDSFYVAESANKELPYWKSNGFVNNKKKPLKHISKWKSIAECLSMKPDITIQHEKGISLQIPVFILKGNALADKLATQGSYVVNAGKRTADGSEFEKRTADGSEFESPKKKAKVE

SEQ ID NO: 1295 - protein, 2084 aa, synthetic construct
MPAAKRVKLDGGDKKYSIGLDIGTNSVGWAVITDEYKVPSKKFKVLGNTDRHSIKKNLIGALLFDSGETAEATRLKRTARRRYTRRKNRICYLQEIFSNEMAKVDDSFFHRLEESFLVEEDKKHERHPIFGNIVDEVAYHEKYPTIYHLRKKLVDSTDKADLRLIYLALAHMIKFRGHFLIEGDLNPDNSDVDKLFIQLVQTYNQLFEENPINASGVDAKAILSARLSKSRRLENLIAQLPGEKKNGLFGNLIALSLGLTPNFKSNFDLAEDAKLQLSKDTYDDDLDNLLAQIGDQYADLFLAAKNLSDAILLSDILRVNTEITKAPLSASMIKRYDEHHQDLTLLKALVRQQLPEKYKEIFFDQSKNGYAGYIDGGASQEEFYKFIKPILEKMDGTEELLVKLNREDLLRKQRTFDNGSIPHQIHLGELHAILRRQEDFYPFLKDNREKIEKILTFRIPYYVGPLARGNSRFAWMTRKSEETITPWNFEEVVDKGASAQSFIERMTNFDKNLPNEKVLPKHSLLYEYFTVYNELTKVKYVTEGMRKPAFLSGEQKKAIVDLLFKTNRKVTVKQLKEDYFKKIECFDSVEISGVEDRFNASLGTYHDLLKIIKDKDFLDNEENEDILEDIVLTLTLFEDREMIEERLKTYAHLFDDKVMKQLKRRRYTGWGRLSRKLINGIRDKQSGKTILDFLKSDGFANRNFMQLIHDDSLTFKEDIQKAQVSGQGDSLHEHIANLAGSPAIKKGILQTVKVVDELVKVMGRHKPENIVIEMARENQTTQKGQKNSRERMKRIEEGIKELGSQILKEHPVENTQLQNEKLYLYYLQNGRDMYVDQELDINRLSDYDVDHIVPQSFLKDDSIDNKVLTRSDKARGKSDNVPSEEVVKKMKNYWRQLLNAKLITQRKFDNLTKAERGGLSELDKAGFIKRQLVETRQITKHVAQILDSRMNTKYDENDKLIREVKVITLKSKLVSDFRKDFQFYKVREINNYHHAHDAYLNAVVGTALIKKYPKLESEFVYGDYKVYDVRKMIAKSEQEIGKATAKYFFYSNIMNFFKTEITLANGEIRKRPLIETNGETGEIVWDKGRDFATVRKVLSMPQVNIVKKTEVQTGGFSKESILPKRNSDKLIARKKDWDPKKYGGFDSPTVAYSVLVVAKVEKGKSKKLKSVKELLGITIMERSSFEKNPIDFLEAKGYKEVKKDLIIKLPKYSLFELENGRKRMLASAGELQKGNELALPSKYVNFLYLASHYEKLKGSPEDNEQKQLFVEQHKHYLDEIIEQISEFSKRVILADANLDKVLSAYNKHRDKPIREQAENIIHLFTLTNLGAPAAFKYFDTTIDRKRYTSTKEVLDATLIHQSITGLYETRIDLSQLGGDGGEAAAKPAPGGVPWLTQQPLQLTILVPLQEYQEKILSKTALPEDQKQQLKTLFVKYDNLWQHWENQVGHRKIRPHNIATGDYPPRPQKQYPINPKAKPSIQIVIDDLLKQGVLTPQNSTMNTPVYPVPKPDGRWRMVLDYREVNKTIPLTAAQNQHSAGILATIVRQKYKTTLDLANGFWAHPITPESYWLTAFTWQGKQYCWTRLPQGFLNSPALFTADVVDLLKEIPNVQVYVDDIYLSHDDPKEHVQQLEKVFQILLQAGYVVSLKKSEIGQKTVEFLGFNITKEGRGLTDTFKTKLLNITPPKDLKQLQSILGLLNFARNFIPNFAELVQPLYNLIASAKGKYIEWSEENTKQLNMVIEALNTASNLEERLPEQRLVIKVNTSPSAGYVRYYNETGKKPIMYLNYVFSKAELKFSMLEKLLTTMHKALIKAMDLAMGQEILVYSPIVSMTKIQKTPLPERKALPIRWITWMTYLEDPRIQFHYDKTLPELKHIPDVYTSSQSPVKHPSQYEGVFYTDGSAIKSPDPTKSNNAGMGIVHATYKPEYQVLNQWSIPLGNHTAQMAEIAAVEFACKKALKIPGPVLVITDSFYVAESANKELPYWKSNGFVNNKKKPLKHISKWKSIAECLSMKPDITIQHEKGISLQIPVFILKGNALADKLATQGSYVVNAGKRTADGSEFEKRTADGSEFESPKKKAKVE

SEQ ID NO: 1296 - protein, 2087 aa, synthetic construct
MPAAKRVKLDGGDKKYSIGLDIGTNSVGWAVITDEYKVPSKKFKVLGNTDRHSIKKNLIGALLFDSGETAEATRLKRTARRRYTRRKNRICYLQEIFSNEMAKVDDSFFHRLEESFLVEEDKKHERHPIFGNIVDEVAYHEKYPTIYHLRKKLVDSTDKADLRLIYLALAHMIKFRGHFLIEGDLNPDNSDVDKLFIQLVQTYNQLFEENPINASGVDAKAILSARLSKSRRLENLIAQLPGEKKNGLFGNLIALSLGLTPNFKSNFDLAEDAKLQLSKDTYDDDLDNLLAQIGDQYADLFLAAKNLSDAILLSDILRVNTEITKAPLSASMIKRYDEHHQDLTLLKALVRQQLPEKYKEIFFDQSKNGYAGYIDGGASQEEFYKFIKPILEKMDGTEELLVKLNREDLLRKQRTFDNGSIPHQIHLGELHAILRRQEDFYPFLKDNREKIEKILTFRIPYYVGPLARGNSRFAWMTRKSEETITPWNFEEVVDKGASAQSFIERMTNFDKNLPNEKVLPKHSLLYEYFTVYNELTKVKYVTEGMRKPAFLSGEQKKAIVDLLFKTNRKVTVKQLKEDYFKKIECFDSVEISGVEDRFNASLGTYHDLLKIIKDKDFLDNEENEDILEDIVLTLTLFEDREMIEERLKTYAHLFDDKVMKQLKRRRYTGWGRLSRKLINGIRDKQSGKTILDFLKSDGFANRNFMQLIHDDSLTFKEDIQKAQVSGQGDSLHEHIANLAGSPAIKKGILQTVKVVDELVKVMGRHKPENIVIEMARENQTTQKGQKNSRERMKRIEEGIKELGSQILKEHPVENTQLQNEKLYLYYLQNGRDMYVDQELDINRLSDYDVDHIVPQSFLKDDSIDNKVLTRSDKARGKSDNVPSEEVVKKMKNYWRQLLNAKLITQRKFDNLTKAERGGLSELDKAGFIKRQLVETRQITKHVAQILDSRMNTKYDENDKLIREVKVITLKSKLVSDFRKDFQFYKVREINNYHHAHDAYLNAVVGTALIKKYPKLESEFVYGDYKVYDVRKMIAKSEQEIGKATAKYFFYSNIMNFFKTEITLANGEIRKRPLIETNGETGEIVWDKGRDFATVRKVLSMPQVNIVKKTEVQTGGFSKESILPKRNSDKLIARKKDWDPKKYGGFDSPTVAYSVLVVAKVEKGKSKKLKSVKELLGITIMERSSFEKNPIDFLEAKGYKEVKKDLIIKLPKYSLFELENGRKRMLASAGELQKGNELALPSKYVNFLYLASHYEKLKGSPEDNEQKQLFVEQHKHYLDEIIEQISEFSKRVILADANLDKVLSAYNKHRDKPIREQAENIIHLFTLTNLGAPAAFKYFDTTIDRKRYTSTKEVLDATLIHQSITGLYETRIDLSQLGGDGGEAAAKGSSGGSGGVPWLTQQPLQLTILVPLQEYQEKILSKTALPEDQKQQLKTLFVKYDNLWQHWENQVGHRKIRPHNIATGDYPPRPQKQYPINPKAKPSIQIVIDDLLKQGVLTPQNSTMNTPVYPVPKPDGRWRMVLDYREVNKTIPLTAAQNQHSAGILATIVRQKYKTTLDLANGFWAHPITPESYWLTAFTWQGKQYCWTRLPQGFLNSPALFTADVVDLLKEIPNVQVYVDDIYLSHDDPKEHVQQLEKVFQILLQAGYVVSLKKSEIGQKTVEFLGFNITKEGRGLTDTFKTKLLNITPPKDLKQLQSILGLLNFARNFIPNFAELVQPLYNLIASAKGKYIEWSEENTKQLNMVIEALNTASNLEERLPEQRLVIKVNTSPSAGYVRYYNETGKKPIMYLNYVFSKAELKFSMLEKLLTTMHKALIKAMDLAMGQEILVYSPIVSMTKIQKTPLPERKALPIRWITWMTYLEDPRIQFHYDKTLPELKHIPDVYTSSQSPVKHPSQYEGVFYTDGSAIKSPDPTKSNNAGMGIVHATYKPEYQVLNQWSIPLGNHTAQMAEIAAVEFACKKALKIPGPVLVITDSFYVAESANKELPYWKSNGFVNNKKKPLKHISKWKSIAECLSMKPDITIQHEKGISLQIPVFILKGNALADKLATQGSYVVNAGKRTADGSEFEKRTADGSEFESPKKKAKVE

SEQ ID NO: 1297 - protein, 2094 aa, synthetic construct
MPAAKRVKLDGGDKKYSIGLDIGTNSVGWAVITDEYKVPSKKFKVLGNTDRHSIKKNLIGALLFDSGETAEATRLKRTARRRYTRRKNRICYLQEIFSNEMAKVDDSFFHRLEESFLVEEDKKHERHPIFGNIVDEVAYHEKYPTIYHLRKKLVDSTDKADLRLIYLALAHMIKFRGHFLIEGDLNPDNSDVDKLFIQLVQTYNQLFEENPINASGVDAKAILSARLSKSRRLENLIAQLPGEKKNGLFGNLIALSLGLTPNFKSNFDLAEDAKLQLSKDTYDDDLDNLLAQIGDQYADLFLAAKNLSDAILLSDILRVNTEITKAPLSASMIKRYDEHHQDLTLLKALVRQQLPEKYKEIFFDQSKNGYAGYIDGGASQEEFYKFIKPILEKMDGTEELLVKLNREDLLRKQRTFDNGSIPHQIHLGELHAILRRQEDFYPFLKDNREKIEKILTFRIPYYVGPLARGNSRFAWMTRKSEETITPWNFEEVVDKGASAQSFIERMTNFDKNLPNEKVLPKHSLLYEYFTVYNELTKVKYVTEGMRKPAFLSGEQKKAIVDLLFKTNRKVTVKQLKEDYFKKIECFDSVEISGVEDRFNASLGTYHDLLKIIKDKDFLDNEENEDILEDIVLTLTLFEDREMIEERLKTYAHLFDDKVMKQLKRRRYTGWGRLSRKLINGIRDKQSGKTILDFLKSDGFANRNFMQLIHDDSLTFKEDIQKAQVSGQGDSLHEHIANLAGSPAIKKGILQTVKVVDELVKVMGRHKPENIVIEMARENQTTQKGQKNSRERMKRIEEGIKELGSQILKEHPVENTQLQNEKLYLYYLQNGRDMYVDQELDINRLSDYDVDHIVPQSFLKDDSIDNKVLTRSDKARGKSDNVPSEEVVKKMKNYWRQLLNAKLITQRKFDNLTKAERGGLSELDKAGFIKRQLVETRQITKHVAQILDSRMNTKYDENDKLIREVKVITLKSKLVSDFRKDFQFYKVREINNYHHAHDAYLNAVVGTALIKKYPKLESEFVYGDYKVYDVRKMIAKSEQEIGKATAKYFFYSNIMNFFKTEITLANGEIRKRPLIETNGETGEIVWDKGRDFATVRKVLSMPQVNIVKKTEVQTGGFSKESILPKRNSDKLIARKKDWDPKKYGGFDSPTVAYSVLVVAKVEKGKSKKLKSVKELLGITIMERSSFEKNPIDFLEAKGYKEVKKDLIIKLPKYSLFELENGRKRMLASAGELQKGNELALPSKYVNFLYLASHYEKLKGSPEDNEQKQLFVEQHKHYLDEIIEQISEFSKRVILADANLDKVLSAYNKHRDKPIREQAENIIHLFTLTNLGAPAAFKYFDTTIDRKRYTSTKEVLDATLIHQSITGLYETRIDLSQLGGDGGGSSGSSGSSGSSGSSGSSGGVPWLTQQPLQLTILVPLQEYQEKILSKTALPEDQKQQLKTLFVKYDNLWQHWENQVGHRKIRPHNIATGDYPPRPQKQYPINPKAKPSIQIVIDDLLKQGVLTPQNSTMNTPVYPVPKPDGRWRMVLDYREVNKTIPLTAAQNQHSAGILATIVRQKYKTTLDLANGFWAHPITPESYWLTAFTWQGKQYCWTRLPQGFLNSPALFTADVVDLLKEIPNVQVYVDDIYLSHDDPKEHVQQLEKVFQILLQAGYVVSLKKSEIGQKTVEFLGFNITKEGRGLTDTFKTKLLNITPPKDLKQLQSILGLLNFARNFIPNFAELVQPLYNLIASAKGKYIEWSEENTKQLNMVIEALNTASNLEERLPEQRLVIKVNTSPSAGYVRYYNETGKKPIMYLNYVFSKAELKFSMLEKLLTTMHKALIKAMDLAMGQEILVYSPIVSMTKIQKTPLPERKALPIRWITWMTYLEDPRIQFHYDKTLPELKHIPDVYTSSQSPVKHPSQYEGVFYTDGSAIKSPDPTKSNNAGMGIVHATYKPEYQVLNQWSIPLGNHTAQMAEIAAVEFACKKALKIPGPVLVITDSFYVAESANKELPYWKSNGFVNNKKKPLKHISKWKSIAECLSMKPDITIQHEKGISLQIPVFILKGNALADKLATQGSYVVNAGKRTADGSEFEKRTADGSEFESPKKKAKVE

SEQ ID NO: 1298 - protein, 2122 aa, synthetic construct
MPAAKRVKLDGGDKKYSIGLDIGTNSVGWAVITDEYKVPSKKFKVLGNTDRHSIKKNLIGALLFDSGETAEATRLKRTARRRYTRRKNRICYLQEIFSNEMAKVDDSFFHRLEESFLVEEDKKHERHPIFGNIVDEVAYHEKYPTIYHLRKKLVDSTDKADLRLIYLALAHMIKFRGHFLIEGDLNPDNSDVDKLFIQLVQTYNQLFEENPINASGVDAKAILSARLSKSRRLENLIAQLPGEKKNGLFGNLIALSLGLTPNFKSNFDLAEDAKLQLSKDTYDDDLDNLLAQIGDQYADLFLAAKNLSDAILLSDILRVNTEITKAPLSASMIKRYDEHHQDLTLLKALVRQQLPEKYKEIFFDQSKNGYAGYIDGGASQEEFYKFIKPILEKMDGTEELLVKLNREDLLRKQRTFDNGSIPHQIHLGELHAILRRQEDFYPFLKDNREKIEKILTFRIPYYVGPLARGNSRFAWMTRKSEETITPWNFEEVVDKGASAQSFIERMTNFDKNLPNEKVLPKHSLLYEYFTVYNELTKVKYVTEGMRKPAFLSGEQKKAIVDLLFKTNRKVTVKQLKEDYFKKIECFDSVEISGVEDRFNASLGTYHDLLKIIKDKDFLDNEENEDILEDIVLTLTLFEDREMIEERLKTYAHLFDDKVMKQLKRRRYTGWGRLSRKLINGIRDKQSGKTILDFLKSDGFANRNFMQLIHDDSLTFKEDIQKAQVSGQGDSLHEHIANLAGSPAIKKGILQTVKVVDELVKVMGRHKPENIVIEMARENQTTQKGQKNSRERMKRIEEGIKELGSQILKEHPVENTQLQNEKLYLYYLQNGRDMYVDQELDINRLSDYDVDHIVPQSFLKDDSIDNKVLTRSDKARGKSDNVPSEEVVKKMKNYWRQLLNAKLITQRKFDNLTKAERGGLSELDKAGFIKRQLVETRQITKHVAQILDSRMNTKYDENDKLIREVKVITLKSKLVSDFRKDFQFYKVREINNYHHAHDAYLNAVVGTALIKKYPKLESEFVYGDYKVYDVRKMIAKSEQEIGKATAKYFFYSNIMNFFKTEITLANGEIRKRPLIETNGETGEIVWDKGRDFATVRKVLSMPQVNIVKKTEVQTGGFSKESILPKRNSDKLIARKKDWDPKKYGGFDSPTVAYSVLVVAKVEKGKSKKLKSVKELLGITIMERSSFEKNPIDFLEAKGYKEVKKDLIIKLPKYSLFELENGRKRMLASAGELQKGNELALPSKYVNFLYLASHYEKLKGSPEDNEQKQLFVEQHKHYLDEIIEQISEFSKRVILADANLDKVLSAYNKHRDKPIREQAENIIHLFTLTNLGAPAAFKYFDTTIDRKRYTSTKEVLDATLIHQSITGLYETRIDLSQLGGDGGAEAAAKEAAAKEAAAKEAAAKALEAEAAAKEAAAKEAAAKEAAAKAGGVPWLTQQPLQLTILVPLQEYQEKILSKTALPEDQKQQLKTLFVKYDNLWQHWENQVGHRKIRPHNIATGDYPPRPQKQYPINPKAKPSIQIVIDDLLKQGVLTPQNSTMNTPVYPVPKPDGRWRMVLDYREVNKTIPLTAAQNQHSAGILATIVRQKYKTTLDLANGFWAHPITPESYWLTAFTWQGKQYCWTRLPQGFLNSPALFNADVVDLLKEIPNVQVYVDDIYLSHDDPKEHVQQLEKVFQILLQAGYVVSLKKSEIGQKTVEFLGFNITKEGRGLTDTFKTKLLNITPPKDLKQLQSILGLLNFARNFIPNFAELVQPLYNLIAPAKGKYIEWSEENTKQLNMVIEALNTASNLEERLPEQRLVIKVNTSPSAGYVRYYNETGKKPIMYLNYVFSKAELKFSMLEKLLTTMHKALIKAMDLAMGQEILVYSPIVSMTKIQKTPLPERKALPIRWITWMTYLEDPRIQFHYDKTLPELKHIPDVYTSSQSPVKHPSQYEGVFYTDGSAIKSPDPTKSNNAGMGIVHATYKPEYQVLNQWSIPLGNHTAQMAEIAAVEFACKKALKIPGPVLVITDSFYVAESANKELPYWKSNGFVNNKKKPLKHISKWKSIAECLSMKPDITIQHEKGISLQIPVFILKGNALADKLATQGSYVVNAGKRTADGSEFEKRTADGSEFESPKKKAKVE

SEQ ID NO: 1299 - protein, 2096 aa, synthetic construct
MPAAKRVKLDGGDKKYSIGLDIGTNSVGWAVITDEYKVPSKKFKVLGNTDRHSIKKNLIGALLFDSGETAEATRLKRTARRRYTRRKNRICYLQEIFSNEMAKVDDSFFHRLEESFLVEEDKKHERHPIFGNIVDEVAYHEKYPTIYHLRKKLVDSTDKADLRLIYLALAHMIKFRGHFLIEGDLNPDNSDVDKLFIQLVQTYNQLFEENPINASGVDAKAILSARLSKSRRLENLIAQLPGEKKNGLFGNLIALSLGLTPNFKSNFDLAEDAKLQLSKDTYDDDLDNLLAQIGDQYADLFLAAKNLSDAILLSDILRVNTEITKAPLSASMIKRYDEHHQDLTLLKALVRQQLPEKYKEIFFDQSKNGYAGYIDGGASQEEFYKFIKPILEKMDGTEELLVKLNREDLLRKQRTFDNGSIPHQIHLGELHAILRRQEDFYPFLKDNREKIEKILTFRIPYYVGPLARGNSRFAWMTRKSEETITPWNFEEVVDKGASAQSFIERMTNFDKNLPNEKVLPKHSLLYEYFTVYNELTKVKYVTEGMRKPAFLSGEQKKAIVDLLFKTNRKVTVKQLKEDYFKKIECFDSVEISGVEDRFNASLGTYHDLLKIIKDKDFLDNEENEDILEDIVLTLTLFEDREMIEERLKTYAHLFDDKVMKQLKRRRYTGWGRLSRKLINGIRDKQSGKTILDFLKSDGFANRNFMQLIHDDSLTFKEDIQKAQVSGQGDSLHEHIANLAGSPAIKKGILQTVKVVDELVKVMGRHKPENIVIEMARENQTTQKGQKNSRERMKRIEEGIKELGSQILKEHPVENTQLQNEKLYLYYLQNGRDMYVDQELDINRLSDYDVDHIVPQSFLKDDSIDNKVLTRSDKARGKSDNVPSEEVVKKMKNYWRQLLNAKLITQRKFDNLTKAERGGLSELDKAGFIKRQLVETRQITKHVAQILDSRMNTKYDENDKLIREVKVITLKSKLVSDFRKDFQFYKVREINNYHHAHDAYLNAVVGTALIKKYPKLESEFVYGDYKVYDVRKMIAKSEQEIGKATAKYFFYSNIMNFFKTEITLANGEIRKRPLIETNGETGEIVWDKGRDFATVRKVLSMPQVNIVKKTEVQTGGFSKESILPKRNSDKLIARKKDWDPKKYGGFDSPTVAYSVLVVAKVEKGKSKKLKSVKELLGITIMERSSFEKNPIDFLEAKGYKEVKKDLIIKLPKYSLFELENGRKRMLASAGELQKGNELALPSKYVNFLYLASHYEKLKGSPEDNEQKQLFVEQHKHYLDEIIEQISEFSKRVILADANLDKVLSAYNKHRDKPIREQAENIIHLFTLTNLGAPAAFKYFDTTIDRKRYTSTKEVLDATLIHQSITGLYETRIDLSQLGGDGGGGGGSGGGGSGGGGSGGGGSGGVPWLTQQPLQLTILVPLQEYQEKILSKTALPEDQKQQLKTLFVKYDNLWQHWENQVGHRKIRPHNIATGDYPPRPQKQYPINPKAKPSIQIVIDDLLKQGVLTPQNSTMNTPVYPVPKPDGRWRMVLDYREVNKTIPLTAAQNQHSAGILATIVRQKYKTTLDLANGFWAHPITPESYWLTAFTWQGKQYCWTRLPQGFLNSPALFNADVVDLLKEIPNVQVYVDDIYLSHDDPKEHVQQLEKVFQILLQAGYVVSLKKSEIGQKTVEFLGFNITKEGRGLTDTFKTKLLNITPPKDLKQLQSILGLLNFARNFIPNFAELVQPLYNLIAPAKGKYIEWSEENTKQLNMVIEALNTASNLEERLPEQRLVIKVNTSPSAGYVRYYNETGKKPIMYLNYVFSKAELKFSMLEKLLTTMHKALIKAMDLAMGQEILVYSPIVSMTKIQKTPLPERKALPIRWITWMTYLEDPRIQFHYDKTLPELKHIPDVYTSSQSPVKHPSQYEGVFYTDGSAIKSPDPTKSNNAGMGIVHATYKPEYQVLNQWSIPLGNHTAQMAEIAAVEFACKKALKIPGPVLVITDSFYVAESANKELPYWKSNGFVNNKKKPLKHISKWKSIAECLSMKPDITIQHEKGISLQIPVFILKGNALADKLATQGSYVVNAGKRTADGSEFEKRTADGSEFESPKKKAKVE

SEQ ID NO: 1300 - protein, 2096 aa, synthetic construct
MPAAKRVKLDGGDKKYSIGLDIGTNSVGWAVITDEYKVPSKKFKVLGNTDRHSIKKNLIGALLFDSGETAEATRLKRTARRRYTRRKNRICYLQEIFSNEMAKVDDSFFHRLEESFLVEEDKKHERHPIFGNIVDEVAYHEKYPTIYHLRKKLVDSTDKADLRLIYLALAHMIKFRGHFLIEGDLNPDNSDVDKLFIQLVQTYNQLFEENPINASGVDAKAILSARLSKSRRLENLIAQLPGEKKNGLFGNLIALSLGLTPNFKSNFDLAEDAKLQLSKDTYDDDLDNLLAQIGDQYADLFLAAKNLSDAILLSDILRVNTEITKAPLSASMIKRYDEHHQDLTLLKALVRQQLPEKYKEIFFDQSKNGYAGYIDGGASQEEFYKFIKPILEKMDGTEELLVKLNREDLLRKQRTFDNGSIPHQIHLGELHAILRRQEDFYPFLKDNREKIEKILTFRIPYYVGPLARGNSRFAWMTRKSEETITPWNFEEVVDKGASAQSFIERMTNFDKNLPNEKVLPKHSLLYEYFTVYNELTKVKYVTEGMRKPAFLSGEQKKAIVDLLFKTNRKVTVKQLKEDYFKKIECFDSVEISGVEDRFNASLGTYHDLLKIIKDKDFLDNEENEDILEDIVLTLTLFEDREMIEERLKTYAHLFDDKVMKQLKRRRYTGWGRLSRKLINGIRDKQSGKTILDFLKSDGFANRNFMQLIHDDSLTFKEDIQKAQVSGQGDSLHEHIANLAGSPAIKKGILQTVKVVDELVKVMGRHKPENIVIEMARENQTTQKGQKNSRERMKRIEEGIKELGSQILKEHPVENTQLQNEKLYLYYLQNGRDMYVDQELDINRLSDYDVDHIVPQSFLKDDSIDNKVLTRSDKARGKSDNVPSEEVVKKMKNYWRQLLNAKLITQRKFDNLTKAERGGLSELDKAGFIKRQLVETRQITKHVAQILDSRMNTKYDENDKLIREVKVITLKSKLVSDFRKDFQFYKVREINNYHHAHDAYLNAVVGTALIKKYPKLESEFVYGDYKVYDVRKMIAKSEQEIGKATAKYFFYSNIMNFFKTEITLANGEIRKRPLIETNGETGEIVWDKGRDFATVRKVLSMPQVNIVKKTEVQTGGFSKESILPKRNSDKLIARKKDWDPKKYGGFDSPTVAYSVLVVAKVEKGKSKKLKSVKELLGITIMERSSFEKNPIDFLEAKGYKEVKKDLIIKLPKYSLFELENGRKRMLASAGELQKGNELALPSKYVNFLYLASHYEKLKGSPEDNEQKQLFVEQHKHYLDEIIEQISEFSKRVILADANLDKVLSAYNKHRDKPIREQAENIIHLFTLTNLGAPAAFKYFDTTIDRKRYTSTKEVLDATLIHQSITGLYETRIDLSQLGGDGGEAAAKEAAAKEAAAKEAAAKGGVPWLTQQPLQLTILVPLQEYQEKILSKTALPEDQKQQLKTLFVKYDNLWQHWENQVGHRKIRPHNIATGDYPPRPQKQYPINPKAKPSIQIVIDDLLKQGVLTPQNSTMNTPVYPVPKPDGRWRMVLDYREVNKTIPLTAAQNQHSAGILATIVRQKYKTTLDLANGFWAHPITPESYWLTAFTWQGKQYCWTRLPQGFLNSPALFNADVVDLLKEIPNVQVYVDDIYLSHDDPKEHVQQLEKVFQILLQAGYVVSLKKSEIGQKTVEFLGFNITKEGRGLTDTFKTKLLNITPPKDLKQLQSILGLLNFARNFIPNFAELVQPLYNLIAPAKGKYIEWSEENTKQLNMVIEALNTASNLEERLPEQRLVIKVNTSPSAGYVRYYNETGKKPIMYLNYVFSKAELKFSMLEKLLTTMHKALIKAMDLAMGQEILVYSPIVSMTKIQKTPLPERKALPIRWITWMTYLEDPRIQFHYDKTLPELKHIPDVYTSSQSPVKHPSQYEGVFYTDGSAIKSPDPTKSNNAGMGIVHATYKPEYQVLNQWSIPLGNHTAQMAEIAAVEFACKKALKIPGPVLVITDSFYVAESANKELPYWKSNGFVNNKKKPLKHISKWKSIAECLSMKPDITIQHEKGISLQIPVFILKGNALADKLATQGSYVVNAGKRTADGSEFEKRTADGSEFESPKKKAKVE

SEQ ID NO: 1301 - protein, 2084 aa, synthetic construct
MPAAKRVKLDGGDKKYSIGLDIGTNSVGWAVITDEYKVPSKKFKVLGNTDRHSIKKNLIGALLFDSGETAEATRLKRTARRRYTRRKNRICYLQEIFSNEMAKVDDSFFHRLEESFLVEEDKKHERHPIFGNIVDEVAYHEKYPTIYHLRKKLVDSTDKADLRLIYLALAHMIKFRGHFLIEGDLNPDNSDVDKLFIQLVQTYNQLFEENPINASGVDAKAILSARLSKSRRLENLIAQLPGEKKNGLFGNLIALSLGLTPNFKSNFDLAEDAKLQLSKDTYDDDLDNLLAQIGDQYADLFLAAKNLSDAILLSDILRVNTEITKAPLSASMIKRYDEHHQDLTLLKALVRQQLPEKYKEIFFDQSKNGYAGYIDGGASQEEFYKFIKPILEKMDGTEELLVKLNREDLLRKQRTFDNGSIPHQIHLGELHAILRRQEDFYPFLKDNREKIEKILTFRIPYYVGPLARGNSRFAWMTRKSEETITPWNFEEVVDKGASAQSFIERMTNFDKNLPNEKVLPKHSLLYEYFTVYNELTKVKYVTEGMRKPAFLSGEQKKAIVDLLFKTNRKVTVKQLKEDYFKKIECFDSVEISGVEDRFNASLGTYHDLLKIIKDKDFLDNEENEDILEDIVLTLTLFEDREMIEERLKTYAHLFDDKVMKQLKRRRYTGWGRLSRKLINGIRDKQSGKTILDFLKSDGFANRNFMQLIHDDSLTFKEDIQKAQVSGQGDSLHEHIANLAGSPAIKKGILQTVKVVDELVKVMGRHKPENIVIEMARENQTTQKGQKNSRERMKRIEEGIKELGSQILKEHPVENTQLQNEKLYLYYLQNGRDMYVDQELDINRLSDYDVDHIVPQSFLKDDSIDNKVLTRSDKARGKSDNVPSEEVVKKMKNYWRQLLNAKLITQRKFDNLTKAERGGLSELDKAGFIKRQLVETRQITKHVAQILDSRMNTKYDENDKLIREVKVITLKSKLVSDFRKDFQFYKVREINNYHHAHDAYLNAVVGTALIKKYPKLESEFVYGDYKVYDVRKMIAKSEQEIGKATAKYFFYSNIMNFFKTEITLANGEIRKRPLIETNGETGEIVWDKGRDFATVRKVLSMPQVNIVKKTEVQTGGFSKESILPKRNSDKLIARKKDWDPKKYGGFDSPTVAYSVLVVAKVEKGKSKKLKSVKELLGITIMERSSFEKNPIDFLEAKGYKEVKKDLIIKLPKYSLFELENGRKRMLASAGELQKGNELALPSKYVNFLYLASHYEKLKGSPEDNEQKQLFVEQHKHYLDEIIEQISEFSKRVILADANLDKVLSAYNKHRDKPIREQAENIIHLFTLTNLGAPAAFKYFDTTIDRKRYTSTKEVLDATLIHQSITGLYETRIDLSQLGGDGGEAAAKPAPGGVPWLTQQPLQLTILVPLQEYQEKILSKTALPEDQKQQLKTLFVKYDNLWQHWENQVGHRKIRPHNIATGDYPPRPQKQYPINPKAKPSIQIVIDDLLKQGVLTPQNSTMNTPVYPVPKPDGRWRMVLDYREVNKTIPLTAAQNQHSAGILATIVRQKYKTTLDLANGFWAHPITPESYWLTAFTWQGKQYCWTRLPQGFLNSPALFNADVVDLLKEIPNVQVYVDDIYLSHDDPKEHVQQLEKVFQILLQAGYVVSLKKSEIGQKTVEFLGFNITKEGRGLTDTFKTKLLNITPPKDLKQLQSILGLLNFARNFIPNFAELVQPLYNLIAPAKGKYIEWSEENTKQLNMVIEALNTASNLEERLPEQRLVIKVNTSPSAGYVRYYNETGKKPIMYLNYVFSKAELKFSMLEKLLTTMHKALIKAMDLAMGQEILVYSPIVSMTKIQKTPLPERKALPIRWITWMTYLEDPRIQFHYDKTLPELKHIPDVYTSSQSPVKHPSQYEGVFYTDGSAIKSPDPTKSNNAGMGIVHATYKPEYQVLNQWSIPLGNHTAQMAEIAAVEFACKKALKIPGPVLVITDSFYVAESANKELPYWKSNGFVNNKKKPLKHISKWKSIAECLSMKPDITIQHEKGISLQIPVFILKGNALADKLATQGSYVVNAGKRTADGSEFEKRTADGSEFESPKKKAKVE

SEQ ID NO: 1302 - protein, 2087 aa, synthetic construct
MPAAKRVKLDGGDKKYSIGLDIGTNSVGWAVITDEYKVPSKKFKVLGNTDRHSIKKNLIGALLFDSGETAEATRLKRTARRRYTRRKNRICYLQEIFSNEMAKVDDSFFHRLEESFLVEEDKKHERHPIFGNIVDEVAYHEKYPTIYHLRKKLVDSTDKADLRLIYLALAHMIKFRGHFLIEGDLNPDNSDVDKLFIQLVQTYNQLFEENPINASGVDAKAILSARLSKSRRLENLIAQLPGEKKNGLFGNLIALSLGLTPNFKSNFDLAEDAKLQLSKDTYDDDLDNLLAQIGDQYADLFLAAKNLSDAILLSDILRVNTEITKAPLSASMIKRYDEHHQDLTLLKALVRQQLPEKYKEIFFDQSKNGYAGYIDGGASQEEFYKFIKPILEKMDGTEELLVKLNREDLLRKQRTFDNGSIPHQIHLGELHAILRRQEDFYPFLKDNREKIEKILTFRIPYYVGPLARGNSRFAWMTRKSEETITPWNFEEVVDKGASAQSFIERMTNFDKNLPNEKVLPKHSLLYEYFTVYNELTKVKYVTEGMRKPAFLSGEQKKAIVDLLFKTNRKVTVKQLKEDYFKKIECFDSVEISGVEDRFNASLGTYHDLLKIIKDKDFLDNEENEDILEDIVLTLTLFEDREMIEERLKTYAHLFDDKVMKQLKRRRYTGWGRLSRKLINGIRDKQSGKTILDFLKSDGFANRNFMQLIHDDSLTFKEDIQKAQVSGQGDSLHEHIANLAGSPAIKKGILQTVKVVDELVKVMGRHKPENIVIEMARENQTTQKGQKNSRERMKRIEEGIKELGSQILKEHPVENTQLQNEKLYLYYLQNGRDMYVDQELDINRLSDYDVDHIVPQSFLKDDSIDNKVLTRSDKARGKSDNVPSEEVVKKMKNYWRQLLNAKLITQRKFDNLTKAERGGLSELDKAGFIKRQLVETRQITKHVAQILDSRMNTKYDENDKLIREVKVITLKSKLVSDFRKDFQFYKVREINNYHHAHDAYLNAVVGTALIKKYPKLESEFVYGDYKVYDVRKMIAKSEQEIGKATAKYFFYSNIMNFFKTEITLANGEIRKRPLIETNGETGEIVWDKGRDFATVRKVLSMPQVNIVKKTEVQTGGFSKESILPKRNSDKLIARKKDWDPKKYGGFDSPTVAYSVLVVAKVEKGKSKKLKSVKELLGITIMERSSFEKNPIDFLEAKGYKEVKKDLIIKLPKYSLFELENGRKRMLASAGELQKGNELALPSKYVNFLYLASHYEKLKGSPEDNEQKQLFVEQHKHYLDEIIEQISEFSKRVILADANLDKVLSAYNKHRDKPIREQAENIIHLFTLTNLGAPAAFKYFDTTIDRKRYTSTKEVLDATLIHQSITGLYETRIDLSQLGGDGGPAPGSSEAAAKGGVPWLTQQPLQLTILVPLQEYQEKILSKTALPEDQKQQLKTLFVKYDNLWQHWENQVGHRKIRPHNIATGDYPPRPQKQYPINPKAKPSIQIVIDDLLKQGVLTPQNSTMNTPVYPVPKPDGRWRMVLDYREVNKTIPLTAAQNQHSAGILATIVRQKYKTTLDLANGFWAHPITPESYWLTAFTWQGKQYCWTRLPQGFLNSPALFNADVVDLLKEIPNVQVYVDDIYLSHDDPKEHVQQLEKVFQILLQAGYVVSLKKSEIGQKTVEFLGFNITKEGRGLTDTFKTKLLNITPPKDLKQLQSILGLLNFARNFIPNFAELVQPLYNLIAPAKGKYIEWSEENTKQLNMVIEALNTASNLEERLPEQRLVIKVNTSPSAGYVRYYNETGKKPIMYLNYVFSKAELKFSMLEKLLTTMHKALIKAMDLAMGQEILVYSPIVSMTKIQKTPLPERKALPIRWITWMTYLEDPRIQFHYDKTLPELKHIPDVYTSSQSPVKHPSQYEGVFYTDGSAIKSPDPTKSNNAGMGIVHATYKPEYQVLNQWSIPLGNHTAQMAEIAAVEFACKKALKIPGPVLVITDSFYVAESANKELPYWKSNGFVNNKKKPLKHISKWKSIAECLSMKPDITIQHEKGISLQIPVFILKGNALADKLATQGSYVVNAGKRTADGSEFEKRTADGSEFESPKKKAKVE

SEQ ID NO: 1303 - protein, 2091 aa, synthetic construct
MPAAKRVKLDGGDKKYSIGLDIGTNSVGWAVITDEYKVPSKKFKVLGNTDRHSIKKNLIGALLFDSGETAEATRLKRTARRRYTRRKNRICYLQEIFSNEMAKVDDSFFHRLEESFLVEEDKKHERHPIFGNIVDEVAYHEKYPTIYHLRKKLVDSTDKADLRLIYLALAHMIKFRGHFLIEGDLNPDNSDVDKLFIQLVQTYNQLFEENPINASGVDAKAILSARLSKSRRLENLIAQLPGEKKNGLFGNLIALSLGLTPNFKSNFDLAEDAKLQLSKDTYDDDLDNLLAQIGDQYADLFLAAKNLSDAILLSDILRVNTEITKAPLSASMIKRYDEHHQDLTLLKALVRQQLPEKYKEIFFDQSKNGYAGYIDGGASQEEFYKFIKPILEKMDGTEELLVKLNREDLLRKQRTFDNGSIPHQIHLGELHAILRRQEDFYPFLKDNREKIEKILTFRIPYYVGPLARGNSRFAWMTRKSEETITPWNFEEVVDKGASAQSFIERMTNFDKNLPNEKVLPKHSLLYEYFTVYNELTKVKYVTEGMRKPAFLSGEQKKAIVDLLFKTNRKVTVKQLKEDYFKKIECFDSVEISGVEDRFNASLGTYHDLLKIIKDKDFLDNEENEDILEDIVLTLTLFEDREMIEERLKTYAHLFDDKVMKQLKRRRYTGWGRLSRKLINGIRDKQSGKTILDFLKSDGFANRNFMQLIHDDSLTFKEDIQKAQVSGQGDSLHEHIANLAGSPAIKKGILQTVKVVDELVKVMGRHKPENIVIEMARENQTTQKGQKNSRERMKRIEEGIKELGSQILKEHPVENTQLQNEKLYLYYLQNGRDMYVDQELDINRLSDYDVDHIVPQSFLKDDSIDNKVLTRSDKARGKSDNVPSEEVVKKMKNYWRQLLNAKLITQRKFDNLTKAERGGLSELDKAGFIKRQLVETRQITKHVAQILDSRMNTKYDENDKLIREVKVITLKSKLVSDFRKDFQFYKVREINNYHHAHDAYLNAVVGTALIKKYPKLESEFVYGDYKVYDVRKMIAKSEQEIGKATAKYFFYSNIMNFFKTEITLANGEIRKRPLIETNGETGEIVWDKGRDFATVRKVLSMPQVNIVKKTEVQTGGFSKESILPKRNSDKLIARKKDWDPKKYGGFDSPTVAYSVLVVAKVEKGKSKKLKSVKELLGITIMERSSFEKNPIDFLEAKGYKEVKKDLIIKLPKYSLFELENGRKRMLASAGELQKGNELALPSKYVNFLYLASHYEKLKGSPEDNEQKQLFVEQHKHYLDEIIEQISEFSKRVILADANLDKVLSAYNKHRDKPIREQAENIIHLFTLTNLGAPAAFKYFDTTIDRKRYTSTKEVLDATLIHQSITGLYETRIDLSQLGGDGGGSSGSSGSSGSSGSSGGVPWLTQQPLQLTILVPLQEYQEKILSKTALPEDQKQQLKTLFVKYDNLWQHWENQVGHRKIRPHNIATGDYPPRPQKQYPINPKAKPSIQIVIDDLLKQGVLTPQNSTMNTPVYPVPKPDGRWRMVLDYREVNKTIPLTAAQNQHSAGILATIVRQKYKTTLDLANGFWAHPITPESYWLTAFTWQGKQYCWTRLPQGFLNSPALFNADVVDLLKEIPNVQVYVDDIYLSHDDPKEHVQQLEKVFQILLQAGYVVSLKKSEIGQKTVEFLGFNITKEGRGLTDTFKTKLLNITPPKDLKQLQSILGLLNFARNFIPNFAELVQPLYNLIAPAKGKYIEWSEENTKQLNMVIEALNTASNLEERLPEQRLVIKVNTSPSAGYVRYYNETGKKPIMYLNYVFSKAELKFSMLEKLLTTMHKALIKAMDLAMGQEILVYSPIVSMTKIQKTPLPERKALPIRWITWMTYLEDPRIQFHYDKTLPELKHIPDVYTSSQSPVKHPSQYEGVFYTDGSAIKSPDPTKSNNAGMGIVHATYKPEYQVLNQWSIPLGNHTAQMAEIAAVEFACKKALKIPGPVLVITDSFYVAESANKELPYWKSNGFVNNKKKPLKHISKWKSIAECLSMKPDITIQHEKGISLQIPVFILKGNALADKLATQGSYVVNAGKRTADGSEFEKRTADGSEFESPKKKAKVE

SEQ ID NO: 1304 - protein, 2085 aa, synthetic construct
MPAAKRVKLDGGDKKYSIGLDIGTNSVGWAVITDEYKVPSKKFKVLGNTDRHSIKKNLIGALLFDSGETAEATRLKRTARRRYTRRKNRICYLQEIFSNEMAKVDDSFFHRLEESFLVEEDKKHERHPIFGNIVDEVAYHEKYPTIYHLRKKLVDSTDKADLRLIYLALAHMIKFRGHFLIEGDLNPDNSDVDKLFIQLVQTYNQLFEENPINASGVDAKAILSARLSKSRRLENLIAQLPGEKKNGLFGNLIALSLGLTPNFKSNFDLAEDAKLQLSKDTYDDDLDNLLAQIGDQYADLFLAAKNLSDAILLSDILRVNTEITKAPLSASMIKRYDEHHQDLTLLKALVRQQLPEKYKEIFFDQSKNGYAGYIDGGASQEEFYKFIKPILEKMDGTEELLVKLNREDLLRKQRTFDNGSIPHQIHLGELHAILRRQEDFYPFLKDNREKIEKILTFRIPYYVGPLARGNSRFAWMTRKSEETITPWNFEEVVDKGASAQSFIERMTNFDKNLPNEKVLPKHSLLYEYFTVYNELTKVKYVTEGMRKPAFLSGEQKKAIVDLLFKTNRKVTVKQLKEDYFKKIECFDSVEISGVEDRFNASLGTYHDLLKIIKDKDFLDNEENEDILEDIVLTLTLFEDREMIEERLKTYAHLFDDKVMKQLKRRRYTGWGRLSRKLINGIRDKQSGKTILDFLKSDGFANRNFMQLIHDDSLTFKEDIQKAQVSGQGDSLHEHIANLAGSPAIKKGILQTVKVVDELVKVMGRHKPENIVIEMARENQTTQKGQKNSRERMKRIEEGIKELGSQILKEHPVENTQLQNEKLYLYYLQNGRDMYVDQELDINRLSDYDVDHIVPQSFLKDDSIDNKVLTRSDKARGKSDNVPSEEVVKKMKNYWRQLLNAKLITQRKFDNLTKAERGGLSELDKAGFIKRQLVETRQITKHVAQILDSRMNTKYDENDKLIREVKVITLKSKLVSDFRKDFQFYKVREINNYHHAHDAYLNAVVGTALIKKYPKLESEFVYGDYKVYDVRKMIAKSEQEIGKATAKYFFYSNIMNFFKTEITLANGEIRKRPLIETNGETGEIVWDKGRDFATVRKVLSMPQVNIVKKTEVQTGGFSKESILPKRNSDKLIARKKDWDPKKYGGFDSPTVAYSVLVVAKVEKGKSKKLKSVKELLGITIMERSSFEKNPIDFLEAKGYKEVKKDLIIKLPKYSLFELENGRKRMLASAGELQKGNELALPSKYVNFLYLASHYEKLKGSPEDNEQKQLFVEQHKHYLDEIIEQISEFSKRVILADANLDKVLSAYNKHRDKPIREQAENIIHLFTLTNLGAPAAFKYFDTTIDRKRYTSTKEVLDATLIHQSITGLYETRIDLSQLGGDGGGGSGGSGGSGGVPWLTQQPLQLTILVPLQEYQEKILSKTALPEDQKQQLKTLFVKYDNLWQHWENQVGHRKIRPHNIATGDYPPRPQKQYPINPKAKPSIQIVIDDLLKQGVLTPQNSTMNTPVYPVPKPDGRWRMVLDYREVNKTIPLTAAQNQHSAGILATIVRQKYKTTLDLANGFWAHPITPESYWLTAFTWQGKQYCWTRLPQGFLNSPALFNADVVDLLKEIPNVQVYVDDIYLSHDDPKEHVQQLEKVFQILLQAGYVVSLKKSEIGQKTVEFLGFNITKEGRGLTDTFKTKLLNITPPKDLKQLQSILGLLNFARNFIPNFAELVQPLYNLIAPAKGKYIEWSEENTKQLNMVIEALNTASNLEERLPEQRLVIKVNTSPSAGYVRYYNETGKKPIMYLNYVFSKAELKFSMLEKLLTTMHKALIKAMDLAMGQEILVYSPIVSMTKIQKTPLPERKALPIRWITWMTYLEDPRIQFHYDKTLPELKHIPDVYTSSQSPVKHPSQYEGVFYTDGSAIKSPDPTKSNNAGMGIVHATYKPEYQVLNQWSIPLGNHTAQMAEIAAVEFACKKALKIPGPVLVITDSFYVAESANKELPYWKSNGFVNNKKKPLKHISKWKSIAECLSMKPDITIQHEKGISLQIPVFILKGNALADKLATQGSYVVNAGKRTADGSEFEKRTADGSEFESPKKKAKVE

SEQ ID NO: 1305 - protein, 2085 aa, synthetic construct
MPAAKRVKLDGGDKKYSIGLDIGTNSVGWAVITDEYKVPSKKFKVLGNTDRHSIKKNLIGALLFDSGETAEATRLKRTARRRYTRRKNRICYLQEIFSNEMAKVDDSFFHRLEESFLVEEDKKHERHPIFGNIVDEVAYHEKYPTIYHLRKKLVDSTDKADLRLIYLALAHMIKFRGHFLIEGDLNPDNSDVDKLFIQLVQTYNQLFEENPINASGVDAKAILSARLSKSRRLENLIAQLPGEKKNGLFGNLIALSLGLTPNFKSNFDLAEDAKLQLSKDTYDDDLDNLLAQIGDQYADLFLAAKNLSDAILLSDILRVNTEITKAPLSASMIKRYDEHHQDLTLLKALVRQQLPEKYKEIFFDQSKNGYAGYIDGGASQEEFYKFIKPILEKMDGTEELLVKLNREDLLRKQRTFDNGSIPHQIHLGELHAILRRQEDFYPFLKDNREKIEKILTFRIPYYVGPLARGNSRFAWMTRKSEETITPWNFEEVVDKGASAQSFIERMTNFDKNLPNEKVLPKHSLLYEYFTVYNELTKVKYVTEGMRKPAFLSGEQKKAIVDLLFKTNRKVTVKQLKEDYFKKIECFDSVEISGVEDRFNASLGTYHDLLKIIKDKDFLDNEENEDILEDIVLTLTLFEDREMIEERLKTYAHLFDDKVMKQLKRRRYTGWGRLSRKLINGIRDKQSGKTILDFLKSDGFANRNFMQLIHDDSLTFKEDIQKAQVSGQGDSLHEHIANLAGSPAIKKGILQTVKVVDELVKVMGRHKPENIVIEMARENQTTQKGQKNSRERMKRIEEGIKELGSQILKEHPVENTQLQNEKLYLYYLQNGRDMYVDQELDINRLSDYDVDHIVPQSFLKDDSIDNKVLTRSDKARGKSDNVPSEEVVKKMKNYWRQLLNAKLITQRKFDNLTKAERGGLSELDKAGFIKRQLVETRQITKHVAQILDSRMNTKYDENDKLIREVKVITLKSKLVSDFRKDFQFYKVREINNYHHAHDAYLNAVVGTALIKKYPKLESEFVYGDYKVYDVRKMIAKSEQEIGKATAKYFFYSNIMNFFKTEITLANGEIRKRPLIETNGETGEIVWDKGRDFATVRKVLSMPQVNIVKKTEVQTGGFSKESILPKRNSDKLIARKKDWDPKKYGGFDSPTVAYSVLVVAKVEKGKSKKLKSVKELLGITIMERSSFEKNPIDFLEAKGYKEVKKDLIIKLPKYSLFELENGRKRMLASAGELQKGNELALPSKYVNFLYLASHYEKLKGSPEDNEQKQLFVEQHKHYLDEIIEQISEFSKRVILADANLDKVLSAYNKHRDKPIREQAENIIHLFTLTNLGAPAAFKYFDTTIDRKRYTSTKEVLDATLIHQSITGLYETRIDLSQLGGDGGGGGGSSPAPGGVPWLTQQPLQLTILVPLQEYQEKILSKTALPEDQKQQLKTLFVKYDNLWQHWENQVGHRKIRPHNIATGDYPPRPQKQYPINPKAKPSIQIVIDDLLKQGVLTPQNSTMNTPVYPVPKPDGRWRMVLDYREVNKTIPLTAAQNQHSAGILATIVRQKYKTTLDLANGFWAHPITPESYWLTAFTWQGKQYCWTRLPQGFLNSPALFNADVVDLLKEIPNVQVYVDDIYLSHDDPKEHVQQLEKVFQILLQAGYVVSLKKSEIGQKTVEFLGFNITKEGRGLTDTFKTKLLNITPPKDLKQLQSILGLLNFARNFIPNFAELVQPLYNLIAPAKGKYIEWSEENTKQLNMVIEALNTASNLEERLPEQRLVIKVNTSPSAGYVRYYNETGKKPIMYLNYVFSKAELKFSMLEKLLTTMHKALIKAMDLAMGQEILVYSPIVSMTKIQKTPLPERKALPIRWITWMTYLEDPRIQFHYDKTLPELKHIPDVYTSSQSPVKHPSQYEGVFYTDGSAIKSPDPTKSNNAGMGIVHATYKPEYQVLNQWSIPLGNHTAQMAEIAAVEFACKKALKIPGPVLVITDSFYVAESANKELPYWKSNGFVNNKKKPLKHISKWKSIAECLSMKPDITIQHEKGISLQIPVFILKGNALADKLATQGSYVVNAGKRTADGSEFEKRTADGSEFESPKKKAKVE

SEQ ID NO: 1306 - protein, 2087 aa, synthetic construct
MPAAKRVKLDGGDKKYSIGLDIGTNSVGWAVITDEYKVPSKKFKVLGNTDRHSIKKNLIGALLFDSGETAEATRLKRTARRRYTRRKNRICYLQEIFSNEMAKVDDSFFHRLEESFLVEEDKKHERHPIFGNIVDEVAYHEKYPTIYHLRKKLVDSTDKADLRLIYLALAHMIKFRGHFLIEGDLNPDNSDVDKLFIQLVQTYNQLFEENPINASGVDAKAILSARLSKSRRLENLIAQLPGEKKNGLFGNLIALSLGLTPNFKSNFDLAEDAKLQLSKDTYDDDLDNLLAQIGDQYADLFLAAKNLSDAILLSDILRVNTEITKAPLSASMIKRYDEHHQDLTLLKALVRQQLPEKYKEIFFDQSKNGYAGYIDGGASQEEFYKFIKPILEKMDGTEELLVKLNREDLLRKQRTFDNGSIPHQIHLGELHAILRRQEDFYPFLKDNREKIEKILTFRIPYYVGPLARGNSRFAWMTRKSEETITPWNFEEVVDKGASAQSFIERMTNFDKNLPNEKVLPKHSLLYEYFTVYNELTKVKYVTEGMRKPAFLSGEQKKAIVDLLFKTNRKVTVKQLKEDYFKKIECFDSVEISGVEDRFNASLGTYHDLLKIIKDKDFLDNEENEDILEDIVLTLTLFEDREMIEERLKTYAHLFDDKVMKQLKRRRYTGWGRLSRKLINGIRDKQSGKTILDFLKSDGFANRNFMQLIHDDSLTFKEDIQKAQVSGQGDSLHEHIANLAGSPAIKKGILQTVKVVDELVKVMGRHKPENIVIEMARENQTTQKGQKNSRERMKRIEEGIKELGSQILKEHPVENTQLQNEKLYLYYLQNGRDMYVDQELDINRLSDYDVDHIVPQSFLKDDSIDNKVLTRSDKARGKSDNVPSEEVVKKMKNYWRQLLNAKLITQRKFDNLTKAERGGLSELDKAGFIKRQLVETRQITKHVAQILDSRMNTKYDENDKLIREVKVITLKSKLVSDFRKDFQFYKVREINNYHHAHDAYLNAVVGTALIKKYPKLESEFVYGDYKVYDVRKMIAKSEQEIGKATAKYFFYSNIMNFFKTEITLANGEIRKRPLIETNGETGEIVWDKGRDFATVRKVLSMPQVNIVKKTEVQTGGFSKESILPKRNSDKLIARKKDWDPKKYGGFDSPTVAYSVLVVAKVEKGKSKKLKSVKELLGITIMERSSFEKNPIDFLEAKGYKEVKKDLIIKLPKYSLFELENGRKRMLASAGELQKGNELALPSKYVNFLYLASHYEKLKGSPEDNEQKQLFVEQHKHYLDEIIEQISEFSKRVILADANLDKVLSAYNKHRDKPIREQAENIIHLFTLTNLGAPAAFKYFDTTIDRKRYTSTKEVLDATLIHQSITGLYETRIDLSQLGGDGGGSSGGSEAAAKGGVPWLTQQPLQLTILVPLQEYQEKILSKTALPEDQKQQLKTLFVKYDNLWQHWENQVGHRKIRPHNIATGDYPPRPQKQYPINPKAKPSIQIVIDDLLKQGVLTPQNSTMNTPVYPVPKPDGRWRMVLDYREVNKTIPLTAAQNQHSAGILATIVRQKYKTTLDLANGFWAHPITPESYWLTAFTWQGKQYCWTRLPQGFLNSPALFNADVVDLLKEIPNVQVYVDDIYLSHDDPKEHVQQLEKVFQILLQAGYVVSLKKSEIGQKTVEFLGFNITKEGRGLTDTFKTKLLNITPPKDLKQLQSILGLLNFARNFIPNFAELVQPLYNLIAPAKGKYIEWSEENTKQLNMVIEALNTASNLEERLPEQRLVIKVNTSPSAGYVRYYNETGKKPIMYLNYVFSKAELKFSMLEKLLTTMHKALIKAMDLAMGQEILVYSPIVSMTKIQKTPLPERKALPIRWITWMTYLEDPRIQFHYDKTLPELKHIPDVYTSSQSPVKHPSQYEGVFYTDGSAIKSPDPTKSNNAGMGIVHATYKPEYQVLNQWSIPLGNHTAQMAEIAAVEFACKKALKIPGPVLVITDSFYVAESANKELPYWKSNGFVNNKKKPLKHISKWKSIAECLSMKPDITIQHEKGISLQIPVFILKGNALADKLATQGSYVVNAGKRTADGSEFEKRTADGSEFESPKKKAKVE

SEQ ID NO: 1307 - protein, 2085 aa, synthetic construct
MPAAKRVKLDGGDKKYSIGLDIGTNSVGWAVITDEYKVPSKKFKVLGNTDRHSIKKNLIGALLFDSGETAEATRLKRTARRRYTRRKNRICYLQEIFSNEMAKVDDSFFHRLEESFLVEEDKKHERHPIFGNIVDEVAYHEKYPTIYHLRKKLVDSTDKADLRLIYLALAHMIKFRGHFLIEGDLNPDNSDVDKLFIQLVQTYNQLFEENPINASGVDAKAILSARLSKSRRLENLIAQLPGEKKNGLFGNLIALSLGLTPNFKSNFDLAEDAKLQLSKDTYDDDLDNLLAQIGDQYADLFLAAKNLSDAILLSDILRVNTEITKAPLSASMIKRYDEHHQDLTLLKALVRQQLPEKYKEIFFDQSKNGYAGYIDGGASQEEFYKFIKPILEKMDGTEELLVKLNREDLLRKQRTFDNGSIPHQIHLGELHAILRRQEDFYPFLKDNREKIEKILTFRIPYYVGPLARGNSRFAWMTRKSEETITPWNFEEVVDKGASAQSFIERMTNFDKNLPNEKVLPKHSLLYEYFTVYNELTKVKYVTEGMRKPAFLSGEQKKAIVDLLFKTNRKVTVKQLKEDYFKKIECFDSVEISGVEDRFNASLGTYHDLLKIIKDKDFLDNEENEDILEDIVLTLTLFEDREMIEERLKTYAHLFDDKVMKQLKRRRYTGWGRLSRKLINGIRDKQSGKTILDFLKSDGFANRNFMQLIHDDSLTFKEDIQKAQVSGQGDSLHEHIANLAGSPAIKKGILQTVKVVDELVKVMGRHKPENIVIEMARENQTTQKGQKNSRERMKRIEEGIKELGSQILKEHPVENTQLQNEKLYLYYLQNGRDMYVDQELDINRLSDYDVDHIVPQSFLKDDSIDNKVLTRSDKARGKSDNVPSEEVVKKMKNYWRQLLNAKLITQRKFDNLTKAERGGLSELDKAGFIKRQLVETRQITKHVAQILDSRMNTKYDENDKLIREVKVITLKSKLVSDFRKDFQFYKVREINNYHHAHDAYLNAVVGTALIKKYPKLESEFVYGDYKVYDVRKMIAKSEQEIGKATAKYFFYSNIMNFFKTEITLANGEIRKRPLIETNGETGEIVWDKGRDFATVRKVLSMPQVNIVKKTEVQTGGFSKESILPKRNSDKLIARKKDWDPKKYGGFDSPTVAYSVLVVAKVEKGKSKKLKSVKELLGITIMERSSFEKNPIDFLEAKGYKEVKKDLIIKLPKYSLFELENGRKRMLASAGELQKGNELALPSKYVNFLYLASHYEKLKGSPEDNEQKQLFVEQHKHYLDEIIEQISEFSKRVILADANLDKVLSAYNKHRDKPIREQAENIIHLFTLTNLGAPAAFKYFDTTIDRKRYTSTKEVLDATLIHQSITGLYETRIDLSQLGGDGGGSSPAPGGSGGVPWLTQQPLQLTILVPLQEYQEKILSKTALPEDQKQQLKTLFVKYDNLWQHWENQVGHRKIRPHNIATGDYPPRPQKQYPINPKAKPSIQIVIDDLLKQGVLTPQNSTMNTPVYPVPKPDGRWRMVLDYREVNKTIPLTAAQNQHSAGILATIVRQKYKTTLDLANGFWAHPITPESYWLTAFTWQGKQYCWTRLPQGFLNSPALFNADVVDLLKEIPNVQVYVDDIYLSHDDPKEHVQQLEKVFQILLQAGYVVSLKKSEIGQKTVEFLGFNITKEGRGLTDTFKTKLLNITPPKDLKQLQSILGLLNFARNFIPNFAELVQPLYNLIAPAKGKYIEWSEENTKQLNMVIEALNTASNLEERLPEQRLVIKVNTSPSAGYVRYYNETGKKPIMYLNYVFSKAELKFSMLEKLLTTMHKALIKAMDLAMGQEILVYSPIVSMTKIQKTPLPERKALPIRWITWMTYLEDPRIQFHYDKTLPELKHIPDVYTSSQSPVKHPSQYEGVFYTDGSAIKSPDPTKSNNAGMGIVHATYKPEYQVLNQWSIPLGNHTAQMAEIAAVEFACKKALKIPGPVLVITDSFYVAESANKELPYWKSNGFVNNKKKPLKHISKWKSIAECLSMKPDITIQHEKGISLQIPVFILKGNALADKLATQGSYVVNAGKRTADGSEFEKRTADGSEFESPKKKAKVE

SEQ ID NO: 1308 - protein, 2086 aa, synthetic construct
MPAAKRVKLDGGDKKYSIGLDIGTNSVGWAVITDEYKVPSKKFKVLGNTDRHSIKKNLIGALLFDSGETAEATRLKRTARRRYTRRKNRICYLQEIFSNEMAKVDDSFFHRLEESFLVEEDKKHERHPIFGNIVDEVAYHEKYPTIYHLRKKLVDSTDKADLRLIYLALAHMIKFRGHFLIEGDLNPDNSDVDKLFIQLVQTYNQLFEENPINASGVDAKAILSARLSKSRRLENLIAQLPGEKKNGLFGNLIALSLGLTPNFKSNFDLAEDAKLQLSKDTYDDDLDNLLAQIGDQYADLFLAAKNLSDAILLSDILRVNTEITKAPLSASMIKRYDEHHQDLTLLKALVRQQLPEKYKEIFFDQSKNGYAGYIDGGASQEEFYKFIKPILEKMDGTEELLVKLNREDLLRKQRTFDNGSIPHQIHLGELHAILRRQEDFYPFLKDNREKIEKILTFRIPYYVGPLARGNSRFAWMTRKSEETITPWNFEEVVDKGASAQSFIERMTNFDKNLPNEKVLPKHSLLYEYFTVYNELTKVKYVTEGMRKPAFLSGEQKKAIVDLLFKTNRKVTVKQLKEDYFKKIECFDSVEISGVEDRFNASLGTYHDLLKIIKDKDFLDNEENEDILEDIVLTLTLFEDREMIEERLKTYAHLFDDKVMKQLKRRRYTGWGRLSRKLINGIRDKQSGKTILDFLKSDGFANRNFMQLIHDDSLTFKEDIQKAQVSGQGDSLHEHIANLAGSPAIKKGILQTVKVVDELVKVMGRHKPENIVIEMARENQTTQKGQKNSRERMKRIEEGIKELGSQILKEHPVENTQLQNEKLYLYYLQNGRDMYVDQELDINRLSDYDVDHIVPQSFLKDDSIDNKVLTRSDKARGKSDNVPSEEVVKKMKNYWRQLLNAKLITQRKFDNLTKAERGGLSELDKAGFIKRQLVETRQITKHVAQILDSRMNTKYDENDKLIREVKVITLKSKLVSDFRKDFQFYKVREINNYHHAHDAYLNAVVGTALIKKYPKLESEFVYGDYKVYDVRKMIAKSEQEIGKATAKYFFYSNIMNFFKTEITLANGEIRKRPLIETNGETGEIVWDKGRDFATVRKVLSMPQVNIVKKTEVQTGGFSKESILPKRNSDKLIARKKDWDPKKYGGFDSPTVAYSVLVVAKVEKGKSKKLKSVKELLGITIMERSSFEKNPIDFLEAKGYKEVKKDLIIKLPKYSLFELENGRKRMLASAGELQKGNELALPSKYVNFLYLASHYEKLKGSPEDNEQKQLFVEQHKHYLDEIIEQISEFSKRVILADANLDKVLSAYNKHRDKPIREQAENIIHLFTLTNLGAPAAFKYFDTTIDRKRYTSTKEVLDATLIHQSITGLYETRIDLSQLGGDGGEAAAKEAAAKGGVPWLTQQPLQLTILVPLQEYQEKILSKTALPEDQKQQLKTLFVKYDNLWQHWENQVGHRKIRPHNIATGDYPPRPQKQYPINPKAKPSIQIVIDDLLKQGVLTPQNSTMNTPVYPVPKPDGRWRMVLDYREVNKTIPLTAAQNQHSAGILATIVRQKYKTTLDLANGFWAHPITPESYWLTAFTWQGKQYCWTRLPQGFLNSPALFNADVVDLLKEIPNVQVYVDDIYLSHDDPKEHVQQLEKVFQILLQAGYVVSLKKSEIGQKTVEFLGFNITKEGRGLTDTFKTKLLNITPPKDLKQLQSILGLLNFARNFIPNFAELVQPLYNLIAPAKGKYIEWSEENTKQLNMVIEALNTASNLEERLPEQRLVIKVNTSPSAGYVRYYNETGKKPIMYLNYVFSKAELKFSMLEKLLTTMHKALIKAMDLAMGQEILVYSPIVSMTKIQKTPLPERKALPIRWITWMTYLEDPRIQFHYDKTLPELKHIPDVYTSSQSPVKHPSQYEGVFYTDGSAIKSPDPTKSNNAGMGIVHATYKPEYQVLNQWSIPLGNHTAQMAEIAAVEFACKKALKIPGPVLVITDSFYVAESANKELPYWKSNGFVNNKKKPLKHISKWKSIAECLSMKPDITIQHEKGISLQIPVFILKGNALADKLATQGSYVVNAGKRTADGSEFEKRTADGSEFESPKKKAKVE

SEQ ID NO: 1309 - protein, 2087 aa, synthetic construct
MPAAKRVKLDGGDKKYSIGLDIGTNSVGWAVITDEYKVPSKKFKVLGNTDRHSIKKNLIGALLFDSGETAEATRLKRTARRRYTRRKNRICYLQEIFSNEMAKVDDSFFHRLEESFLVEEDKKHERHPIFGNIVDEVAYHEKYPTIYHLRKKLVDSTDKADLRLIYLALAHMIKFRGHFLIEGDLNPDNSDVDKLFIQLVQTYNQLFEENPINASGVDAKAILSARLSKSRRLENLIAQLPGEKKNGLFGNLIALSLGLTPNFKSNFDLAEDAKLQLSKDTYDDDLDNLLAQIGDQYADLFLAAKNLSDAILLSDILRVNTEITKAPLSASMIKRYDEHHQDLTLLKALVRQQLPEKYKEIFFDQSKNGYAGYIDGGASQEEFYKFIKPILEKMDGTEELLVKLNREDLLRKQRTFDNGSIPHQIHLGELHAILRRQEDFYPFLKDNREKIEKILTFRIPYYVGPLARGNSRFAWMTRKSEETITPWNFEEVVDKGASAQSFIERMTNFDKNLPNEKVLPKHSLLYEYFTVYNELTKVKYVTEGMRKPAFLSGEQKKAIVDLLFKTNRKVTVKQLKEDYFKKIECFDSVEISGVEDRFNASLGTYHDLLKIIKDKDFLDNEENEDILEDIVLTLTLFEDREMIEERLKTYAHLFDDKVMKQLKRRRYTGWGRLSRKLINGIRDKQSGKTILDFLKSDGFANRNFMQLIHDDSLTFKEDIQKAQVSGQGDSLHEHIANLAGSPAIKKGILQTVKVVDELVKVMGRHKPENIVIEMARENQTTQKGQKNSRERMKRIEEGIKELGSQILKEHPVENTQLQNEKLYLYYLQNGRDMYVDQELDINRLSDYDVDHIVPQSFLKDDSIDNKVLTRSDKARGKSDNVPSEEVVKKMKNYWRQLLNAKLITQRKFDNLTKAERGGLSELDKAGFIKRQLVETRQITKHVAQILDSRMNTKYDENDKLIREVKVITLKSKLVSDFRKDFQFYKVREINNYHHAHDAYLNAVVGTALIKKYPKLESEFVYGDYKVYDVRKMIAKSEQEIGKATAKYFFYSNIMNFFKTEITLANGEIRKRPLIETNGETGEIVWDKGRDFATVRKVLSMPQVNIVKKTEVQTGGFSKESILPKRNSDKLIARKKDWDPKKYGGFDSPTVAYSVLVVAKVEKGKSKKLKSVKELLGITIMERSSFEKNPIDFLEAKGYKEVKKDLIIKLPKYSLFELENGRKRMLASAGELQKGNELALPSKYVNFLYLASHYEKLKGSPEDNEQKQLFVEQHKHYLDEIIEQISEFSKRVILADANLDKVLSAYNKHRDKPIREQAENIIHLFTLTNLGAPAAFKYFDTTIDRKRYTSTKEVLDATLIHQSITGLYETRIDLSQLGGDGGGGGEAAAKPAPGGVPWLTQQPLQLTILVPLQEYQEKILSKTALPEDQKQQLKTLFVKYDNLWQHWENQVGHRKIRPHNIATGDYPPRPQKQYPINPKAKPSIQIVIDDLLKQGVLTPQNSTMNTPVYPVPKPDGRWRMVLDYREVNKTIPLTAAQNQHSAGILATIVRQKYKTTLDLANGFWAHPITPESYWLTAFTWQGKQYCWTRLPQGFLNSPALFNADVVDLLKEIPNVQVYVDDIYLSHDDPKEHVQQLEKVFQILLQAGYVVSLKKSEIGQKTVEFLGFNITKEGRGLTDTFKTKLLNITPPKDLKQLQSILGLLNFARNFIPNFAELVQPLYNLIAPAKGKYIEWSEENTKQLNMVIEALNTASNLEERLPEQRLVIKVNTSPSAGYVRYYNETGKKPIMYLNYVFSKAELKFSMLEKLLTTMHKALIKAMDLAMGQEILVYSPIVSMTKIQKTPLPERKALPIRWITWMTYLEDPRIQFHYDKTLPELKHIPDVYTSSQSPVKHPSQYEGVFYTDGSAIKSPDPTKSNNAGMGIVHATYKPEYQVLNQWSIPLGNHTAQMAEIAAVEFACKKALKIPGPVLVITDSFYVAESANKELPYWKSNGFVNNKKKPLKHISKWKSIAECLSMKPDITIQHEKGISLQIPVFILKGNALADKLATQGSYVVNAGKRTADGSEFEKRTADGSEFESPKKKAKVE

SEQ ID NO: 1310 - protein, 2085 aa, synthetic construct
MPAAKRVKLDGGDKKYSIGLDIGTNSVGWAVITDEYKVPSKKFKVLGNTDRHSIKKNLIGALLFDSGETAEATRLKRTARRRYTRRKNRICYLQEIFSNEMAKVDDSFFHRLEESFLVEEDKKHERHPIFGNIVDEVAYHEKYPTIYHLRKKLVDSTDKADLRLIYLALAHMIKFRGHFLIEGDLNPDNSDVDKLFIQLVQTYNQLFEENPINASGVDAKAILSARLSKSRRLENLIAQLPGEKKNGLFGNLIALSLGLTPNFKSNFDLAEDAKLQLSKDTYDDDLDNLLAQIGDQYADLFLAAKNLSDAILLSDILRVNTEITKAPLSASMIKRYDEHHQDLTLLKALVRQQLPEKYKEIFFDQSKNGYAGYIDGGASQEEFYKFIKPILEKMDGTEELLVKLNREDLLRKQRTFDNGSIPHQIHLGELHAILRRQEDFYPFLKDNREKIEKILTFRIPYYVGPLARGNSRFAWMTRKSEETITPWNFEEVVDKGASAQSFIERMTNFDKNLPNEKVLPKHSLLYEYFTVYNELTKVKYVTEGMRKPAFLSGEQKKAIVDLLFKTNRKVTVKQLKEDYFKKIECFDSVEISGVEDRFNASLGTYHDLLKIIKDKDFLDNEENEDILEDIVLTLTLFEDREMIEERLKTYAHLFDDKVMKQLKRRRYTGWGRLSRKLINGIRDKQSGKTILDFLKSDGFANRNFMQLIHDDSLTFKEDIQKAQVSGQGDSLHEHIANLAGSPAIKKGILQTVKVVDELVKVMGRHKPENIVIEMARENQTTQKGQKNSRERMKRIEEGIKELGSQILKEHPVENTQLQNEKLYLYYLQNGRDMYVDQELDINRLSDYDVDHIVPQSFLKDDSIDNKVLTRSDKARGKSDNVPSEEVVKKMKNYWRQLLNAKLITQRKFDNLTKAERGGLSELDKAGFIKRQLVETRQITKHVAQILDSRMNTKYDENDKLIREVKVITLKSKLVSDFRKDFQFYKVREINNYHHAHDAYLNAVVGTALIKKYPKLESEFVYGDYKVYDVRKMIAKSEQEIGKATAKYFFYSNIMNFFKTEITLANGEIRKRPLIETNGETGEIVWDKGRDFATVRKVLSMPQVNIVKKTEVQTGGFSKESILPKRNSDKLIARKKDWDPKKYGGFDSPTVAYSVLVVAKVEKGKSKKLKSVKELLGITIMERSSFEKNPIDFLEAKGYKEVKKDLIIKLPKYSLFELENGRKRMLASAGELQKGNELALPSKYVNFLYLASHYEKLKGSPEDNEQKQLFVEQHKHYLDEIIEQISEFSKRVILADANLDKVLSAYNKHRDKPIREQAENIIHLFTLTNLGAPAAFKYFDTTIDRKRYTSTKEVLDATLIHQSITGLYETRIDLSQLGGDGGGGSGGGPAPGGVPWLTQQPLQLTILVPLQEYQEKILSKTALPEDQKQQLKTLFVKYDNLWQHWENQVGHRKIRPHNIATGDYPPRPQKQYPINPKAKPSIQIVIDDLLKQGVLTPQNSTMNTPVYPVPKPDGRWRMVLDYREVNKTIPLTAAQNQHSAGILATIVRQKYKTTLDLANGFWAHPITPESYWLTAFTWQGKQYCWTRLPQGFLNSPALFNADVVDLLKEIPNVQVYVDDIYLSHDDPKEHVQQLEKVFQILLQAGYVVSLKKSEIGQKTVEFLGFNITKEGRGLTDTFKTKLLNITPPKDLKQLQSILGLLNFARNFIPNFAELVQPLYNLIAPAKGKYIEWSEENTKQLNMVIEALNTASNLEERLPEQRLVIKVNTSPSAGYVRYYNETGKKPIMYLNYVFSKAELKFSMLEKLLTTMHKALIKAMDLAMGQEILVYSPIVSMTKIQKTPLPERKALPIRWITWMTYLEDPRIQFHYDKTLPELKHIPDVYTSSQSPVKHPSQYEGVFYTDGSAIKSPDPTKSNNAGMGIVHATYKPEYQVLNQWSIPLGNHTAQMAEIAAVEFACKKALKIPGPVLVITDSFYVAESANKELPYWKSNGFVNNKKKPLKHISKWKSIAECLSMKPDITIQHEKGISLQIPVFILKGNALADKLATQGSYVVNAGKRTADGSEFEKRTADGSEFESPKKKAKVE

SEQ ID NO: 1311 - protein, 2122 aa, synthetic construct
MPAAKRVKLDGGDKKYSIGLDIGTNSVGWAVITDEYKVPSKKFKVLGNTDRHSIKKNLIGALLFDSGETAEATRLKRTARRRYTRRKNRICYLQEIFSNEMAKVDDSFFHRLEESFLVEEDKKHERHPIFGNIVDEVAYHEKYPTIYHLRKKLVDSTDKADLRLIYLALAHMIKFRGHFLIEGDLNPDNSDVDKLFIQLVQTYNQLFEENPINASGVDAKAILSARLSKSRRLENLIAQLPGEKKNGLFGNLIALSLGLTPNFKSNFDLAEDAKLQLSKDTYDDDLDNLLAQIGDQYADLFLAAKNLSDAILLSDILRVNTEITKAPLSASMIKRYDEHHQDLTLLKALVRQQLPEKYKEIFFDQSKNGYAGYIDGGASQEEFYKFIKPILEKMDGTEELLVKLNREDLLRKQRTFDNGSIPHQIHLGELHAILRRQEDFYPFLKDNREKIEKILTFRIPYYVGPLARGNSRFAWMTRKSEETITPWNFEEVVDKGASAQSFIERMTNFDKNLPNEKVLPKHSLLYEYFTVYNELTKVKYVTEGMRKPAFLSGEQKKAIVDLLFKTNRKVTVKQLKEDYFKKIECFDSVEISGVEDRFNASLGTYHDLLKIIKDKDFLDNEENEDILEDIVLTLTLFEDREMIEERLKTYAHLFDDKVMKQLKRRRYTGWGRLSRKLINGIRDKQSGKTILDFLKSDGFANRNFMQLIHDDSLTFKEDIQKAQVSGQGDSLHEHIANLAGSPAIKKGILQTVKVVDELVKVMGRHKPENIVIEMARENQTTQKGQKNSRERMKRIEEGIKELGSQILKEHPVENTQLQNEKLYLYYLQNGRDMYVDQELDINRLSDYDVDHIVPQSFLKDDSIDNKVLTRSDKARGKSDNVPSEEVVKKMKNYWRQLLNAKLITQRKFDNLTKAERGGLSELDKAGFIKRQLVETRQITKHVAQILDSRMNTKYDENDKLIREVKVITLKSKLVSDFRKDFQFYKVREINNYHHAHDAYLNAVVGTALIKKYPKLESEFVYGDYKVYDVRKMIAKSEQEIGKATAKYFFYSNIMNFFKTEITLANGEIRKRPLIETNGETGEIVWDKGRDFATVRKVLSMPQVNIVKKTEVQTGGFSKESILPKRNSDKLIARKKDWDPKKYGGFDSPTVAYSVLVVAKVEKGKSKKLKSVKELLGITIMERSSFEKNPIDFLEAKGYKEVKKDLIIKLPKYSLFELENGRKRMLASAGELQKGNELALPSKYVNFLYLASHYEKLKGSPEDNEQKQLFVEQHKHYLDEIIEQISEFSKRVILADANLDKVLSAYNKHRDKPIREQAENIIHLFTLTNLGAPAAFKYFDTTIDRKRYTSTKEVLDATLIHQSITGLYETRIDLSQLGGDGGAEAAAKEAAAKEAAAKEAAAKALEAEAAAKEAAAKEAAAKEAAAKAGGVPWLTQQPLQLTILVPLQEYQEKILSKTALPEDQKQQLKTLFVKYDNLWQHWENQVGHRKIRPHNIATGDYPPRPQKQYPINPKAKPSIQIVIDDLLKQGVLTPQNSTMNTPVYPVPKPDGRWRMVLDYREVNKTIPLTAAQNQHSAGILATIVRQKYKTTLDLANGFWAHPITPESYWLTAFTWQGKQYCWTRLPQGFLNSPALFNADVVDLLKEIPNVQVYVDDIYLSHDDPKEHVQQLEKVFQILLQAGYVVSLKKSEIGQKTVEFLGFNITKEGRGLTDTFKTKLLNITPPKDLKQLQSILGKLNFARNFIPNFAELVQPLYNLIAPAKGKYIEWSEENTKQLNMVIEALNTASNLEERLPEQRLVIKVNTSPSAGYVRYYNETGKKPIMYLNYVFSKAELKFSMLEKLLTTMHKALIKAMDLAMGQEILVYSPIVSMTKIQKTPLPERKALPIRWITWMTYLEDPRIQFHYDKTLPELKHIPDVYTSSQSPVKHPSQYEGVFYTDGSAIKSPDPTKSNNAGMGIVHATYKPEYQVLNQWSIPLGNHTAQMAEIAAVEFACKKALKIPGPVLVITDSFYVAESANKELPYWKSNGFVNNKKKPLKHISKWKSIAECLSMKPDITIQHEKGISLQIPVFILKGNALADKLATQGSYVVNAGKRTADGSEFEKRTADGSEFESPKKKAKVE

SEQ ID NO: 1312 - protein, 2092 aa, synthetic construct
MPAAKRVKLDGGDKKYSIGLDIGTNSVGWAVITDEYKVPSKKFKVLGNTDRHSIKKNLIGALLFDSGETAEATRLKRTARRRYTRRKNRICYLQEIFSNEMAKVDDSFFHRLEESFLVEEDKKHERHPIFGNIVDEVAYHEKYPTIYHLRKKLVDSTDKADLRLIYLALAHMIKFRGHFLIEGDLNPDNSDVDKLFIQLVQTYNQLFEENPINASGVDAKAILSARLSKSRRLENLIAQLPGEKKNGLFGNLIALSLGLTPNFKSNFDLAEDAKLQLSKDTYDDDLDNLLAQIGDQYADLFLAAKNLSDAILLSDILRVNTEITKAPLSASMIKRYDEHHQDLTLLKALVRQQLPEKYKEIFFDQSKNGYAGYIDGGASQEEFYKFIKPILEKMDGTEELLVKLNREDLLRKQRTFDNGSIPHQIHLGELHAILRRQEDFYPFLKDNREKIEKILTFRIPYYVGPLARGNSRFAWMTRKSEETITPWNFEEVVDKGASAQSFIERMTNFDKNLPNEKVLPKHSLLYEYFTVYNELTKVKYVTEGMRKPAFLSGEQKKAIVDLLFKTNRKVTVKQLKEDYFKKIECFDSVEISGVEDRFNASLGTYHDLLKIIKDKDFLDNEENEDILEDIVLTLTLFEDREMIEERLKTYAHLFDDKVMKQLKRRRYTGWGRLSRKLINGIRDKQSGKTILDFLKSDGFANRNFMQLIHDDSLTFKEDIQKAQVSGQGDSLHEHIANLAGSPAIKKGILQTVKVVDELVKVMGRHKPENIVIEMARENQTTQKGQKNSRERMKRIEEGIKELGSQILKEHPVENTQLQNEKLYLYYLQNGRDMYVDQELDINRLSDYDVDHIVPQSFLKDDSIDNKVLTRSDKARGKSDNVPSEEVVKKMKNYWRQLLNAKLITQRKFDNLTKAERGGLSELDKAGFIKRQLVETRQITKHVAQILDSRMNTKYDENDKLIREVKVITLKSKLVSDFRKDFQFYKVREINNYHHAHDAYLNAVVGTALIKKYPKLESEFVYGDYKVYDVRKMIAKSEQEIGKATAKYFFYSNIMNFFKTEITLANGEIRKRPLIETNGETGEIVWDKGRDFATVRKVLSMPQVNIVKKTEVQTGGFSKESILPKRNSDKLIARKKDWDPKKYGGFDSPTVAYSVLVVAKVEKGKSKKLKSVKELLGITIMERSSFEKNPIDFLEAKGYKEVKKDLIIKLPKYSLFELENGRKRMLASAGELQKGNELALPSKYVNFLYLASHYEKLKGSPEDNEQKQLFVEQHKHYLDEIIEQISEFSKRVILADANLDKVLSAYNKHRDKPIREQAENIIHLFTLTNLGAPAAFKYFDTTIDRKRYTSTKEVLDATLIHQSITGLYETRIDLSQLGGDGGSGSETPGTSESATPESGGVPWLTQQPLQLTILVPLQEYQEKILSKTALPEDQKQQLKTLFVKYDNLWQHWENQVGHRKIRPHNIATGDYPPRPQKQYPINPKAKPSIQIVIDDLLKQGVLTPQNSTMNTPVYPVPKPDGRWRMVLDYREVNKTIPLTAAQNQHSAGILATIVRQKYKTTLDLANGFWAHPITPESYWLTAFTWQGKQYCWTRLPQGFLNSPALFNADVVDLLKEIPNVQVYVDDIYLSHDDPKEHVQQLEKVFQILLQAGYVVSLKKSEIGQKTVEFLGFNITKEGRGLTDTFKTKLLNITPPKDLKQLQSILGKLNFARNFIPNFAELVQPLYNLIAPAKGKYIEWSEENTKQLNMVIEALNTASNLEERLPEQRLVIKVNTSPSAGYVRYYNETGKKPIMYLNYVFSKAELKFSMLEKLLTTMHKALIKAMDLAMGQEILVYSPIVSMTKIQKTPLPERKALPIRWITWMTYLEDPRIQFHYDKTLPELKHIPDVYTSSQSPVKHPSQYEGVFYTDGSAIKSPDPTKSNNAGMGIVHATYKPEYQVLNQWSIPLGNHTAQMAEIAAVEFACKKALKIPGPVLVITDSFYVAESANKELPYWKSNGFVNNKKKPLKHISKWKSIAECLSMKPDITIQHEKGISLQIPVFILKGNALADKLATQGSYVVNAGKRTADGSEFEKRTADGSEFESPKKKAKVE

SEQ ID NO: 1313 - protein, 2096 aa, synthetic construct
MPAAKRVKLDGGDKKYSIGLDIGTNSVGWAVITDEYKVPSKKFKVLGNTDRHSIKKNLIGALLFDSGETAEATRLKRTARRRYTRRKNRICYLQEIFSNEMAKVDDSFFHRLEESFLVEEDKKHERHPIFGNIVDEVAYHEKYPTIYHLRKKLVDSTDKADLRLIYLALAHMIKFRGHFLIEGDLNPDNSDVDKLFIQLVQTYNQLFEENPINASGVDAKAILSARLSKSRRLENLIAQLPGEKKNGLFGNLIALSLGLTPNFKSNFDLAEDAKLQLSKDTYDDDLDNLLAQIGDQYADLFLAAKNLSDAILLSDILRVNTEITKAPLSASMIKRYDEHHQDLTLLKALVRQQLPEKYKEIFFDQSKNGYAGYIDGGASQEEFYKFIKPILEKMDGTEELLVKLNREDLLRKQRTFDNGSIPHQIHLGELHAILRRQEDFYPFLKDNREKIEKILTFRIPYYVGPLARGNSRFAWMTRKSEETITPWNFEEVVDKGASAQSFIERMTNFDKNLPNEKVLPKHSLLYEYFTVYNELTKVKYVTEGMRKPAFLSGEQKKAIVDLLFKTNRKVTVKQLKEDYFKKIECFDSVEISGVEDRFNASLGTYHDLLKIIKDKDFLDNEENEDILEDIVLTLTLFEDREMIEERLKTYAHLFDDKVMKQLKRRRYTGWGRLSRKLINGIRDKQSGKTILDFLKSDGFANRNFMQLIHDDSLTFKEDIQKAQVSGQGDSLHEHIANLAGSPAIKKGILQTVKVVDELVKVMGRHKPENIVIEMARENQTTQKGQKNSRERMKRIEEGIKELGSQILKEHPVENTQLQNEKLYLYYLQNGRDMYVDQELDINRLSDYDVDHIVPQSFLKDDSIDNKVLTRSDKARGKSDNVPSEEVVKKMKNYWRQLLNAKLITQRKFDNLTKAERGGLSELDKAGFIKRQLVETRQITKHVAQILDSRMNTKYDENDKLIREVKVITLKSKLVSDFRKDFQFYKVREINNYHHAHDAYLNAVVGTALIKKYPKLESEFVYGDYKVYDVRKMIAKSEQEIGKATAKYFFYSNIMNFFKTEITLANGEIRKRPLIETNGETGEIVWDKGRDFATVRKVLSMPQVNIVKKTEVQTGGFSKESILPKRNSDKLIARKKDWDPKKYGGFDSPTVAYSVLVVAKVEKGKSKKLKSVKELLGITIMERSSFEKNPIDFLEAKGYKEVKKDLIIKLPKYSLFELENGRKRMLASAGELQKGNELALPSKYVNFLYLASHYEKLKGSPEDNEQKQLFVEQHKHYLDEIIEQISEFSKRVILADANLDKVLSAYNKHRDKPIREQAENIIHLFTLTNLGAPAAFKYFDTTIDRKRYTSTKEVLDATLIHQSITGLYETRIDLSQLGGDGGEAAAKEAAAKEAAAKEAAAKGGVPWLTQQPLQLTILVPLQEYQEKILSKTALPEDQKQQLKTLFVKYDNLWQHWENQVGHRKIRPHNIATGDYPPRPQKQYPINPKAKPSIQIVIDDLLKQGVLTPQNSTMNTPVYPVPKPDGRWRMVLDYREVNKTIPLTAAQNQHSAGILATIVRQKYKTTLDLANGFWAHPITPESYWLTAFTWQGKQYCWTRLPQGFLNSPALFNADVVDLLKEIPNVQVYVDDIYLSHDDPKEHVQQLEKVFQILLQAGYVVSLKKSEIGQKTVEFLGFNITKEGRGLTDTFKTKLLNITPPKDLKQLQSILGKLNFARNFIPNFAELVQPLYNLIAPAKGKYIEWSEENTKQLNMVIEALNTASNLEERLPEQRLVIKVNTSPSAGYVRYYNETGKKPIMYLNYVFSKAELKFSMLEKLLTTMHKALIKAMDLAMGQEILVYSPIVSMTKIQKTPLPERKALPIRWITWMTYLEDPRIQFHYDKTLPELKHIPDVYTSSQSPVKHPSQYEGVFYTDGSAIKSPDPTKSNNAGMGIVHATYKPEYQVLNQWSIPLGNHTAQMAEIAAVEFACKKALKIPGPVLVITDSFYVAESANKELPYWKSNGFVNNKKKPLKHISKWKSIAECLSMKPDITIQHEKGISLQIPVFILKGNALADKLATQGSYVVNAGKRTADGSEFEKRTADGSEFESPKKKAKVE

SEQ ID NO: 1314 - protein, 2096 aa, synthetic construct
MPAAKRVKLDGGDKKYSIGLDIGTNSVGWAVITDEYKVPSKKFKVLGNTDRHSIKKNLIGALLFDSGETAEATRLKRTARRRYTRRKNRICYLQEIFSNEMAKVDDSFFHRLEESFLVEEDKKHERHPIFGNIVDEVAYHEKYPTIYHLRKKLVDSTDKADLRLIYLALAHMIKFRGHFLIEGDLNPDNSDVDKLFIQLVQTYNQLFEENPINASGVDAKAILSARLSKSRRLENLIAQLPGEKKNGLFGNLIALSLGLTPNFKSNFDLAEDAKLQLSKDTYDDDLDNLLAQIGDQYADLFLAAKNLSDAILLSDILRVNTEITKAPLSASMIKRYDEHHQDLTLLKALVRQQLPEKYKEIFFDQSKNGYAGYIDGGASQEEFYKFIKPILEKMDGTEELLVKLNREDLLRKQRTFDNGSIPHQIHLGELHAILRRQEDFYPFLKDNREKIEKILTFRIPYYVGPLARGNSRFAWMTRKSEETITPWNFEEVVDKGASAQSFIERMTNFDKNLPNEKVLPKHSLLYEYFTVYNELTKVKYVTEGMRKPAFLSGEQKKAIVDLLFKTNRKVTVKQLKEDYFKKIECFDSVEISGVEDRFNASLGTYHDLLKIIKDKDFLDNEENEDILEDIVLTLTLFEDREMIEERLKTYAHLFDDKVMKQLKRRRYTGWGRLSRKLINGIRDKQSGKTILDFLKSDGFANRNFMQLIHDDSLTFKEDIQKAQVSGQGDSLHEHIANLAGSPAIKKGILQTVKVVDELVKVMGRHKPENIVIEMARENQTTQKGQKNSRERMKRIEEGIKELGSQILKEHPVENTQLQNEKLYLYYLQNGRDMYVDQELDINRLSDYDVDHIVPQSFLKDDSIDNKVLTRSDKARGKSDNVPSEEVVKKMKNYWRQLLNAKLITQRKFDNLTKAERGGLSELDKAGFIKRQLVETRQITKHVAQILDSRMNTKYDENDKLIREVKVITLKSKLVSDFRKDFQFYKVREINNYHHAHDAYLNAVVGTALIKKYPKLESEFVYGDYKVYDVRKMIAKSEQEIGKATAKYFFYSNIMNFFKTEITLANGEIRKRPLIETNGETGEIVWDKGRDFATVRKVLSMPQVNIVKKTEVQTGGFSKESILPKRNSDKLIARKKDWDPKKYGGFDSPTVAYSVLVVAKVEKGKSKKLKSVKELLGITIMERSSFEKNPIDFLEAKGYKEVKKDLIIKLPKYSLFELENGRKRMLASAGELQKGNELALPSKYVNFLYLASHYEKLKGSPEDNEQKQLFVEQHKHYLDEIIEQISEFSKRVILADANLDKVLSAYNKHRDKPIREQAENIIHLFTLTNLGAPAAFKYFDTTIDRKRYTSTKEVLDATLIHQSITGLYETRIDLSQLGGDGGGGGGSGGGGSGGGGSGGGGSGGVPWLTQQPLQLTILVPLQEYQEKILSKTALPEDQKQQLKTLFVKYDNLWQHWENQVGHRKIRPHNIATGDYPPRPQKQYPINPKAKPSIQIVIDDLLKQGVLTPQNSTMNTPVYPVPKPDGRWRMVLDYREVNKTIPLTAAQNQHSAGILATIVRQKYKTTLDLANGFWAHPITPESYWLTAFTWQGKQYCWTRLPQGFLNSPALFNADVVDLLKEIPNVQVYVDDIYLSHDDPKEHVQQLEKVFQILLQAGYVVSLKKSEIGQKTVEFLGFNITKEGRGLTDTFKTKLLNITPPKDLKQLQSILGKLNFARNFIPNFAELVQPLYNLIAPAKGKYIEWSEENTKQLNMVIEALNTASNLEERLPEQRLVIKVNTSPSAGYVRYYNETGKKPIMYLNYVFSKAELKFSMLEKLLTTMHKALIKAMDLAMGQEILVYSPIVSMTKIQKTPLPERKALPIRWITWMTYLEDPRIQFHYDKTLPELKHIPDVYTSSQSPVKHPSQYEGVFYTDGSAIKSPDPTKSNNAGMGIVHATYKPEYQVLNQWSIPLGNHTAQMAEIAAVEFACKKALKIPGPVLVITDSFYVAESANKELPYWKSNGFVNNKKKPLKHISKWKSIAECLSMKPDITIQHEKGISLQIPVFILKGNALADKLATQGSYVVNAGKRTADGSEFEKRTADGSEFESPKKKAKVE

SEQ ID NO: 1315 - protein, 2087 aa, synthetic construct
MPAAKRVKLDGGDKKYSIGLDIGTNSVGWAVITDEYKVPSKKFKVLGNTDRHSIKKNLIGALLFDSGETAEATRLKRTARRRYTRRKNRICYLQEIFSNEMAKVDDSFFHRLEESFLVEEDKKHERHPIFGNIVDEVAYHEKYPTIYHLRKKLVDSTDKADLRLIYLALAHMIKFRGHFLIEGDLNPDNSDVDKLFIQLVQTYNQLFEENPINASGVDAKAILSARLSKSRRLENLIAQLPGEKKNGLFGNLIALSLGLTPNFKSNFDLAEDAKLQLSKDTYDDDLDNLLAQIGDQYADLFLAAKNLSDAILLSDILRVNTEITKAPLSASMIKRYDEHHQDLTLLKALVRQQLPEKYKEIFFDQSKNGYAGYIDGGASQEEFYKFIKPILEKMDGTEELLVKLNREDLLRKQRTFDNGSIPHQIHLGELHAILRRQEDFYPFLKDNREKIEKILTFRIPYYVGPLARGNSRFAWMTRKSEETITPWNFEEVVDKGASAQSFIERMTNFDKNLPNEKVLPKHSLLYEYFTVYNELTKVKYVTEGMRKPAFLSGEQKKAIVDLLFKTNRKVTVKQLKEDYFKKIECFDSVEISGVEDRFNASLGTYHDLLKIIKDKDFLDNEENEDILEDIVLTLTLFEDREMIEERLKTYAHLFDDKVMKQLKRRRYTGWGRLSRKLINGIRDKQSGKTILDFLKSDGFANRNFMQLIHDDSLTFKEDIQKAQVSGQGDSLHEHIANLAGSPAIKKGILQTVKVVDELVKVMGRHKPENIVIEMARENQTTQKGQKNSRERMKRIEEGIKELGSQILKEHPVENTQLQNEKLYLYYLQNGRDMYVDQELDINRLSDYDVDHIVPQSFLKDDSIDNKVLTRSDKARGKSDNVPSEEVVKKMKNYWRQLLNAKLITQRKFDNLTKAERGGLSELDKAGFIKRQLVETRQITKHVAQILDSRMNTKYDENDKLIREVKVITLKSKLVSDFRKDFQFYKVREINNYHHAHDAYLNAVVGTALIKKYPKLESEFVYGDYKVYDVRKMIAKSEQEIGKATAKYFFYSNIMNFFKTEITLANGEIRKRPLIETNGETGEIVWDKGRDFATVRKVLSMPQVNIVKKTEVQTGGFSKESILPKRNSDKLIARKKDWDPKKYGGFDSPTVAYSVLVVAKVEKGKSKKLKSVKELLGITIMERSSFEKNPIDFLEAKGYKEVKKDLIIKLPKYSLFELENGRKRMLASAGELQKGNELALPSKYVNFLYLASHYEKLKGSPEDNEQKQLFVEQHKHYLDEIIEQISEFSKRVILADANLDKVLSAYNKHRDKPIREQAENIIHLFTLTNLGAPAAFKYFDTTIDRKRYTSTKEVLDATLIHQSITGLYETRIDLSQLGGDGGGSSPAPEAAAKGGVPWLTQQPLQLTILVPLQEYQEKILSKTALPEDQKQQLKTLFVKYDNLWQHWENQVGHRKIRPHNIATGDYPPRPQKQYPINPKAKPSIQIVIDDLLKQGVLTPQNSTMNTPVYPVPKPDGRWRMVLDYREVNKTIPLTAAQNQHSAGILATIVRQKYKTTLDLANGFWAHPITPESYWLTAFTWQGKQYCWTRLPQGFLNSPALFNADVVDLLKEIPNVQVYVDDIYLSHDDPKEHVQQLEKVFQILLQAGYVVSLKKSEIGQKTVEFLGFNITKEGRGLTDTFKTKLLNITPPKDLKQLQSILGKLNFARNFIPNFAELVQPLYNLIAPAKGKYIEWSEENTKQLNMVIEALNTASNLEERLPEQRLVIKVNTSPSAGYVRYYNETGKKPIMYLNYVFSKAELKFSMLEKLLTTMHKALIKAMDLAMGQEILVYSPIVSMTKIQKTPLPERKALPIRWITWMTYLEDPRIQFHYDKTLPELKHIPDVYTSSQSPVKHPSQYEGVFYTDGSAIKSPDPTKSNNAGMGIVHATYKPEYQVLNQWSIPLGNHTAQMAEIAAVEFACKKALKIPGPVLVITDSFYVAESANKELPYWKSNGFVNNKKKPLKHISKWKSIAECLSMKPDITIQHEKGISLQIPVFILKGNALADKLATQGSYVVNAGKRTADGSEFEKRTADGSEFESPKKKAKVE

SEQ ID NO: 1316 - protein, 2086 aa, synthetic construct
MPAAKRVKLDGGDKKYSIGLDIGTNSVGWAVITDEYKVPSKKFKVLGNTDRHSIKKNLIGALLFDSGETAEATRLKRTARRRYTRRKNRICYLQEIFSNEMAKVDDSFFHRLEESFLVEEDKKHERHPIFGNIVDEVAYHEKYPTIYHLRKKLVDSTDKADLRLIYLALAHMIKFRGHFLIEGDLNPDNSDVDKLFIQLVQTYNQLFEENPINASGVDAKAILSARLSKSRRLENLIAQLPGEKKNGLFGNLIALSLGLTPNFKSNFDLAEDAKLQLSKDTYDDDLDNLLAQIGDQYADLFLAAKNLSDAILLSDILRVNTEITKAPLSASMIKRYDEHHQDLTLLKALVRQQLPEKYKEIFFDQSKNGYAGYIDGGASQEEFYKFIKPILEKMDGTEELLVKLNREDLLRKQRTFDNGSIPHQIHLGELHAILRRQEDFYPFLKDNREKIEKILTFRIPYYVGPLARGNSRFAWMTRKSEETITPWNFEEVVDKGASAQSFIERMTNFDKNLPNEKVLPKHSLLYEYFTVYNELTKVKYVTEGMRKPAFLSGEQKKAIVDLLFKTNRKVTVKQLKEDYFKKIECFDSVEISGVEDRFNASLGTYHDLLKIIKDKDFLDNEENEDILEDIVLTLTLFEDREMIEERLKTYAHLFDDKVMKQLKRRRYTGWGRLSRKLINGIRDKQSGKTILDFLKSDGFANRNFMQLIHDDSLTFKEDIQKAQVSGQGDSLHEHIANLAGSPAIKKGILQTVKVVDELVKVMGRHKPENIVIEMARENQTTQKGQKNSRERMKRIEEGIKELGSQILKEHPVENTQLQNEKLYLYYLQNGRDMYVDQELDINRLSDYDVDHIVPQSFLKDDSIDNKVLTRSDKARGKSDNVPSEEVVKKMKNYWRQLLNAKLITQRKFDNLTKAERGGLSELDKAGFIKRQLVETRQITKHVAQILDSRMNTKYDENDKLIREVKVITLKSKLVSDFRKDFQFYKVREINNYHHAHDAYLNAVVGTALIKKYPKLESEFVYGDYKVYDVRKMIAKSEQEIGKATAKYFFYSNIMNFFKTEITLANGEIRKRPLIETNGETGEIVWDKGRDFATVRKVLSMPQVNIVKKTEVQTGGFSKESILPKRNSDKLIARKKDWDPKKYGGFDSPTVAYSVLVVAKVEKGKSKKLKSVKELLGITIMERSSFEKNPIDFLEAKGYKEVKKDLIIKLPKYSLFELENGRKRMLASAGELQKGNELALPSKYVNFLYLASHYEKLKGSPEDNEQKQLFVEQHKHYLDEIIEQISEFSKRVILADANLDKVLSAYNKHRDKPIREQAENIIHLFTLTNLGAPAAFKYFDTTIDRKRYTSTKEVLDATLIHQSITGLYETRIDLSQLGGDGGGGGGSGGGGSGGVPWLTQQPLQLTILVPLQEYQEKILSKTALPEDQKQQLKTLFVKYDNLWQHWENQVGHRKIRPHNIATGDYPPRPQKQYPINPKAKPSIQIVIDDLLKQGVLTPQNSTMNTPVYPVPKPDGRWRMVLDYREVNKTIPLTAAQNQHSAGILATIVRQKYKTTLDLANGFWAHPITPESYWLTAFTWQGKQYCWTRLPQGFLNSPALFNADVVDLLKEIPNVQVYVDDIYLSHDDPKEHVQQLEKVFQILLQAGYVVSLKKSEIGQKTVEFLGFNITKEGRGLTDTFKTKLLNITPPKDLKQLQSILGKLNFARNFIPNFAELVQPLYNLIAPAKGKYIEWSEENTKQLNMVIEALNTASNLEERLPEQRLVIKVNTSPSAGYVRYYNETGKKPIMYLNYVFSKAELKFSMLEKLLTTMHKALIKAMDLAMGQEILVYSPIVSMTKIQKTPLPERKALPIRWITWMTYLEDPRIQFHYDKTLPELKHIPDVYTSSQSPVKHPSQYEGVFYTDGSAIKSPDPTKSNNAGMGIVHATYKPEYQVLNQWSIPLGNHTAQMAEIAAVEFACKKALKIPGPVLVITDSFYVAESANKELPYWKSNGFVNNKKKPLKHISKWKSIAECLSMKPDITIQHEKGISLQIPVFILKGNALADKLATQGSYVVNAGKRTADGSEFEKRTADGSEFESPKKKAKVE

SEQ ID NO: 1317 - protein, 2087 aa, synthetic construct
MPAAKRVKLDGGDKKYSIGLDIGTNSVGWAVITDEYKVPSKKFKVLGNTDRHSIKKNLIGALLFDSGETAEATRLKRTARRRYTRRKNRICYLQEIFSNEMAKVDDSFFHRLEESFLVEEDKKHERHPIFGNIVDEVAYHEKYPTIYHLRKKLVDSTDKADLRLIYLALAHMIKFRGHFLIEGDLNPDNSDVDKLFIQLVQTYNQLFEENPINASGVDAKAILSARLSKSRRLENLIAQLPGEKKNGLFGNLIALSLGLTPNFKSNFDLAEDAKLQLSKDTYDDDLDNLLAQIGDQYADLFLAAKNLSDAILLSDILRVNTEITKAPLSASMIKRYDEHHQDLTLLKALVRQQLPEKYKEIFFDQSKNGYAGYIDGGASQEEFYKFIKPILEKMDGTEELLVKLNREDLLRKQRTFDNGSIPHQIHLGELHAILRRQEDFYPFLKDNREKIEKILTFRIPYYVGPLARGNSRFAWMTRKSEETITPWNFEEVVDKGASAQSFIERMTNFDKNLPNEKVLPKHSLLYEYFTVYNELTKVKYVTEGMRKPAFLSGEQKKAIVDLLFKTNRKVTVKQLKEDYFKKIECFDSVEISGVEDRFNASLGTYHDLLKIIKDKDFLDNEENEDILEDIVLTLTLFEDREMIEERLKTYAHLFDDKVMKQLKRRRYTGWGRLSRKLINGIRDKQSGKTILDFLKSDGFANRNFMQLIHDDSLTFKEDIQKAQVSGQGDSLHEHIANLAGSPAIKKGILQTVKVVDELVKVMGRHKPENIVIEMARENQTTQKGQKNSRERMKRIEEGIKELGSQILKEHPVENTQLQNEKLYLYYLQNGRDMYVDQELDINRLSDYDVDHIVPQSFLKDDSIDNKVLTRSDKARGKSDNVPSEEVVKKMKNYWRQLLNAKLITQRKFDNLTKAERGGLSELDKAGFIKRQLVETRQITKHVAQILDSRMNTKYDENDKLIREVKVITLKSKLVSDFRKDFQFYKVREINNYHHAHDAYLNAVVGTALIKKYPKLESEFVYGDYKVYDVRKMIAKSEQEIGKATAKYFFYSNIMNFFKTEITLANGEIRKRPLIETNGETGEIVWDKGRDFATVRKVLSMPQVNIVKKTEVQTGGFSKESILPKRNSDKLIARKKDWDPKKYGGFDSPTVAYSVLVVAKVEKGKSKKLKSVKELLGITIMERSSFEKNPIDFLEAKGYKEVKKDLIIKLPKYSLFELENGRKRMLASAGELQKGNELALPSKYVNFLYLASHYEKLKGSPEDNEQKQLFVEQHKHYLDEIIEQISEFSKRVILADANLDKVLSAYNKHRDKPIREQAENIIHLFTLTNLGAPAAFKYFDTTIDRKRYTSTKEVLDATLIHQSITGLYETRIDLSQLGGDGGPAPGSSEAAAKGGVPWLTQQPLQLTILVPLQEYQEKILSKTALPEDQKQQLKTLFVKYDNLWQHWENQVGHRKIRPHNIATGDYPPRPQKQYPINPKAKPSIQIVIDDLLKQGVLTPQNSTMNTPVYPVPKPDGRWRMVLDYREVNKTIPLTAAQNQHSAGILATIVRQKYKTTLDLANGFWAHPITPESYWLTAFTWQGKQYCWTRLPQGFLNSPALFNADVVDLLKEIPNVQVYVDDIYLSHDDPKEHVQQLEKVFQILLQAGYVVSLKKSEIGQKTVEFLGFNITKEGRGLTDTFKTKLLNITPPKDLKQLQSILGKLNFARNFIPNFAELVQPLYNLIAPAKGKYIEWSEENTKQLNMVIEALNTASNLEERLPEQRLVIKVNTSPSAGYVRYYNETGKKPIMYLNYVFSKAELKFSMLEKLLTTMHKALIKAMDLAMGQEILVYSPIVSMTKIQKTPLPERKALPIRWITWMTYLEDPRIQFHYDKTLPELKHIPDVYTSSQSPVKHPSQYEGVFYTDGSAIKSPDPTKSNNAGMGIVHATYKPEYQVLNQWSIPLGNHTAQMAEIAAVEFACKKALKIPGPVLVITDSFYVAESANKELPYWKSNGFVNNKKKPLKHISKWKSIAECLSMKPDITIQHEKGISLQIPVFILKGNALADKLATQGSYVVNAGKRTADGSEFEKRTADGSEFESPKKKAKVE

SEQ ID NO: 1318 - protein, 2087 aa, synthetic construct
MPAAKRVKLDGGDKKYSIGLDIGTNSVGWAVITDEYKVPSKKFKVLGNTDRHSIKKNLIGALLFDSGETAEATRLKRTARRRYTRRKNRICYLQEIFSNEMAKVDDSFFHRLEESFLVEEDKKHERHPIFGNIVDEVAYHEKYPTIYHLRKKLVDSTDKADLRLIYLALAHMIKFRGHFLIEGDLNPDNSDVDKLFIQLVQTYNQLFEENPINASGVDAKAILSARLSKSRRLENLIAQLPGEKKNGLFGNLIALSLGLTPNFKSNFDLAEDAKLQLSKDTYDDDLDNLLAQIGDQYADLFLAAKNLSDAILLSDILRVNTEITKAPLSASMIKRYDEHHQDLTLLKALVRQQLPEKYKEIFFDQSKNGYAGYIDGGASQEEFYKFIKPILEKMDGTEELLVKLNREDLLRKQRTFDNGSIPHQIHLGELHAILRRQEDFYPFLKDNREKIEKILTFRIPYYVGPLARGNSRFAWMTRKSEETITPWNFEEVVDKGASAQSFIERMTNFDKNLPNEKVLPKHSLLYEYFTVYNELTKVKYVTEGMRKPAFLSGEQKKAIVDLLFKTNRKVTVKQLKEDYFKKIECFDSVEISGVEDRFNASLGTYHDLLKIIKDKDFLDNEENEDILEDIVLTLTLFEDREMIEERLKTYAHLFDDKVMKQLKRRRYTGWGRLSRKLINGIRDKQSGKTILDFLKSDGFANRNFMQLIHDDSLTFKEDIQKAQVSGQGDSLHEHIANLAGSPAIKKGILQTVKVVDELVKVMGRHKPENIVIEMARENQTTQKGQKNSRERMKRIEEGIKELGSQILKEHPVENTQLQNEKLYLYYLQNGRDMYVDQELDINRLSDYDVDHIVPQSFLKDDSIDNKVLTRSDKARGKSDNVPSEEVVKKMKNYWRQLLNAKLITQRKFDNLTKAERGGLSELDKAGFIKRQLVETRQITKHVAQILDSRMNTKYDENDKLIREVKVITLKSKLVSDFRKDFQFYKVREINNYHHAHDAYLNAVVGTALIKKYPKLESEFVYGDYKVYDVRKMIAKSEQEIGKATAKYFFYSNIMNFFKTEITLANGEIRKRPLIETNGETGEIVWDKGRDFATVRKVLSMPQVNIVKKTEVQTGGFSKESILPKRNSDKLIARKKDWDPKKYGGFDSPTVAYSVLVVAKVEKGKSKKLKSVKELLGITIMERSSFEKNPIDFLEAKGYKEVKKDLIIKLPKYSLFELENGRKRMLASAGELQKGNELALPSKYVNFLYLASHYEKLKGSPEDNEQKQLFVEQHKHYLDEIIEQISEFSKRVILADANLDKVLSAYNKHRDKPIREQAENIIHLFTLTNLGAPAAFKYFDTTIDRKRYTSTKEVLDATLIHQSITGLYETRIDLSQLGGDGGPAPAPAPAPAPGGVPWLTQQPLQLTILVPLQEYQEKILSKTALPEDQKQQLKTLFVKYDNLWQHWENQVGHRKIRPHNIATGDYPPRPQKQYPINPKAKPSIQIVIDDLLKQGVLTPQNSTMNTPVYPVPKPDGRWRMVLDYREVNKTIPLTAAQNQHSAGILATIVRQKYKTTLDLANGFWAHPITPESYWLTAFTWQGKQYCWTRLPQGFLNSPALFNADVVDLLKEIPNVQVYVDDIYLSHDDPKEHVQQLEKVFQILLQAGYVVSLKKSEIGQKTVEFLGFNITKEGRGLTDTFKTKLLNITPPKDLKQLQSILGKLNFARNFIPNFAELVQPLYNLIAPAKGKYIEWSEENTKQLNMVIEALNTASNLEERLPEQRLVIKVNTSPSAGYVRYYNETGKKPIMYLNYVFSKAELKFSMLEKLLTTMHKALIKAMDLAMGQEILVYSPIVSMTKIQKTPLPERKALPIRWITWMTYLEDPRIQFHYDKTLPELKHIPDVYTSSQSPVKHPSQYEGVFYTDGSAIKSPDPTKSNNAGMGIVHATYKPEYQVLNQWSIPLGNHTAQMAEIAAVEFACKKALKIPGPVLVITDSFYVAESANKELPYWKSNGFVNNKKKPLKHISKWKSIAECLSMKPDITIQHEKGISLQIPVFILKGNALADKLATQGSYVVNAGKRTADGSEFEKRTADGSEFESPKKKAKVE

SEQ ID NO: 1319 - protein, 2085 aa, synthetic construct
MPAAKRVKLDGGDKKYSIGLDIGTNSVGWAVITDEYKVPSKKFKVLGNTDRHSIKKNLIGALLFDSGETAEATRLKRTARRRYTRRKNRICYLQEIFSNEMAKVDDSFFHRLEESFLVEEDKKHERHPIFGNIVDEVAYHEKYPTIYHLRKKLVDSTDKADLRLIYLALAHMIKFRGHFLIEGDLNPDNSDVDKLFIQLVQTYNQLFEENPINASGVDAKAILSARLSKSRRLENLIAQLPGEKKNGLFGNLIALSLGLTPNFKSNFDLAEDAKLQLSKDTYDDDLDNLLAQIGDQYADLFLAAKNLSDAILLSDILRVNTEITKAPLSASMIKRYDEHHQDLTLLKALVRQQLPEKYKEIFFDQSKNGYAGYIDGGASQEEFYKFIKPILEKMDGTEELLVKLNREDLLRKQRTFDNGSIPHQIHLGELHAILRRQEDFYPFLKDNREKIEKILTFRIPYYVGPLARGNSRFAWMTRKSEETITPWNFEEVVDKGASAQSFIERMTNFDKNLPNEKVLPKHSLLYEYFTVYNELTKVKYVTEGMRKPAFLSGEQKKAIVDLLFKTNRKVTVKQLKEDYFKKIECFDSVEISGVEDRFNASLGTYHDLLKIIKDKDFLDNEENEDILEDIVLTLTLFEDREMIEERLKTYAHLFDDKVMKQLKRRRYTGWGRLSRKLINGIRDKQSGKTILDFLKSDGFANRNFMQLIHDDSLTFKEDIQKAQVSGQGDSLHEHIANLAGSPAIKKGILQTVKVVDELVKVMGRHKPENIVIEMARENQTTQKGQKNSRERMKRIEEGIKELGSQILKEHPVENTQLQNEKLYLYYLQNGRDMYVDQELDINRLSDYDVDHIVPQSFLKDDSIDNKVLTRSDKARGKSDNVPSEEVVKKMKNYWRQLLNAKLITQRKFDNLTKAERGGLSELDKAGFIKRQLVETRQITKHVAQILDSRMNTKYDENDKLIREVKVITLKSKLVSDFRKDFQFYKVREINNYHHAHDAYLNAVVGTALIKKYPKLESEFVYGDYKVYDVRKMIAKSEQEIGKATAKYFFYSNIMNFFKTEITLANGEIRKRPLIETNGETGEIVWDKGRDFATVRKVLSMPQVNIVKKTEVQTGGFSKESILPKRNSDKLIARKKDWDPKKYGGFDSPTVAYSVLVVAKVEKGKSKKLKSVKELLGITIMERSSFEKNPIDFLEAKGYKEVKKDLIIKLPKYSLFELENGRKRMLASAGELQKGNELALPSKYVNFLYLASHYEKLKGSPEDNEQKQLFVEQHKHYLDEIIEQISEFSKRVILADANLDKVLSAYNKHRDKPIREQAENIIHLFTLTNLGAPAAFKYFDTTIDRKRYTSTKEVLDATLIHQSITGLYETRIDLSQLGGDGGPAPGSSGGGGGVPWLTQQPLQLTILVPLQEYQEKILSKTALPEDQKQQLKTLFVKYDNLWQHWENQVGHRKIRPHNIATGDYPPRPQKQYPINPKAKPSIQIVIDDLLKQGVLTPQNSTMNTPVYPVPKPDGRWRMVLDYREVNKTIPLTAAQNQHSAGILATIVRQKYKTTLDLANGFWAHPITPESYWLTAFTWQGKQYCWTRLPQGFLNSPALFNADVVDLLKEIPNVQVYVDDIYLSHDDPKEHVQQLEKVFQILLQAGYVVSLKKSEIGQKTVEFLGFNITKEGRGLTDTFKTKLLNITPPKDLKQLQSILGKLNFARNFIPNFAELVQPLYNLIAPAKGKYIEWSEENTKQLNMVIEALNTASNLEERLPEQRLVIKVNTSPSAGYVRYYNETGKKPIMYLNYVFSKAELKFSMLEKLLTTMHKALIKAMDLAMGQEILVYSPIVSMTKIQKTPLPERKALPIRWITWMTYLEDPRIQFHYDKTLPELKHIPDVYTSSQSPVKHPSQYEGVFYTDGSAIKSPDPTKSNNAGMGIVHATYKPEYQVLNQWSIPLGNHTAQMAEIAAVEFACKKALKIPGPVLVITDSFYVAESANKELPYWKSNGFVNNKKKPLKHISKWKSIAECLSMKPDITIQHEKGISLQIPVFILKGNALADKLATQGSYVVNAGKRTADGSEFEKRTADGSEFESPKKKAKVE

SEQ ID NO: 1320 - protein, 2176 aa, synthetic construct
MPAAKRVKLDGGDKKYSIGLDIGTNSVGWAVITDEYKVPSKKFKVLGNTDRHSIKKNLIGALLFDSGETAEATRLKRTARRRYTRRKNRICYLQEIFSNEMAKVDDSFFHRLEESFLVEEDKKHERHPIFGNIVDEVAYHEKYPTIYHLRKKLVDSTDKADLRLIYLALAHMIKFRGHFLIEGDLNPDNSDVDKLFIQLVQTYNQLFEENPINASGVDAKAILSARLSKSRRLENLIAQLPGEKKNGLFGNLIALSLGLTPNFKSNFDLAEDAKLQLSKDTYDDDLDNLLAQIGDQYADLFLAAKNLSDAILLSDILRVNTEITKAPLSASMIKRYDEHHQDLTLLKALVRQQLPEKYKEIFFDQSKNGYAGYIDGGASQEEFYKFIKPILEKMDGTEELLVKLNREDLLRKQRTFDNGSIPHQIHLGELHAILRRQEDFYPFLKDNREKIEKILTFRIPYYVGPLARGNSRFAWMTRKSEETITPWNFEEVVDKGASAQSFIERMTNFDKNLPNEKVLPKHSLLYEYFTVYNELTKVKYVTEGMRKPAFLSGEQKKAIVDLLFKTNRKVTVKQLKEDYFKKIECFDSVEISGVEDRFNASLGTYHDLLKIIKDKDFLDNEENEDILEDIVLTLTLFEDREMIEERLKTYAHLFDDKVMKQLKRRRYTGWGRLSRKLINGIRDKQSGKTILDFLKSDGFANRNFMQLIHDDSLTFKEDIQKAQVSGQGDSLHEHIANLAGSPAIKKGILQTVKVVDELVKVMGRHKPENIVIEMARENQTTQKGQKNSRERMKRIEEGIKELGSQILKEHPVENTQLQNEKLYLYYLQNGRDMYVDQELDINRLSDYDVDHIVPQSFLKDDSIDNKVLTRSDKARGKSDNVPSEEVVKKMKNYWRQLLNAKLITQRKFDNLTKAERGGLSELDKAGFIKRQLVETRQITKHVAQILDSRMNTKYDENDKLIREVKVITLKSKLVSDFRKDFQFYKVREINNYHHAHDAYLNAVVGTALIKKYPKLESEFVYGDYKVYDVRKMIAKSEQEIGKATAKYFFYSNIMNFFKTEITLANGEIRKRPLIETNGETGEIVWDKGRDFATVRKVLSMPQVNIVKKTEVQTGGFSKESILPKRNSDKLIARKKDWDPKKYGGFDSPTVAYSVLVVAKVEKGKSKKLKSVKELLGITIMERSSFEKNPIDFLEAKGYKEVKKDLIIKLPKYSLFELENGRKRMLASAGELQKGNELALPSKYVNFLYLASHYEKLKGSPEDNEQKQLFVEQHKHYLDEIIEQISEFSKRVILADANLDKVLSAYNKHRDKPIREQAENIIHLFTLTNLGAPAAFKYFDTTIDRKRYTSTKEVLDATLIHQSITGLYETRIDLSQLGGDGGEAAAKPAPGSSGGMNPLQLLQPLPAEIKGTKLLAHWNSGATITCIPESFLEDEQPIKKTLIKTIHGEKQQNVYYVTFKVKGRKVEAEVIASPYEYILLSPTDVPWLTQQPLQLTILVPLQEYQEKILSKTALPEDQKQQLKTLFVKYDNLWQHWENQVGHRKIRPHNIATGDYPPRPQKQYPINPKAKPSIQIVIDDLLKQGVLTPQNSTMNTPVYPVPKPDGRWRMVLDYREVNKTIPLTAAQNQHSAGILATIVRQKYKTTLDLANGFWAHPITPESYWLTAFTWQGKQYCWTRLPQGFLNSPALFNADVVDLLKEIPNVQVYVDDIYLSHDDPKEHVQQLEKVFQILLQAGYVVSLKKSEIGQKTVEFLGFNITKEGRGLTDTFKTKLLNITPPKDLKQLQSILGLLNFARNFIPNFAELVQPLYNLIAPAKGKYIEWSEENTKQLNMVIEALNTASNLEERLPEQRLVIKVNTSPSAGYVRYYNETGKKPIMYLNYVFSKAELKFSMLEKLLTTMHKALIKAMDLAMGQEILVYSPIVSMTKIQKTPLPERKALPIRWITWMTYLEDPRIQFHYDKTLPELKHIPDVYTSSQSPVKHPSQYEGVFYTDGSAIKSPDPTKSNNAGMGIVHATYKPEYQVLNQWSIPLGNHTAQMAEIAAVEFACKKALKIPGPVLVITDSFYVAESANKELPYWKSNGFVNNKKKPLKHISKWKSIAECLSMKPDITIQHEKGISLQIPVFILKGNALADKLATQGSYVVNAGKRTADGSEFEKRTADGSEFESPKKKAKVE

SEQ ID NO: 1321 - protein, 2178 aa, synthetic construct
MPAAKRVKLDGGDKKYSIGLDIGTNSVGWAVITDEYKVPSKKFKVLGNTDRHSIKKNLIGALLFDSGETAEATRLKRTARRRYTRRKNRICYLQEIFSNEMAKVDDSFFHRLEESFLVEEDKKHERHPIFGNIVDEVAYHEKYPTIYHLRKKLVDSTDKADLRLIYLALAHMIKFRGHFLIEGDLNPDNSDVDKLFIQLVQTYNQLFEENPINASGVDAKAILSARLSKSRRLENLIAQLPGEKKNGLFGNLIALSLGLTPNFKSNFDLAEDAKLQLSKDTYDDDLDNLLAQIGDQYADLFLAAKNLSDAILLSDILRVNTEITKAPLSASMIKRYDEHHQDLTLLKALVRQQLPEKYKEIFFDQSKNGYAGYIDGGASQEEFYKFIKPILEKMDGTEELLVKLNREDLLRKQRTFDNGSIPHQIHLGELHAILRRQEDFYPFLKDNREKIEKILTFRIPYYVGPLARGNSRFAWMTRKSEETITPWNFEEVVDKGASAQSFIERMTNFDKNLPNEKVLPKHSLLYEYFTVYNELTKVKYVTEGMRKPAFLSGEQKKAIVDLLFKTNRKVTVKQLKEDYFKKIECFDSVEISGVEDRFNASLGTYHDLLKIIKDKDFLDNEENEDILEDIVLTLTLFEDREMIEERLKTYAHLFDDKVMKQLKRRRYTGWGRLSRKLINGIRDKQSGKTILDFLKSDGFANRNFMQLIHDDSLTFKEDIQKAQVSGQGDSLHEHIANLAGSPAIKKGILQTVKVVDELVKVMGRHKPENIVIEMARENQTTQKGQKNSRERMKRIEEGIKELGSQILKEHPVENTQLQNEKLYLYYLQNGRDMYVDQELDINRLSDYDVDHIVPQSFLKDDSIDNKVLTRSDKARGKSDNVPSEEVVKKMKNYWRQLLNAKLITQRKFDNLTKAERGGLSELDKAGFIKRQLVETRQITKHVAQILDSRMNTKYDENDKLIREVKVITLKSKLVSDFRKDFQFYKVREINNYHHAHDAYLNAVVGTALIKKYPKLESEFVYGDYKVYDVRKMIAKSEQEIGKATAKYFFYSNIMNFFKTEITLANGEIRKRPLIETNGETGEIVWDKGRDFATVRKVLSMPQVNIVKKTEVQTGGFSKESILPKRNSDKLIARKKDWDPKKYGGFDSPTVAYSVLVVAKVEKGKSKKLKSVKELLGITIMERSSFEKNPIDFLEAKGYKEVKKDLIIKLPKYSLFELENGRKRMLASAGELQKGNELALPSKYVNFLYLASHYEKLKGSPEDNEQKQLFVEQHKHYLDEIIEQISEFSKRVILADANLDKVLSAYNKHRDKPIREQAENIIHLFTLTNLGAPAAFKYFDTTIDRKRYTSTKEVLDATLIHQSITGLYETRIDLSQLGGDGGPAPAPAPAPAPAPGGMNPLQLLQPLPAEIKGTKLLAHWNSGATITCIPESFLEDEQPIKKTLIKTIHGEKQQNVYYVTFKVKGRKVEAEVIASPYEYILLSPTDVPWLTQQPLQLTILVPLQEYQEKILSKTALPEDQKQQLKTLFVKYDNLWQHWENQVGHRKIRPHNIATGDYPPRPQKQYPINPKAKPSIQIVIDDLLKQGVLTPQNSTMNTPVYPVPKPDGRWRMVLDYREVNKTIPLTAAQNQHSAGILATIVRQKYKTTLDLANGFWAHPITPESYWLTAFTWQGKQYCWTRLPQGFLNSPALFNADVVDLLKEIPNVQVYVDDIYLSHDDPKEHVQQLEKVFQILLQAGYVVSLKKSEIGQKTVEFLGFNITKEGRGLTDTFKTKLLNITPPKDLKQLQSILGLLNFARNFIPNFAELVQPLYNLIAPAKGKYIEWSEENTKQLNMVIEALNTASNLEERLPEQRLVIKVNTSPSAGYVRYYNETGKKPIMYLNYVFSKAELKFSMLEKLLTTMHKALIKAMDLAMGQEILVYSPIVSMTKIQKTPLPERKALPIRWITWMTYLEDPRIQFHYDKTLPELKHIPDVYTSSQSPVKHPSQYEGVFYTDGSAIKSPDPTKSNNAGMGIVHATYKPEYQVLNQWSIPLGNHTAQMAEIAAVEFACKKALKIPGPVLVITDSFYVAESANKELPYWKSNGFVNNKKKPLKHISKWKSIAECLSMKPDITIQHEKGISLQIPVFILKGNALADKLATQGSYVVNAGKRTADGSEFEKRTADGSEFESPKKKAKVE

SEQ ID NO: 1322 - protein, 2174 aa, synthetic construct
MPAAKRVKLDGGDKKYSIGLDIGTNSVGWAVITDEYKVPSKKFKVLGNTDRHSIKKNLIGALLFDSGETAEATRLKRTARRRYTRRKNRICYLQEIFSNEMAKVDDSFFHRLEESFLVEEDKKHERHPIFGNIVDEVAYHEKYPTIYHLRKKLVDSTDKADLRLIYLALAHMIKFRGHFLIEGDLNPDNSDVDKLFIQLVQTYNQLFEENPINASGVDAKAILSARLSKSRRLENLIAQLPGEKKNGLFGNLIALSLGLTPNFKSNFDLAEDAKLQLSKDTYDDDLDNLLAQIGDQYADLFLAAKNLSDAILLSDILRVNTEITKAPLSASMIKRYDEHHQDLTLLKALVRQQLPEKYKEIFFDQSKNGYAGYIDGGASQEEFYKFIKPILEKMDGTEELLVKLNREDLLRKQRTFDNGSIPHQIHLGELHAILRRQEDFYPFLKDNREKIEKILTFRIPYYVGPLARGNSRFAWMTRKSEETITPWNFEEVVDKGASAQSFIERMTNFDKNLPNEKVLPKHSLLYEYFTVYNELTKVKYVTEGMRKPAFLSGEQKKAIVDLLFKTNRKVTVKQLKEDYFKKIECFDSVEISGVEDRFNASLGTYHDLLKIIKDKDFLDNEENEDILEDIVLTLTLFEDREMIEERLKTYAHLFDDKVMKQLKRRRYTGWGRLSRKLINGIRDKQSGKTILDFLKSDGFANRNFMQLIHDDSLTFKEDIQKAQVSGQGDSLHEHIANLAGSPAIKKGILQTVKVVDELVKVMGRHKPENIVIEMARENQTTQKGQKNSRERMKRIEEGIKELGSQILKEHPVENTQLQNEKLYLYYLQNGRDMYVDQELDINRLSDYDVDHIVPQSFLKDDSIDNKVLTRSDKARGKSDNVPSEEVVKKMKNYWRQLLNAKLITQRKFDNLTKAERGGLSELDKAGFIKRQLVETRQITKHVAQILDSRMNTKYDENDKLIREVKVITLKSKLVSDFRKDFQFYKVREINNYHHAHDAYLNAVVGTALIKKYPKLESEFVYGDYKVYDVRKMIAKSEQEIGKATAKYFFYSNIMNFFKTEITLANGEIRKRPLIETNGETGEIVWDKGRDFATVRKVLSMPQVNIVKKTEVQTGGFSKESILPKRNSDKLIARKKDWDPKKYGGFDSPTVAYSVLVVAKVEKGKSKKLKSVKELLGITIMERSSFEKNPIDFLEAKGYKEVKKDLIIKLPKYSLFELENGRKRMLASAGELQKGNELALPSKYVNFLYLASHYEKLKGSPEDNEQKQLFVEQHKHYLDEIIEQISEFSKRVILADANLDKVLSAYNKHRDKPIREQAENIIHLFTLTNLGAPAAFKYFDTTIDRKRYTSTKEVLDATLIHQSITGLYETRIDLSQLGGDGGGGSGGGPAPGGMNPLQLLQPLPAEIKGTKLLAHWNSGATITCIPESFLEDEQPIKKTLIKTIHGEKQQNVYYVTFKVKGRKVEAEVIASPYEYILLSPTDVPWLTQQPLQLTILVPLQEYQEKILSKTALPEDQKQQLKTLFVKYDNLWQHWENQVGHRKIRPHNIATGDYPPRPQKQYPINPKAKPSIQIVIDDLLKQGVLTPQNSTMNTPVYPVPKPDGRWRMVLDYREVNKTIPLTAAQNQHSAGILATIVRQKYKTTLDLANGFWAHPITPESYWLTAFTWQGKQYCWTRLPQGFLNSPALFNADVVDLLKEIPNVQVYVDDIYLSHDDPKEHVQQLEKVFQILLQAGYVVSLKKSEIGQKTVEFLGFNITKEGRGLTDTFKTKLLNITPPKDLKQLQSILGLLNFARNFIPNFAELVQPLYNLIAPAKGKYIEWSEENTKQLNMVIEALNTASNLEERLPEQRLVIKVNTSPSAGYVRYYNETGKKPIMYLNYVFSKAELKFSMLEKLLTTMHKALIKAMDLAMGQEILVYSPIVSMTKIQKTPLPERKALPIRWITWMTYLEDPRIQFHYDKTLPELKHIPDVYTSSQSPVKHPSQYEGVFYTDGSAIKSPDPTKSNNAGMGIVHATYKPEYQVLNQWSIPLGNHTAQMAEIAAVEFACKKALKIPGPVLVITDSFYVAESANKELPYWKSNGFVNNKKKPLKHISKWKSIAECLSMKPDITIQHEKGISLQIPVFILKGNALADKLATQGSYVVNAGKRTADGSEFEKRTADGSEFESPKKKAKVE

SEQ ID NO: 1323 - protein, 2176 aa, synthetic construct
MPAAKRVKLDGGDKKYSIGLDIGTNSVGWAVITDEYKVPSKKFKVLGNTDRHSIKKNLIGALLFDSGETAEATRLKRTARRRYTRRKNRICYLQEIFSNEMAKVDDSFFHRLEESFLVEEDKKHERHPIFGNIVDEVAYHEKYPTIYHLRKKLVDSTDKADLRLIYLALAHMIKFRGHFLIEGDLNPDNSDVDKLFIQLVQTYNQLFEENPINASGVDAKAILSARLSKSRRLENLIAQLPGEKKNGLFGNLIALSLGLTPNFKSNFDLAEDAKLQLSKDTYDDDLDNLLAQIGDQYADLFLAAKNLSDAILLSDILRVNTEITKAPLSASMIKRYDEHHQDLTLLKALVRQQLPEKYKEIFFDQSKNGYAGYIDGGASQEEFYKFIKPILEKMDGTEELLVKLNREDLLRKQRTFDNGSIPHQIHLGELHAILRRQEDFYPFLKDNREKIEKILTFRIPYYVGPLARGNSRFAWMTRKSEETITPWNFEEVVDKGASAQSFIERMTNFDKNLPNEKVLPKHSLLYEYFTVYNELTKVKYVTEGMRKPAFLSGEQKKAIVDLLFKTNRKVTVKQLKEDYFKKIECFDSVEISGVEDRFNASLGTYHDLLKIIKDKDFLDNEENEDILEDIVLTLTLFEDREMIEERLKTYAHLFDDKVMKQLKRRRYTGWGRLSRKLINGIRDKQSGKTILDFLKSDGFANRNFMQLIHDDSLTFKEDIQKAQVSGQGDSLHEHIANLAGSPAIKKGILQTVKVVDELVKVMGRHKPENIVIEMARENQTTQKGQKNSRERMKRIEEGIKELGSQILKEHPVENTQLQNEKLYLYYLQNGRDMYVDQELDINRLSDYDVDHIVPQSFLKDDSIDNKVLTRSDKARGKSDNVPSEEVVKKMKNYWRQLLNAKLITQRKFDNLTKAERGGLSELDKAGFIKRQLVETRQITKHVAQILDSRMNTKYDENDKLIREVKVITLKSKLVSDFRKDFQFYKVREINNYHHAHDAYLNAVVGTALIKKYPKLESEFVYGDYKVYDVRKMIAKSEQEIGKATAKYFFYSNIMNFFKTEITLANGEIRKRPLIETNGETGEIVWDKGRDFATVRKVLSMPQVNIVKKTEVQTGGFSKESILPKRNSDKLIARKKDWDPKKYGGFDSPTVAYSVLVVAKVEKGKSKKLKSVKELLGITIMERSSFEKNPIDFLEAKGYKEVKKDLIIKLPKYSLFELENGRKRMLASAGELQKGNELALPSKYVNFLYLASHYEKLKGSPEDNEQKQLFVEQHKHYLDEIIEQISEFSKRVILADANLDKVLSAYNKHRDKPIREQAENIIHLFTLTNLGAPAAFKYFDTTIDRKRYTSTKEVLDATLIHQSITGLYETRIDLSQLGGDGGGGSEAAAKGGGGGMNPLQLLQPLPAEIKGTKLLAHWNSGATITCIPESFLEDEQPIKKTLIKTIHGEKQQNVYYVTFKVKGRKVEAEVIASPYEYILLSPTDVPWLTQQPLQLTILVPLQEYQEKILSKTALPEDQKQQLKTLFVKYDNLWQHWENQVGHRKIRPHNIATGDYPPRPQKQYPINPKAKPSIQIVIDDLLKQGVLTPQNSTMNTPVYPVPKPDGRWRMVLDYREVNKTIPLTAAQNQHSAGILATIVRQKYKTTLDLANGFWAHPITPESYWLTAFTWQGKQYCWTRLPQGFLNSPALFNADVVDLLKEIPNVQVYVDDIYLSHDDPKEHVQQLEKVFQILLQAGYVVSLKKSEIGQKTVEFLGFNITKEGRGLTDTFKTKLLNITPPKDLKQLQSILGLLNFARNFIPNFAELVQPLYNLIAPAKGKYIEWSEENTKQLNMVIEALNTASNLEERLPEQRLVIKVNTSPSAGYVRYYNETGKKPIMYLNYVFSKAELKFSMLEKLLTTMHKALIKAMDLAMGQEILVYSPIVSMTKIQKTPLPERKALPIRWITWMTYLEDPRIQFHYDKTLPELKHIPDVYTSSQSPVKHPSQYEGVFYTDGSAIKSPDPTKSNNAGMGIVHATYKPEYQVLNQWSIPLGNHTAQMAEIAAVEFACKKALKIPGPVLVITDSFYVAESANKELPYWKSNGFVNNKKKPLKHISKWKSIAECLSMKPDITIQHEKGISLQIPVFILKGNALADKLATQGSYVVNAGKRTADGSEFEKRTADGSEFESPKKKAKVE

SEQ ID NO: 1324 - protein, 2176 aa, synthetic construct
MPAAKRVKLDGGDKKYSIGLDIGTNSVGWAVITDEYKVPSKKFKVLGNTDRHSIKKNLIGALLFDSGETAEATRLKRTARRRYTRRKNRICYLQEIFSNEMAKVDDSFFHRLEESFLVEEDKKHERHPIFGNIVDEVAYHEKYPTIYHLRKKLVDSTDKADLRLIYLALAHMIKFRGHFLIEGDLNPDNSDVDKLFIQLVQTYNQLFEENPINASGVDAKAILSARLSKSRRLENLIAQLPGEKKNGLFGNLIALSLGLTPNFKSNFDLAEDAKLQLSKDTYDDDLDNLLAQIGDQYADLFLAAKNLSDAILLSDILRVNTEITKAPLSASMIKRYDEHHQDLTLLKALVRQQLPEKYKEIFFDQSKNGYAGYIDGGASQEEFYKFIKPILEKMDGTEELLVKLNREDLLRKQRTFDNGSIPHQIHLGELHAILRRQEDFYPFLKDNREKIEKILTFRIPYYVGPLARGNSRFAWMTRKSEETITPWNFEEVVDKGASAQSFIERMTNFDKNLPNEKVLPKHSLLYEYFTVYNELTKVKYVTEGMRKPAFLSGEQKKAIVDLLFKTNRKVTVKQLKEDYFKKIECFDSVEISGVEDRFNASLGTYHDLLKIIKDKDFLDNEENEDILEDIVLTLTLFEDREMIEERLKTYAHLFDDKVMKQLKRRRYTGWGRLSRKLINGIRDKQSGKTILDFLKSDGFANRNFMQLIHDDSLTFKEDIQKAQVSGQGDSLHEHIANLAGSPAIKKGILQTVKVVDELVKVMGRHKPENIVIEMARENQTTQKGQKNSRERMKRIEEGIKELGSQILKEHPVENTQLQNEKLYLYYLQNGRDMYVDQELDINRLSDYDVDHIVPQSFLKDDSIDNKVLTRSDKARGKSDNVPSEEVVKKMKNYWRQLLNAKLITQRKFDNLTKAERGGLSELDKAGFIKRQLVETRQITKHVAQILDSRMNTKYDENDKLIREVKVITLKSKLVSDFRKDFQFYKVREINNYHHAHDAYLNAVVGTALIKKYPKLESEFVYGDYKVYDVRKMIAKSEQEIGKATAKYFFYSNIMNFFKTEITLANGEIRKRPLIETNGETGEIVWDKGRDFATVRKVLSMPQVNIVKKTEVQTGGFSKESILPKRNSDKLIARKKDWDPKKYGGFDSPTVAYSVLVVAKVEKGKSKKLKSVKELLGITIMERSSFEKNPIDFLEAKGYKEVKKDLIIKLPKYSLFELENGRKRMLASAGELQKGNELALPSKYVNFLYLASHYEKLKGSPEDNEQKQLFVEQHKHYLDEIIEQISEFSKRVILADANLDKVLSAYNKHRDKPIREQAENIIHLFTLTNLGAPAAFKYFDTTIDRKRYTSTKEVLDATLIHQSITGLYETRIDLSQLGGDGGPAPEAAAKGGSGGMNPLQLLQPLPAEIKGTKLLAHWNSGATITCIPESFLEDEQPIKKTLIKTIHGEKQQNVYYVTFKVKGRKVEAEVIASPYEYILLSPTDVPWLTQQPLQLTILVPLQEYQEKILSKTALPEDQKQQLKTLFVKYDNLWQHWENQVGHRKIRPHNIATGDYPPRPQKQYPINPKAKPSIQIVIDDLLKQGVLTPQNSTMNTPVYPVPKPDGRWRMVLDYREVNKTIPLTAAQNQHSAGILATIVRQKYKTTLDLANGFWAHPITPESYWLTAFTWQGKQYCWTRLPQGFLNSPALFNADVVDLLKEIPNVQVYVDDIYLSHDDPKEHVQQLEKVFQILLQAGYVVSLKKSEIGQKTVEFLGFNITKEGRGLTDTFKTKLLNITPPKDLKQLQSILGLLNFARNFIPNFAELVQPLYNLIAPAKGKYIEWSEENTKQLNMVIEALNTASNLEERLPEQRLVIKVNTSPSAGYVRYYNETGKKPIMYLNYVFSKAELKFSMLEKLLTTMHKALIKAMDLAMGQEILVYSPIVSMTKIQKTPLPERKALPIRWITWMTYLEDPRIQFHYDKTLPELKHIPDVYTSSQSPVKHPSQYEGVFYTDGSAIKSPDPTKSNNAGMGIVHATYKPEYQVLNQWSIPLGNHTAQMAEIAAVEFACKKALKIPGPVLVITDSFYVAESANKELPYWKSNGFVNNKKKPLKHISKWKSIAECLSMKPDITIQHEKGISLQIPVFILKGNALADKLATQGSYVVNAGKRTADGSEFEKRTADGSEFESPKKKAKVE

SEQ ID NO: 1325 - protein, 2176 aa, synthetic construct
MPAAKRVKLDGGDKKYSIGLDIGTNSVGWAVITDEYKVPSKKFKVLGNTDRHSIKKNLIGALLFDSGETAEATRLKRTARRRYTRRKNRICYLQEIFSNEMAKVDDSFFHRLEESFLVEEDKKHERHPIFGNIVDEVAYHEKYPTIYHLRKKLVDSTDKADLRLIYLALAHMIKFRGHFLIEGDLNPDNSDVDKLFIQLVQTYNQLFEENPINASGVDAKAILSARLSKSRRLENLIAQLPGEKKNGLFGNLIALSLGLTPNFKSNFDLAEDAKLQLSKDTYDDDLDNLLAQIGDQYADLFLAAKNLSDAILLSDILRVNTEITKAPLSASMIKRYDEHHQDLTLLKALVRQQLPEKYKEIFFDQSKNGYAGYIDGGASQEEFYKFIKPILEKMDGTEELLVKLNREDLLRKQRTFDNGSIPHQIHLGELHAILRRQEDFYPFLKDNREKIEKILTFRIPYYVGPLARGNSRFAWMTRKSEETITPWNFEEVVDKGASAQSFIERMTNFDKNLPNEKVLPKHSLLYEYFTVYNELTKVKYVTEGMRKPAFLSGEQKKAIVDLLFKTNRKVTVKQLKEDYFKKIECFDSVEISGVEDRFNASLGTYHDLLKIIKDKDFLDNEENEDILEDIVLTLTLFEDREMIEERLKTYAHLFDDKVMKQLKRRRYTGWGRLSRKLINGIRDKQSGKTILDFLKSDGFANRNFMQLIHDDSLTFKEDIQKAQVSGQGDSLHEHIANLAGSPAIKKGILQTVKVVDELVKVMGRHKPENIVIEMARENQTTQKGQKNSRERMKRIEEGIKELGSQILKEHPVENTQLQNEKLYLYYLQNGRDMYVDQELDINRLSDYDVDHIVPQSFLKDDSIDNKVLTRSDKARGKSDNVPSEEVVKKMKNYWRQLLNAKLITQRKFDNLTKAERGGLSELDKAGFIKRQLVETRQITKHVAQILDSRMNTKYDENDKLIREVKVITLKSKLVSDFRKDFQFYKVREINNYHHAHDAYLNAVVGTALIKKYPKLESEFVYGDYKVYDVRKMIAKSEQEIGKATAKYFFYSNIMNFFKTEITLANGEIRKRPLIETNGETGEIVWDKGRDFATVRKVLSMPQVNIVKKTEVQTGGFSKESILPKRNSDKLIARKKDWDPKKYGGFDSPTVAYSVLVVAKVEKGKSKKLKSVKELLGITIMERSSFEKNPIDFLEAKGYKEVKKDLIIKLPKYSLFELENGRKRMLASAGELQKGNELALPSKYVNFLYLASHYEKLKGSPEDNEQKQLFVEQHKHYLDEIIEQISEFSKRVILADANLDKVLSAYNKHRDKPIREQAENIIHLFTLTNLGAPAAFKYFDTTIDRKRYTSTKEVLDATLIHQSITGLYETRIDLSQLGGDGGEAAAKGGSPAPGGMNPLQLLQPLPAEIKGTKLLAHWNSGATITCIPESFLEDEQPIKKTLIKTIHGEKQQNVYYVTFKVKGRKVEAEVIASPYEYILLSPTDVPWLTQQPLQLTILVPLQEYQEKILSKTALPEDQKQQLKTLFVKYDNLWQHWENQVGHRKIRPHNIATGDYPPRPQKQYPINPKAKPSIQIVIDDLLKQGVLTPQNSTMNTPVYPVPKPDGRWRMVLDYREVNKTIPLTAAQNQHSAGILATIVRQKYKTTLDLANGFWAHPITPESYWLTAFTWQGKQYCWTRLPQGFLNSPALFNADVVDLLKEIPNVQVYVDDIYLSHDDPKEHVQQLEKVFQILLQAGYVVSLKKSEIGQKTVEFLGFNITKEGRGLTDTFKTKLLNITPPKDLKQLQSILGLLNFARNFIPNFAELVQPLYNLIAPAKGKYIEWSEENTKQLNMVIEALNTASNLEERLPEQRLVIKVNTSPSAGYVRYYNETGKKPIMYLNYVFSKAELKFSMLEKLLTTMHKALIKAMDLAMGQEILVYSPIVSMTKIQKTPLPERKALPIRWITWMTYLEDPRIQFHYDKTLPELKHIPDVYTSSQSPVKHPSQYEGVFYTDGSAIKSPDPTKSNNAGMGIVHATYKPEYQVLNQWSIPLGNHTAQMAEIAAVEFACKKALKIPGPVLVITDSFYVAESANKELPYWKSNGFVNNKKKPLKHISKWKSIAECLSMKPDITIQHEKGISLQIPVFILKGNALADKLATQGSYVVNAGKRTADGSEFEKRTADGSEFESPKKKAKVE

SEQ ID NO: 1326 - protein, 2176 aa, synthetic construct
MPAAKRVKLDGGDKKYSIGLDIGTNSVGWAVITDEYKVPSKKFKVLGNTDRHSIKKNLIGALLFDSGETAEATRLKRTARRRYTRRKNRICYLQEIFSNEMAKVDDSFFHRLEESFLVEEDKKHERHPIFGNIVDEVAYHEKYPTIYHLRKKLVDSTDKADLRLIYLALAHMIKFRGHFLIEGDLNPDNSDVDKLFIQLVQTYNQLFEENPINASGVDAKAILSARLSKSRRLENLIAQLPGEKKNGLFGNLIALSLGLTPNFKSNFDLAEDAKLQLSKDTYDDDLDNLLAQIGDQYADLFLAAKNLSDAILLSDILRVNTEITKAPLSASMIKRYDEHHQDLTLLKALVRQQLPEKYKEIFFDQSKNGYAGYIDGGASQEEFYKFIKPILEKMDGTEELLVKLNREDLLRKQRTFDNGSIPHQIHLGELHAILRRQEDFYPFLKDNREKIEKILTFRIPYYVGPLARGNSRFAWMTRKSEETITPWNFEEVVDKGASAQSFIERMTNFDKNLPNEKVLPKHSLLYEYFTVYNELTKVKYVTEGMRKPAFLSGEQKKAIVDLLFKTNRKVTVKQLKEDYFKKIECFDSVEISGVEDRFNASLGTYHDLLKIIKDKDFLDNEENEDILEDIVLTLTLFEDREMIEERLKTYAHLFDDKVMKQLKRRRYTGWGRLSRKLINGIRDKQSGKTILDFLKSDGFANRNFMQLIHDDSLTFKEDIQKAQVSGQGDSLHEHIANLAGSPAIKKGILQTVKVVDELVKVMGRHKPENIVIEMARENQTTQKGQKNSRERMKRIEEGIKELGSQILKEHPVENTQLQNEKLYLYYLQNGRDMYVDQELDINRLSDYDVDHIVPQSFLKDDSIDNKVLTRSDKARGKSDNVPSEEVVKKMKNYWRQLLNAKLITQRKFDNLTKAERGGLSELDKAGFIKRQLVETRQITKHVAQILDSRMNTKYDENDKLIREVKVITLKSKLVSDFRKDFQFYKVREINNYHHAHDAYLNAVVGTALIKKYPKLESEFVYGDYKVYDVRKMIAKSEQEIGKATAKYFFYSNIMNFFKTEITLANGEIRKRPLIETNGETGEIVWDKGRDFATVRKVLSMPQVNIVKKTEVQTGGFSKESILPKRNSDKLIARKKDWDPKKYGGFDSPTVAYSVLVVAKVEKGKSKKLKSVKELLGITIMERSSFEKNPIDFLEAKGYKEVKKDLIIKLPKYSLFELENGRKRMLASAGELQKGNELALPSKYVNFLYLASHYEKLKGSPEDNEQKQLFVEQHKHYLDEIIEQISEFSKRVILADANLDKVLSAYNKHRDKPIREQAENIIHLFTLTNLGAPAAFKYFDTTIDRKRYTSTKEVLDATLIHQSITGLYETRIDLSQLGGDGGGGGGGSEAAAKGGMNPLQLLQPLPAEIKGTKLLAHWNSGATITCIPESFLEDEQPIKKTLIKTIHGEKQQNVYYVTFKVKGRKVEAEVIASPYEYILLSPTDVPWLTQQPLQLTILVPLQEYQEKILSKTALPEDQKQQLKTLFVKYDNLWQHWENQVGHRKIRPHNIATGDYPPRPQKQYPINPKAKPSIQIVIDDLLKQGVLTPQNSTMNTPVYPVPKPDGRWRMVLDYREVNKTIPLTAAQNQHSAGILATIVRQKYKTTLDLANGFWAHPITPESYWLTAFTWQGKQYCWTRLPQGFLNSPALFNADVVDLLKEIPNVQVYVDDIYLSHDDPKEHVQQLEKVFQILLQAGYVVSLKKSEIGQKTVEFLGFNITKEGRGLTDTFKTKLLNITPPKDLKQLQSILGLLNFARNFIPNFAELVQPLYNLIAPAKGKYIEWSEENTKQLNMVIEALNTASNLEERLPEQRLVIKVNTSPSAGYVRYYNETGKKPIMYLNYVFSKAELKFSMLEKLLTTMHKALIKAMDLAMGQEILVYSPIVSMTKIQKTPLPERKALPIRWITWMTYLEDPRIQFHYDKTLPELKHIPDVYTSSQSPVKHPSQYEGVFYTDGSAIKSPDPTKSNNAGMGIVHATYKPEYQVLNQWSIPLGNHTAQMAEIAAVEFACKKALKIPGPVLVITDSFYVAESANKELPYWKSNGFVNNKKKPLKHISKWKSIAECLSMKPDITIQHEKGISLQIPVFILKGNALADKLATQGSYVVNAGKRTADGSEFEKRTADGSEFESPKKKAKVE

SEQ ID NO: 1327 - protein, 2176 aa, synthetic construct
MPAAKRVKLDGGDKKYSIGLDIGTNSVGWAVITDEYKVPSKKFKVLGNTDRHSIKKNLIGALLFDSGETAEATRLKRTARRRYTRRKNRICYLQEIFSNEMAKVDDSFFHRLEESFLVEEDKKHERHPIFGNIVDEVAYHEKYPTIYHLRKKLVDSTDKADLRLIYLALAHMIKFRGHFLIEGDLNPDNSDVDKLFIQLVQTYNQLFEENPINASGVDAKAILSARLSKSRRLENLIAQLPGEKKNGLFGNLIALSLGLTPNFKSNFDLAEDAKLQLSKDTYDDDLDNLLAQIGDQYADLFLAAKNLSDAILLSDILRVNTEITKAPLSASMIKRYDEHHQDLTLLKALVRQQLPEKYKEIFFDQSKNGYAGYIDGGASQEEFYKFIKPILEKMDGTEELLVKLNREDLLRKQRTFDNGSIPHQIHLGELHAILRRQEDFYPFLKDNREKIEKILTFRIPYYVGPLARGNSRFAWMTRKSEETITPWNFEEVVDKGASAQSFIERMTNFDKNLPNEKVLPKHSLLYEYFTVYNELTKVKYVTEGMRKPAFLSGEQKKAIVDLLFKTNRKVTVKQLKEDYFKKIECFDSVEISGVEDRFNASLGTYHDLLKIIKDKDFLDNEENEDILEDIVLTLTLFEDREMIEERLKTYAHLFDDKVMKQLKRRRYTGWGRLSRKLINGIRDKQSGKTILDFLKSDGFANRNFMQLIHDDSLTFKEDIQKAQVSGQGDSLHEHIANLAGSPAIKKGILQTVKVVDELVKVMGRHKPENIVIEMARENQTTQKGQKNSRERMKRIEEGIKELGSQILKEHPVENTQLQNEKLYLYYLQNGRDMYVDQELDINRLSDYDVDHIVPQSFLKDDSIDNKVLTRSDKARGKSDNVPSEEVVKKMKNYWRQLLNAKLITQRKFDNLTKAERGGLSELDKAGFIKRQLVETRQITKHVAQILDSRMNTKYDENDKLIREVKVITLKSKLVSDFRKDFQFYKVREINNYHHAHDAYLNAVVGTALIKKYPKLESEFVYGDYKVYDVRKMIAKSEQEIGKATAKYFFYSNIMNFFKTEITLANGEIRKRPLIETNGETGEIVWDKGRDFATVRKVLSMPQVNIVKKTEVQTGGFSKESILPKRNSDKLIARKKDWDPKKYGGFDSPTVAYSVLVVAKVEKGKSKKLKSVKELLGITIMERSSFEKNPIDFLEAKGYKEVKKDLIIKLPKYSLFELENGRKRMLASAGELQKGNELALPSKYVNFLYLASHYEKLKGSPEDNEQKQLFVEQHKHYLDEIIEQISEFSKRVILADANLDKVLSAYNKHRDKPIREQAENIIHLFTLTNLGAPAAFKYFDTTIDRKRYTSTKEVLDATLIHQSITGLYETRIDLSQLGGDGGEAAAKGSSPAPGGMNPLQLLQPLPAEIKGTKLLAHWNSGATITCIPESFLEDEQPIKKTLIKTIHGEKQQNVYYVTFKVKGRKVEAEVIASPYEYILLSPTDVPWLTQQPLQLTILVPLQEYQEKILSKTALPEDQKQQLKTLFVKYDNLWQHWENQVGHRKIRPHNIATGDYPPRPQKQYPINPKAKPSIQIVIDDLLKQGVLTPQNSTMNTPVYPVPKPDGRWRMVLDYREVNKTIPLTAAQNQHSAGILATIVRQKYKTTLDLANGFWAHPITPESYWLTAFTWQGKQYCWTRLPQGFLNSPALFNADVVDLLKEIPNVQVYVDDIYLSHDDPKEHVQQLEKVFQILLQAGYVVSLKKSEIGQKTVEFLGFNITKEGRGLTDTFKTKLLNITPPKDLKQLQSILGLLNFARNFIPNFAELVQPLYNLIAPAKGKYIEWSEENTKQLNMVIEALNTASNLEERLPEQRLVIKVNTSPSAGYVRYYNETGKKPIMYLNYVFSKAELKFSMLEKLLTTMHKALIKAMDLAMGQEILVYSPIVSMTKIQKTPLPERKALPIRWITWMTYLEDPRIQFHYDKTLPELKHIPDVYTSSQSPVKHPSQYEGVFYTDGSAIKSPDPTKSNNAGMGIVHATYKPEYQVLNQWSIPLGNHTAQMAEIAAVEFACKKALKIPGPVLVITDSFYVAESANKELPYWKSNGFVNNKKKPLKHISKWKSIAECLSMKPDITIQHEKGISLQIPVFILKGNALADKLATQGSYVVNAGKRTADGSEFEKRTADGSEFESPKKKAKVE

SEQ ID NO: 1328 - protein, 2176 aa, synthetic construct
MPAAKRVKLDGGDKKYSIGLDIGTNSVGWAVITDEYKVPSKKFKVLGNTDRHSIKKNLIGALLFDSGETAEATRLKRTARRRYTRRKNRICYLQEIFSNEMAKVDDSFFHRLEESFLVEEDKKHERHPIFGNIVDEVAYHEKYPTIYHLRKKLVDSTDKADLRLIYLALAHMIKFRGHFLIEGDLNPDNSDVDKLFIQLVQTYNQLFEENPINASGVDAKAILSARLSKSRRLENLIAQLPGEKKNGLFGNLIALSLGLTPNFKSNFDLAEDAKLQLSKDTYDDDLDNLLAQIGDQYADLFLAAKNLSDAILLSDILRVNTEITKAPLSASMIKRYDEHHQDLTLLKALVRQQLPEKYKEIFFDQSKNGYAGYIDGGASQEEFYKFIKPILEKMDGTEELLVKLNREDLLRKQRTFDNGSIPHQIHLGELHAILRRQEDFYPFLKDNREKIEKILTFRIPYYVGPLARGNSRFAWMTRKSEETITPWNFEEVVDKGASAQSFIERMTNFDKNLPNEKVLPKHSLLYEYFTVYNELTKVKYVTEGMRKPAFLSGEQKKAIVDLLFKTNRKVTVKQLKEDYFKKIECFDSVEISGVEDRFNASLGTYHDLLKIIKDKDFLDNEENEDILEDIVLTLTLFEDREMIEERLKTYAHLFDDKVMKQLKRRRYTGWGRLSRKLINGIRDKQSGKTILDFLKSDGFANRNFMQLIHDDSLTFKEDIQKAQVSGQGDSLHEHIANLAGSPAIKKGILQTVKVVDELVKVMGRHKPENIVIEMARENQTTQKGQKNSRERMKRIEEGIKELGSQILKEHPVENTQLQNEKLYLYYLQNGRDMYVDQELDINRLSDYDVDHIVPQSFLKDDSIDNKVLTRSDKARGKSDNVPSEEVVKKMKNYWRQLLNAKLITQRKFDNLTKAERGGLSELDKAGFIKRQLVETRQITKHVAQILDSRMNTKYDENDKLIREVKVITLKSKLVSDFRKDFQFYKVREINNYHHAHDAYLNAVVGTALIKKYPKLESEFVYGDYKVYDVRKMIAKSEQEIGKATAKYFFYSNIMNFFKTEITLANGEIRKRPLIETNGETGEIVWDKGRDFATVRKVLSMPQVNIVKKTEVQTGGFSKESILPKRNSDKLIARKKDWDPKKYGGFDSPTVAYSVLVVAKVEKGKSKKLKSVKELLGITIMERSSFEKNPIDFLEAKGYKEVKKDLIIKLPKYSLFELENGRKRMLASAGELQKGNELALPSKYVNFLYLASHYEKLKGSPEDNEQKQLFVEQHKHYLDEIIEQISEFSKRVILADANLDKVLSAYNKHRDKPIREQAENIIHLFTLTNLGAPAAFKYFDTTIDRKRYTSTKEVLDATLIHQSITGLYETRIDLSQLGGDGGGGSPAPEAAAKGGMNPLQLLQPLPAEIKGTKLLAHWNSGATITCIPESFLEDEQPIKKTLIKTIHGEKQQNVYYVTFKVKGRKVEAEVIASPYEYILLSPTDVPWLTQQPLQLTILVPLQEYQEKILSKTALPEDQKQQLKTLFVKYDNLWQHWENQVGHRKIRPHNIATGDYPPRPQKQYPINPKAKPSIQIVIDDLLKQGVLTPQNSTMNTPVYPVPKPDGRWRMVLDYREVNKTIPLTAAQNQHSAGILATIVRQKYKTTLDLANGFWAHPITPESYWLTAFTWQGKQYCWTRLPQGFLNSPALFNADVVDLLKEIPNVQVYVDDIYLSHDDPKEHVQQLEKVFQILLQAGYVVSLKKSEIGQKTVEFLGFNITKEGRGLTDTFKTKLLNITPPKDLKQLQSILGLLNFARNFIPNFAELVQPLYNLIAPAKGKYIEWSEENTKQLNMVIEALNTASNLEERLPEQRLVIKVNTSPSAGYVRYYNETGKKPIMYLNYVFSKAELKFSMLEKLLTTMHKALIKAMDLAMGQEILVYSPIVSMTKIQKTPLPERKALPIRWITWMTYLEDPRIQFHYDKTLPELKHIPDVYTSSQSPVKHPSQYEGVFYTDGSAIKSPDPTKSNNAGMGIVHATYKPEYQVLNQWSIPLGNHTAQMAEIAAVEFACKKALKIPGPVLVITDSFYVAESANKELPYWKSNGFVNNKKKPLKHISKWKSIAECLSMKPDITIQHEKGISLQIPVFILKGNALADKLATQGSYVVNAGKRTADGSEFEKRTADGSEFESPKKKAKVE

SEQ ID NO: 1329 - protein, 2176 aa, synthetic construct
MPAAKRVKLDGGDKKYSIGLDIGTNSVGWAVITDEYKVPSKKFKVLGNTDRHSIKKNLIGALLFDSGETAEATRLKRTARRRYTRRKNRICYLQEIFSNEMAKVDDSFFHRLEESFLVEEDKKHERHPIFGNIVDEVAYHEKYPTIYHLRKKLVDSTDKADLRLIYLALAHMIKFRGHFLIEGDLNPDNSDVDKLFIQLVQTYNQLFEENPINASGVDAKAILSARLSKSRRLENLIAQLPGEKKNGLFGNLIALSLGLTPNFKSNFDLAEDAKLQLSKDTYDDDLDNLLAQIGDQYADLFLAAKNLSDAILLSDILRVNTEITKAPLSASMIKRYDEHHQDLTLLKALVRQQLPEKYKEIFFDQSKNGYAGYIDGGASQEEFYKFIKPILEKMDGTEELLVKLNREDLLRKQRTFDNGSIPHQIHLGELHAILRRQEDFYPFLKDNREKIEKILTFRIPYYVGPLARGNSRFAWMTRKSEETITPWNFEEVVDKGASAQSFIERMTNFDKNLPNEKVLPKHSLLYEYFTVYNELTKVKYVTEGMRKPAFLSGEQKKAIVDLLFKTNRKVTVKQLKEDYFKKIECFDSVEISGVEDRFNASLGTYHDLLKIIKDKDFLDNEENEDILEDIVLTLTLFEDREMIEERLKTYAHLFDDKVMKQLKRRRYTGWGRLSRKLINGIRDKQSGKTILDFLKSDGFANRNFMQLIHDDSLTFKEDIQKAQVSGQGDSLHEHIANLAGSPAIKKGILQTVKVVDELVKVMGRHKPENIVIEMARENQTTQKGQKNSRERMKRIEEGIKELGSQILKEHPVENTQLQNEKLYLYYLQNGRDMYVDQELDINRLSDYDVDHIVPQSFLKDDSIDNKVLTRSDKARGKSDNVPSEEVVKKMKNYWRQLLNAKLITQRKFDNLTKAERGGLSELDKAGFIKRQLVETRQITKHVAQILDSRMNTKYDENDKLIREVKVITLKSKLVSDFRKDFQFYKVREINNYHHAHDAYLNAVVGTALIKKYPKLESEFVYGDYKVYDVRKMIAKSEQEIGKATAKYFFYSNIMNFFKTEITLANGEIRKRPLIETNGETGEIVWDKGRDFATVRKVLSMPQVNIVKKTEVQTGGFSKESILPKRNSDKLIARKKDWDPKKYGGFDSPTVAYSVLVVAKVEKGKSKKLKSVKELLGITIMERSSFEKNPIDFLEAKGYKEVKKDLIIKLPKYSLFELENGRKRMLASAGELQKGNELALPSKYVNFLYLASHYEKLKGSPEDNEQKQLFVEQHKHYLDEIIEQISEFSKRVILADANLDKVLSAYNKHRDKPIREQAENIIHLFTLTNLGAPAAFKYFDTTIDRKRYTSTKEVLDATLIHQSITGLYETRIDLSQLGGDGGEAAAKGGSGGGGGMNPLQLLQPLPAEIKGTKLLAHWNSGATITCIPESFLEDEQPIKKTLIKTIHGEKQQNVYYVTFKVKGRKVEAEVIASPYEYILLSPTDVPWLTQQPLQLTILVPLQEYQEKILSKTALPEDQKQQLKTLFVKYDNLWQHWENQVGHRKIRPHNIATGDYPPRPQKQYPINPKAKPSIQIVIDDLLKQGVLTPQNSTMNTPVYPVPKPDGRWRMVLDYREVNKTIPLTAAQNQHSAGILATIVRQKYKTTLDLANGFWAHPITPESYWLTAFTWQGKQYCWTRLPQGFLNSPALFNADVVDLLKEIPNVQVYVDDIYLSHDDPKEHVQQLEKVFQILLQAGYVVSLKKSEIGQKTVEFLGFNITKEGRGLTDTFKTKLLNITPPKDLKQLQSILGLLNFARNFIPNFAELVQPLYNLIAPAKGKYIEWSEENTKQLNMVIEALNTASNLEERLPEQRLVIKVNTSPSAGYVRYYNETGKKPIMYLNYVFSKAELKFSMLEKLLTTMHKALIKAMDLAMGQEILVYSPIVSMTKIQKTPLPERKALPIRWITWMTYLEDPRIQFHYDKTLPELKHIPDVYTSSQSPVKHPSQYEGVFYTDGSAIKSPDPTKSNNAGMGIVHATYKPEYQVLNQWSIPLGNHTAQMAEIAAVEFACKKALKIPGPVLVITDSFYVAESANKELPYWKSNGFVNNKKKPLKHISKWKSIAECLSMKPDITIQHEKGISLQIPVFILKGNALADKLATQGSYVVNAGKRTADGSEFEKRTADGSEFESPKKKAKVE

SEQ ID NO: 1330 - protein, 2180 aa, synthetic construct
MPAAKRVKLDGGDKKYSIGLDIGTNSVGWAVITDEYKVPSKKFKVLGNTDRHSIKKNLIGALLFDSGETAEATRLKRTARRRYTRRKNRICYLQEIFSNEMAKVDDSFFHRLEESFLVEEDKKHERHPIFGNIVDEVAYHEKYPTIYHLRKKLVDSTDKADLRLIYLALAHMIKFRGHFLIEGDLNPDNSDVDKLFIQLVQTYNQLFEENPINASGVDAKAILSARLSKSRRLENLIAQLPGEKKNGLFGNLIALSLGLTPNFKSNFDLAEDAKLQLSKDTYDDDLDNLLAQIGDQYADLFLAAKNLSDAILLSDILRVNTEITKAPLSASMIKRYDEHHQDLTLLKALVRQQLPEKYKEIFFDQSKNGYAGYIDGGASQEEFYKFIKPILEKMDGTEELLVKLNREDLLRKQRTFDNGSIPHQIHLGELHAILRRQEDFYPFLKDNREKIEKILTFRIPYYVGPLARGNSRFAWMTRKSEETITPWNFEEVVDKGASAQSFIERMTNFDKNLPNEKVLPKHSLLYEYFTVYNELTKVKYVTEGMRKPAFLSGEQKKAIVDLLFKTNRKVTVKQLKEDYFKKIECFDSVEISGVEDRFNASLGTYHDLLKIIKDKDFLDNEENEDILEDIVLTLTLFEDREMIEERLKTYAHLFDDKVMKQLKRRRYTGWGRLSRKLINGIRDKQSGKTILDFLKSDGFANRNFMQLIHDDSLTFKEDIQKAQVSGQGDSLHEHIANLAGSPAIKKGILQTVKVVDELVKVMGRHKPENIVIEMARENQTTQKGQKNSRERMKRIEEGIKELGSQILKEHPVENTQLQNEKLYLYYLQNGRDMYVDQELDINRLSDYDVDHIVPQSFLKDDSIDNKVLTRSDKARGKSDNVPSEEVVKKMKNYWRQLLNAKLITQRKFDNLTKAERGGLSELDKAGFIKRQLVETRQITKHVAQILDSRMNTKYDENDKLIREVKVITLKSKLVSDFRKDFQFYKVREINNYHHAHDAYLNAVVGTALIKKYPKLESEFVYGDYKVYDVRKMIAKSEQEIGKATAKYFFYSNIMNFFKTEITLANGEIRKRPLIETNGETGEIVWDKGRDFATVRKVLSMPQVNIVKKTEVQTGGFSKESILPKRNSDKLIARKKDWDPKKYGGFDSPTVAYSVLVVAKVEKGKSKKLKSVKELLGITIMERSSFEKNPIDFLEAKGYKEVKKDLIIKLPKYSLFELENGRKRMLASAGELQKGNELALPSKYVNFLYLASHYEKLKGSPEDNEQKQLFVEQHKHYLDEIIEQISEFSKRVILADANLDKVLSAYNKHRDKPIREQAENIIHLFTLTNLGAPAAFKYFDTTIDRKRYTSTKEVLDATLIHQSITGLYETRIDLSQLGGDGGGGGGSEAAAKGGGGSGGMNPLQLLQPLPAEIKGTKLLAHWNSGATITCIPESFLEDEQPIKKTLIKTIHGEKQQNVYYVTFKVKGRKVEAEVIASPYEYILLSPTDVPWLTQQPLQLTILVPLQEYQEKILSKTALPEDQKQQLKTLFVKYDNLWQHWENQVGHRKIRPHNIATGDYPPRPQKQYPINPKAKPSIQIVIDDLLKQGVLTPQNSTMNTPVYPVPKPDGRWRMVLDYREVNKTIPLTAAQNQHSAGILATIVRQKYKTTLDLANGFWAHPITPESYWLTAFTWQGKQYCWTRLPQGFLNSPALFNADVVDLLKEIPNVQVYVDDIYLSHDDPKEHVQQLEKVFQILLQAGYVVSLKKSEIGQKTVEFLGFNITKEGRGLTDTFKTKLLNITPPKDLKQLQSILGLLNFARNFIPNFAELVQPLYNLIAPAKGKYIEWSEENTKQLNMVIEALNTASNLEERLPEQRLVIKVNTSPSAGYVRYYNETGKKPIMYLNYVFSKAELKFSMLEKLLTTMHKALIKAMDLAMGQEILVYSPIVSMTKIQKTPLPERKALPIRWITWMTYLEDPRIQFHYDKTLPELKHIPDVYTSSQSPVKHPSQYEGVFYTDGSAIKSPDPTKSNNAGMGIVHATYKPEYQVLNQWSIPLGNHTAQMAEIAAVEFACKKALKIPGPVLVITDSFYVAESANKELPYWKSNGFVNNKKKPLKHISKWKSIAECLSMKPDITIQHEKGISLQIPVFILKGNALADKLATQGSYVVNAGKRTADGSEFEKRTADGSEFESPKKKAKVE

SEQ ID NO: 1331 - protein, 2174 aa, synthetic construct
MPAAKRVKLDGGDKKYSIGLDIGTNSVGWAVITDEYKVPSKKFKVLGNTDRHSIKKNLIGALLFDSGETAEATRLKRTARRRYTRRKNRICYLQEIFSNEMAKVDDSFFHRLEESFLVEEDKKHERHPIFGNIVDEVAYHEKYPTIYHLRKKLVDSTDKADLRLIYLALAHMIKFRGHFLIEGDLNPDNSDVDKLFIQLVQTYNQLFEENPINASGVDAKAILSARLSKSRRLENLIAQLPGEKKNGLFGNLIALSLGLTPNFKSNFDLAEDAKLQLSKDTYDDDLDNLLAQIGDQYADLFLAAKNLSDAILLSDILRVNTEITKAPLSASMIKRYDEHHQDLTLLKALVRQQLPEKYKEIFFDQSKNGYAGYIDGGASQEEFYKFIKPILEKMDGTEELLVKLNREDLLRKQRTFDNGSIPHQIHLGELHAILRRQEDFYPFLKDNREKIEKILTFRIPYYVGPLARGNSRFAWMTRKSEETITPWNFEEVVDKGASAQSFIERMTNFDKNLPNEKVLPKHSLLYEYFTVYNELTKVKYVTEGMRKPAFLSGEQKKAIVDLLFKTNRKVTVKQLKEDYFKKIECFDSVEISGVEDRFNASLGTYHDLLKIIKDKDFLDNEENEDILEDIVLTLTLFEDREMIEERLKTYAHLFDDKVMKQLKRRRYTGWGRLSRKLINGIRDKQSGKTILDFLKSDGFANRNFMQLIHDDSLTFKEDIQKAQVSGQGDSLHEHIANLAGSPAIKKGILQTVKVVDELVKVMGRHKPENIVIEMARENQTTQKGQKNSRERMKRIEEGIKELGSQILKEHPVENTQLQNEKLYLYYLQNGRDMYVDQELDINRLSDYDVDHIVPQSFLKDDSIDNKVLTRSDKARGKSDNVPSEEVVKKMKNYWRQLLNAKLITQRKFDNLTKAERGGLSELDKAGFIKRQLVETRQITKHVAQILDSRMNTKYDENDKLIREVKVITLKSKLVSDFRKDFQFYKVREINNYHHAHDAYLNAVVGTALIKKYPKLESEFVYGDYKVYDVRKMIAKSEQEIGKATAKYFFYSNIMNFFKTEITLANGEIRKRPLIETNGETGEIVWDKGRDFATVRKVLSMPQVNIVKKTEVQTGGFSKESILPKRNSDKLIARKKDWDPKKYGGFDSPTVAYSVLVVAKVEKGKSKKLKSVKELLGITIMERSSFEKNPIDFLEAKGYKEVKKDLIIKLPKYSLFELENGRKRMLASAGELQKGNELALPSKYVNFLYLASHYEKLKGSPEDNEQKQLFVEQHKHYLDEIIEQISEFSKRVILADANLDKVLSAYNKHRDKPIREQAENIIHLFTLTNLGAPAAFKYFDTTIDRKRYTSTKEVLDATLIHQSITGLYETRIDLSQLGGDGGGGSPAPGSSGGMNPLQLLQPLPAEIKGTKLLAHWNSGATITCIPESFLEDEQPIKKTLIKTIHGEKQQNVYYVTFKVKGRKVEAEVIASPYEYILLSPTDVPWLTQQPLQLTILVPLQEYQEKILSKTALPEDQKQQLKTLFVKYDNLWQHWENQVGHRKIRPHNIATGDYPPRPQKQYPINPKAKPSIQIVIDDLLKQGVLTPQNSTMNTPVYPVPKPDGRWRMVLDYREVNKTIPLTAAQNQHSAGILATIVRQKYKTTLDLANGFWAHPITPESYWLTAFTWQGKQYCWTRLPQGFLNSPALFNADVVDLLKEIPNVQVYVDDIYLSHDDPKEHVQQLEKVFQILLQAGYVVSLKKSEIGQKTVEFLGFNITKEGRGLTDTFKTKLLNITPPKDLKQLQSILGLLNFARNFIPNFAELVQPLYNLIAPAKGKYIEWSEENTKQLNMVIEALNTASNLEERLPEQRLVIKVNTSPSAGYVRYYNETGKKPIMYLNYVFSKAELKFSMLEKLLTTMHKALIKAMDLAMGQEILVYSPIVSMTKIQKTPLPERKALPIRWITWMTYLEDPRIQFHYDKTLPELKHIPDVYTSSQSPVKHPSQYEGVFYTDGSAIKSPDPTKSNNAGMGIVHATYKPEYQVLNQWSIPLGNHTAQMAEIAAVEFACKKALKIPGPVLVITDSFYVAESANKELPYWKSNGFVNNKKKPLKHISKWKSIAECLSMKPDITIQHEKGISLQIPVFILKGNALADKLATQGSYVVNAGKRTADGSEFEKRTADGSEFESPKKKAKVE

SEQ ID NO: 1332 - protein, 2177 aa, synthetic construct
MPAAKRVKLDGGDKKYSIGLDIGTNSVGWAVITDEYKVPSKKFKVLGNTDRHSIKKNLIGALLFDSGETAEATRLKRTARRRYTRRKNRICYLQEIFSNEMAKVDDSFFHRLEESFLVEEDKKHERHPIFGNIVDEVAYHEKYPTIYHLRKKLVDSTDKADLRLIYLALAHMIKFRGHFLIEGDLNPDNSDVDKLFIQLVQTYNQLFEENPINASGVDAKAILSARLSKSRRLENLIAQLPGEKKNGLFGNLIALSLGLTPNFKSNFDLAEDAKLQLSKDTYDDDLDNLLAQIGDQYADLFLAAKNLSDAILLSDILRVNTEITKAPLSASMIKRYDEHHQDLTLLKALVRQQLPEKYKEIFFDQSKNGYAGYIDGGASQEEFYKFIKPILEKMDGTEELLVKLNREDLLRKQRTFDNGSIPHQIHLGELHAILRRQEDFYPFLKDNREKIEKILTFRIPYYVGPLARGNSRFAWMTRKSEETITPWNFEEVVDKGASAQSFIERMTNFDKNLPNEKVLPKHSLLYEYFTVYNELTKVKYVTEGMRKPAFLSGEQKKAIVDLLFKTNRKVTVKQLKEDYFKKIECFDSVEISGVEDRFNASLGTYHDLLKIIKDKDFLDNEENEDILEDIVLTLTLFEDREMIEERLKTYAHLFDDKVMKQLKRRRYTGWGRLSRKLINGIRDKQSGKTILDFLKSDGFANRNFMQLIHDDSLTFKEDIQKAQVSGQGDSLHEHIANLAGSPAIKKGILQTVKVVDELVKVMGRHKPENIVIEMARENQTTQKGQKNSRERMKRIEEGIKELGSQILKEHPVENTQLQNEKLYLYYLQNGRDMYVDQELDINRLSDYDVDHIVPQSFLKDDSIDNKVLTRSDKARGKSDNVPSEEVVKKMKNYWRQLLNAKLITQRKFDNLTKAERGGLSELDKAGFIKRQLVETRQITKHVAQILDSRMNTKYDENDKLIREVKVITLKSKLVSDFRKDFQFYKVREINNYHHAHDAYLNAVVGTALIKKYPKLESEFVYGDYKVYDVRKMIAKSEQEIGKATAKYFFYSNIMNFFKTEITLANGEIRKRPLIETNGETGEIVWDKGRDFATVRKVLSMPQVNIVKKTEVQTGGFSKESILPKRNSDKLIARKKDWDPKKYGGFDSPTVAYSVLVVAKVEKGKSKKLKSVKELLGITIMERSSFEKNPIDFLEAKGYKEVKKDLIIKLPKYSLFELENGRKRMLASAGELQKGNELALPSKYVNFLYLASHYEKLKGSPEDNEQKQLFVEQHKHYLDEIIEQISEFSKRVILADANLDKVLSAYNKHRDKPIREQAENIIHLFTLTNLGAPAAFKYFDTTIDRKRYTSTKEVLDATLIHQSITGLYETRIDLSQLGGDGGGSSGSSGSSGSSGGMNPLQLLQPLPAEIKGTKLLAHWNSGATITCIPESFLEDEQPIKKTLIKTIHGEKQQNVYYVTFKVKGRKVEAEVIASPYEYILLSPTDVPWLTQQPLQLTILVPLQEYQEKILSKTALPEDQKQQLKTLFVKYDNLWQHWENQVGHRKIRPHNIATGDYPPRPQKQYPINPKAKPSIQIVIDDLLKQGVLTPQNSTMNTPVYPVPKPDGRWRMVLDYREVNKTIPLTAAQNQHSAGILATIVRQKYKTTLDLANGFWAHPITPESYWLTAFTWQGKQYCWTRLPQGFLNSPALFNADVVDLLKEIPNVQVYVDDIYLSHDDPKEHVQQLEKVFQILLQAGYVVSLKKSEIGQKTVEFLGFNITKEGRGLTDTFKTKLLNITPPKDLKQLQSILGLLNFARNFIPNFAELVQPLYNLIAPAKGKYIEWSEENTKQLNMVIEALNTASNLEERLPEQRLVIKVNTSPSAGYVRYYNETGKKPIMYLNYVFSKAELKFSMLEKLLTTMHKALIKAMDLAMGQEILVYSPIVSMTKIQKTPLPERKALPIRWITWMTYLEDPRIQFHYDKTLPELKHIPDVYTSSQSPVKHPSQYEGVFYTDGSAIKSPDPTKSNNAGMGIVHATYKPEYQVLNQWSIPLGNHTAQMAEIAAVEFACKKALKIPGPVLVITDSFYVAESANKELPYWKSNGFVNNKKKPLKHISKWKSIAECLSMKPDITIQHEKGISLQIPVFILKGNALADKLATQGSYVVNAGKRTADGSEFEKRTADGSEFESPKKKAKVE

SEQ ID NO: 1333 - protein, 2174 aa, synthetic construct
MPAAKRVKLDGGDKKYSIGLDIGTNSVGWAVITDEYKVPSKKFKVLGNTDRHSIKKNLIGALLFDSGETAEATRLKRTARRRYTRRKNRICYLQEIFSNEMAKVDDSFFHRLEESFLVEEDKKHERHPIFGNIVDEVAYHEKYPTIYHLRKKLVDSTDKADLRLIYLALAHMIKFRGHFLIEGDLNPDNSDVDKLFIQLVQTYNQLFEENPINASGVDAKAILSARLSKSRRLENLIAQLPGEKKNGLFGNLIALSLGLTPNFKSNFDLAEDAKLQLSKDTYDDDLDNLLAQIGDQYADLFLAAKNLSDAILLSDILRVNTEITKAPLSASMIKRYDEHHQDLTLLKALVRQQLPEKYKEIFFDQSKNGYAGYIDGGASQEEFYKFIKPILEKMDGTEELLVKLNREDLLRKQRTFDNGSIPHQIHLGELHAILRRQEDFYPFLKDNREKIEKILTFRIPYYVGPLARGNSRFAWMTRKSEETITPWNFEEVVDKGASAQSFIERMTNFDKNLPNEKVLPKHSLLYEYFTVYNELTKVKYVTEGMRKPAFLSGEQKKAIVDLLFKTNRKVTVKQLKEDYFKKIECFDSVEISGVEDRFNASLGTYHDLLKIIKDKDFLDNEENEDILEDIVLTLTLFEDREMIEERLKTYAHLFDDKVMKQLKRRRYTGWGRLSRKLINGIRDKQSGKTILDFLKSDGFANRNFMQLIHDDSLTFKEDIQKAQVSGQGDSLHEHIANLAGSPAIKKGILQTVKVVDELVKVMGRHKPENIVIEMARENQTTQKGQKNSRERMKRIEEGIKELGSQILKEHPVENTQLQNEKLYLYYLQNGRDMYVDQELDINRLSDYDVDHIVPQSFLKDDSIDNKVLTRSDKARGKSDNVPSEEVVKKMKNYWRQLLNAKLITQRKFDNLTKAERGGLSELDKAGFIKRQLVETRQITKHVAQILDSRMNTKYDENDKLIREVKVITLKSKLVSDFRKDFQFYKVREINNYHHAHDAYLNAVVGTALIKKYPKLESEFVYGDYKVYDVRKMIAKSEQEIGKATAKYFFYSNIMNFFKTEITLANGEIRKRPLIETNGETGEIVWDKGRDFATVRKVLSMPQVNIVKKTEVQTGGFSKESILPKRNSDKLIARKKDWDPKKYGGFDSPTVAYSVLVVAKVEKGKSKKLKSVKELLGITIMERSSFEKNPIDFLEAKGYKEVKKDLIIKLPKYSLFELENGRKRMLASAGELQKGNELALPSKYVNFLYLASHYEKLKGSPEDNEQKQLFVEQHKHYLDEIIEQISEFSKRVILADANLDKVLSAYNKHRDKPIREQAENIIHLFTLTNLGAPAAFKYFDTTIDRKRYTSTKEVLDATLIHQSITGLYETRIDLSQLGGDGGPAPGSSGGSGGMNPLQLLQPLPAEIKGTKLLAHWNSGATITCIPESFLEDEQPIKKTLIKTIHGEKQQNVYYVTFKVKGRKVEAEVIASPYEYILLSPTDVPWLTQQPLQLTILVPLQEYQEKILSKTALPEDQKQQLKTLFVKYDNLWQHWENQVGHRKIRPHNIATGDYPPRPQKQYPINPKAKPSIQIVIDDLLKQGVLTPQNSTMNTPVYPVPKPDGRWRMVLDYREVNKTIPLTAAQNQHSAGILATIVRQKYKTTLDLANGFWAHPITPESYWLTAFTWQGKQYCWTRLPQGFLNSPALFNADVVDLLKEIPNVQVYVDDIYLSHDDPKEHVQQLEKVFQILLQAGYVVSLKKSEIGQKTVEFLGFNITKEGRGLTDTFKTKLLNITPPKDLKQLQSILGLLNFARNFIPNFAELVQPLYNLIAPAKGKYIEWSEENTKQLNMVIEALNTASNLEERLPEQRLVIKVNTSPSAGYVRYYNETGKKPIMYLNYVFSKAELKFSMLEKLLTTMHKALIKAMDLAMGQEILVYSPIVSMTKIQKTPLPERKALPIRWITWMTYLEDPRIQFHYDKTLPELKHIPDVYTSSQSPVKHPSQYEGVFYTDGSAIKSPDPTKSNNAGMGIVHATYKPEYQVLNQWSIPLGNHTAQMAEIAAVEFACKKALKIPGPVLVITDSFYVAESANKELPYWKSNGFVNNKKKPLKHISKWKSIAECLSMKPDITIQHEKGISLQIPVFILKGNALADKLATQGSYVVNAGKRTADGSEFEKRTADGSEFESPKKKAKVE

SEQ ID NO: 1334 - protein, 2176 aa, synthetic construct
MPAAKRVKLDGGDKKYSIGLDIGTNSVGWAVITDEYKVPSKKFKVLGNTDRHSIKKNLIGALLFDSGETAEATRLKRTARRRYTRRKNRICYLQEIFSNEMAKVDDSFFHRLEESFLVEEDKKHERHPIFGNIVDEVAYHEKYPTIYHLRKKLVDSTDKADLRLIYLALAHMIKFRGHFLIEGDLNPDNSDVDKLFIQLVQTYNQLFEENPINASGVDAKAILSARLSKSRRLENLIAQLPGEKKNGLFGNLIALSLGLTPNFKSNFDLAEDAKLQLSKDTYDDDLDNLLAQIGDQYADLFLAAKNLSDAILLSDILRVNTEITKAPLSASMIKRYDEHHQDLTLLKALVRQQLPEKYKEIFFDQSKNGYAGYIDGGASQEEFYKFIKPILEKMDGTEELLVKLNREDLLRKQRTFDNGSIPHQIHLGELHAILRRQEDFYPFLKDNREKIEKILTFRIPYYVGPLARGNSRFAWMTRKSEETITPWNFEEVVDKGASAQSFIERMTNFDKNLPNEKVLPKHSLLYEYFTVYNELTKVKYVTEGMRKPAFLSGEQKKAIVDLLFKTNRKVTVKQLKEDYFKKIECFDSVEISGVEDRFNASLGTYHDLLKIIKDKDFLDNEENEDILEDIVLTLTLFEDREMIEERLKTYAHLFDDKVMKQLKRRRYTGWGRLSRKLINGIRDKQSGKTILDFLKSDGFANRNFMQLIHDDSLTFKEDIQKAQVSGQGDSLHEHIANLAGSPAIKKGILQTVKVVDELVKVMGRHKPENIVIEMARENQTTQKGQKNSRERMKRIEEGIKELGSQILKEHPVENTQLQNEKLYLYYLQNGRDMYVDQELDINRLSDYDVDHIVPQSFLKDDSIDNKVLTRSDKARGKSDNVPSEEVVKKMKNYWRQLLNAKLITQRKFDNLTKAERGGLSELDKAGFIKRQLVETRQITKHVAQILDSRMNTKYDENDKLIREVKVITLKSKLVSDFRKDFQFYKVREINNYHHAHDAYLNAVVGTALIKKYPKLESEFVYGDYKVYDVRKMIAKSEQEIGKATAKYFFYSNIMNFFKTEITLANGEIRKRPLIETNGETGEIVWDKGRDFATVRKVLSMPQVNIVKKTEVQTGGFSKESILPKRNSDKLIARKKDWDPKKYGGFDSPTVAYSVLVVAKVEKGKSKKLKSVKELLGITIMERSSFEKNPIDFLEAKGYKEVKKDLIIKLPKYSLFELENGRKRMLASAGELQKGNELALPSKYVNFLYLASHYEKLKGSPEDNEQKQLFVEQHKHYLDEIIEQISEFSKRVILADANLDKVLSAYNKHRDKPIREQAENIIHLFTLTNLGAPAAFKYFDTTIDRKRYTSTKEVLDATLIHQSITGLYETRIDLSQLGGDGGEAAAKGGGGGSGGMNPLQLLQPLPAEIKGTKLLAHWNSGATITCIPESFLEDEQPIKKTLIKTIHGEKQQNVYYVTFKVKGRKVEAEVIASPYEYILLSPTDVPWLTQQPLQLTILVPLQEYQEKILSKTALPEDQKQQLKTLFVKYDNLWQHWENQVGHRKIRPHNIATGDYPPRPQKQYPINPKAKPSIQIVIDDLLKQGVLTPQNSTMNTPVYPVPKPDGRWRMVLDYREVNKTIPLTAAQNQHSAGILATIVRQKYKTTLDLANGFWAHPITPESYWLTAFTWQGKQYCWTRLPQGFLNSPALFNADVVDLLKEIPNVQVYVDDIYLSHDDPKEHVQQLEKVFQILLQAGYVVSLKKSEIGQKTVEFLGFNITKEGRGLTDTFKTKLLNITPPKDLKQLQSILGLLNFARNFIPNFAELVQPLYNLIAPAKGKYIEWSEENTKQLNMVIEALNTASNLEERLPEQRLVIKVNTSPSAGYVRYYNETGKKPIMYLNYVFSKAELKFSMLEKLLTTMHKALIKAMDLAMGQEILVYSPIVSMTKIQKTPLPERKALPIRWITWMTYLEDPRIQFHYDKTLPELKHIPDVYTSSQSPVKHPSQYEGVFYTDGSAIKSPDPTKSNNAGMGIVHATYKPEYQVLNQWSIPLGNHTAQMAEIAAVEFACKKALKIPGPVLVITDSFYVAESANKELPYWKSNGFVNNKKKPLKHISKWKSIAECLSMKPDITIQHEKGISLQIPVFILKGNALADKLATQGSYVVNAGKRTADGSEFEKRTADGSEFESPKKKAKVE

SEQ ID NO: 1335 - protein, 2176 aa, synthetic construct
MPAAKRVKLDGGDKKYSIGLDIGTNSVGWAVITDEYKVPSKKFKVLGNTDRHSIKKNLIGALLFDSGETAEATRLKRTARRRYTRRKNRICYLQEIFSNEMAKVDDSFFHRLEESFLVEEDKKHERHPIFGNIVDEVAYHEKYPTIYHLRKKLVDSTDKADLRLIYLALAHMIKFRGHFLIEGDLNPDNSDVDKLFIQLVQTYNQLFEENPINASGVDAKAILSARLSKSRRLENLIAQLPGEKKNGLFGNLIALSLGLTPNFKSNFDLAEDAKLQLSKDTYDDDLDNLLAQIGDQYADLFLAAKNLSDAILLSDILRVNTEITKAPLSASMIKRYDEHHQDLTLLKALVRQQLPEKYKEIFFDQSKNGYAGYIDGGASQEEFYKFIKPILEKMDGTEELLVKLNREDLLRKQRTFDNGSIPHQIHLGELHAILRRQEDFYPFLKDNREKIEKILTFRIPYYVGPLARGNSRFAWMTRKSEETITPWNFEEVVDKGASAQSFIERMTNFDKNLPNEKVLPKHSLLYEYFTVYNELTKVKYVTEGMRKPAFLSGEQKKAIVDLLFKTNRKVTVKQLKEDYFKKIECFDSVEISGVEDRFNASLGTYHDLLKIIKDKDFLDNEENEDILEDIVLTLTLFEDREMIEERLKTYAHLFDDKVMKQLKRRRYTGWGRLSRKLINGIRDKQSGKTILDFLKSDGFANRNFMQLIHDDSLTFKEDIQKAQVSGQGDSLHEHIANLAGSPAIKKGILQTVKVVDELVKVMGRHKPENIVIEMARENQTTQKGQKNSRERMKRIEEGIKELGSQILKEHPVENTQLQNEKLYLYYLQNGRDMYVDQELDINRLSDYDVDHIVPQSFLKDDSIDNKVLTRSDKARGKSDNVPSEEVVKKMKNYWRQLLNAKLITQRKFDNLTKAERGGLSELDKAGFIKRQLVETRQITKHVAQILDSRMNTKYDENDKLIREVKVITLKSKLVSDFRKDFQFYKVREINNYHHAHDAYLNAVVGTALIKKYPKLESEFVYGDYKVYDVRKMIAKSEQEIGKATAKYFFYSNIMNFFKTEITLANGEIRKRPLIETNGETGEIVWDKGRDFATVRKVLSMPQVNIVKKTEVQTGGFSKESILPKRNSDKLIARKKDWDPKKYGGFDSPTVAYSVLVVAKVEKGKSKKLKSVKELLGITIMERSSFEKNPIDFLEAKGYKEVKKDLIIKLPKYSLFELENGRKRMLASAGELQKGNELALPSKYVNFLYLASHYEKLKGSPEDNEQKQLFVEQHKHYLDEIIEQISEFSKRVILADANLDKVLSAYNKHRDKPIREQAENIIHLFTLTNLGAPAAFKYFDTTIDRKRYTSTKEVLDATLIHQSITGLYETRIDLSQLGGDGGEAAAKGGGGSSGGMNPLQLLQPLPAEIKGTKLLAHWNSGATITCIPESFLEDEQPIKKTLIKTIHGEKQQNVYYVTFKVKGRKVEAEVIASPYEYILLSPTDVPWLTQQPLQLTILVPLQEYQEKILSKTALPEDQKQQLKTLFVKYDNLWQHWENQVGHRKIRPHNIATGDYPPRPQKQYPINPKAKPSIQIVIDDLLKQGVLTPQNSTMNTPVYPVPKPDGRWRMVLDYREVNKTIPLTAAQNQHSAGILATIVRQKYKTTLDLANGFWAHPITPESYWLTAFTWQGKQYCWTRLPQGFLNSPALFNADVVDLLKEIPNVQVYVDDIYLSHDDPKEHVQQLEKVFQILLQAGYVVSLKKSEIGQKTVEFLGFNITKEGRGLTDTFKTKLLNITPPKDLKQLQSILGLLNFARNFIPNFAELVQPLYNLIAPAKGKYIEWSEENTKQLNMVIEALNTASNLEERLPEQRLVIKVNTSPSAGYVRYYNETGKKPIMYLNYVFSKAELKFSMLEKLLTTMHKALIKAMDLAMGQEILVYSPIVSMTKIQKTPLPERKALPIRWITWMTYLEDPRIQFHYDKTLPELKHIPDVYTSSQSPVKHPSQYEGVFYTDGSAIKSPDPTKSNNAGMGIVHATYKPEYQVLNQWSIPLGNHTAQMAEIAAVEFACKKALKIPGPVLVITDSFYVAESANKELPYWKSNGFVNNKKKPLKHISKWKSIAECLSMKPDITIQHEKGISLQIPVFILKGNALADKLATQGSYVVNAGKRTADGSEFEKRTADGSEFESPKKKAKVE

SEQ ID NO: 1336 - protein, 2174 aa, synthetic construct
MPAAKRVKLDGGDKKYSIGLDIGTNSVGWAVITDEYKVPSKKFKVLGNTDRHSIKKNLIGALLFDSGETAEATRLKRTARRRYTRRKNRICYLQEIFSNEMAKVDDSFFHRLEESFLVEEDKKHERHPIFGNIVDEVAYHEKYPTIYHLRKKLVDSTDKADLRLIYLALAHMIKFRGHFLIEGDLNPDNSDVDKLFIQLVQTYNQLFEENPINASGVDAKAILSARLSKSRRLENLIAQLPGEKKNGLFGNLIALSLGLTPNFKSNFDLAEDAKLQLSKDTYDDDLDNLLAQIGDQYADLFLAAKNLSDAILLSDILRVNTEITKAPLSASMIKRYDEHHQDLTLLKALVRQQLPEKYKEIFFDQSKNGYAGYIDGGASQEEFYKFIKPILEKMDGTEELLVKLNREDLLRKQRTFDNGSIPHQIHLGELHAILRRQEDFYPFLKDNREKIEKILTFRIPYYVGPLARGNSRFAWMTRKSEETITPWNFEEVVDKGASAQSFIERMTNFDKNLPNEKVLPKHSLLYEYFTVYNELTKVKYVTEGMRKPAFLSGEQKKAIVDLLFKTNRKVTVKQLKEDYFKKIECFDSVEISGVEDRFNASLGTYHDLLKIIKDKDFLDNEENEDILEDIVLTLTLFEDREMIEERLKTYAHLFDDKVMKQLKRRRYTGWGRLSRKLINGIRDKQSGKTILDFLKSDGFANRNFMQLIHDDSLTFKEDIQKAQVSGQGDSLHEHIANLAGSPAIKKGILQTVKVVDELVKVMGRHKPENIVIEMARENQTTQKGQKNSRERMKRIEEGIKELGSQILKEHPVENTQLQNEKLYLYYLQNGRDMYVDQELDINRLSDYDVDHIVPQSFLKDDSIDNKVLTRSDKARGKSDNVPSEEVVKKMKNYWRQLLNAKLITQRKFDNLTKAERGGLSELDKAGFIKRQLVETRQITKHVAQILDSRMNTKYDENDKLIREVKVITLKSKLVSDFRKDFQFYKVREINNYHHAHDAYLNAVVGTALIKKYPKLESEFVYGDYKVYDVRKMIAKSEQEIGKATAKYFFYSNIMNFFKTEITLANGEIRKRPLIETNGETGEIVWDKGRDFATVRKVLSMPQVNIVKKTEVQTGGFSKESILPKRNSDKLIARKKDWDPKKYGGFDSPTVAYSVLVVAKVEKGKSKKLKSVKELLGITIMERSSFEKNPIDFLEAKGYKEVKKDLIIKLPKYSLFELENGRKRMLASAGELQKGNELALPSKYVNFLYLASHYEKLKGSPEDNEQKQLFVEQHKHYLDEIIEQISEFSKRVILADANLDKVLSAYNKHRDKPIREQAENIIHLFTLTNLGAPAAFKYFDTTIDRKRYTSTKEVLDATLIHQSITGLYETRIDLSQLGGDGGGGGGSSPAPGGMNPLQLLQPLPAEIKGTKLLAHWNSGATITCIPESFLEDEQPIKKTLIKTIHGEKQQNVYYVTFKVKGRKVEAEVIASPYEYILLSPTDVPWLTQQPLQLTILVPLQEYQEKILSKTALPEDQKQQLKTLFVKYDNLWQHWENQVGHRKIRPHNIATGDYPPRPQKQYPINPKAKPSIQIVIDDLLKQGVLTPQNSTMNTPVYPVPKPDGRWRMVLDYREVNKTIPLTAAQNQHSAGILATIVRQKYKTTLDLANGFWAHPITPESYWLTAFTWQGKQYCWTRLPQGFLNSPALFNADVVDLLKEIPNVQVYVDDIYLSHDDPKEHVQQLEKVFQILLQAGYVVSLKKSEIGQKTVEFLGFNITKEGRGLTDTFKTKLLNITPPKDLKQLQSILGLLNFARNFIPNFAELVQPLYNLIAPAKGKYIEWSEENTKQLNMVIEALNTASNLEERLPEQRLVIKVNTSPSAGYVRYYNETGKKPIMYLNYVFSKAELKFSMLEKLLTTMHKALIKAMDLAMGQEILVYSPIVSMTKIQKTPLPERKALPIRWITWMTYLEDPRIQFHYDKTLPELKHIPDVYTSSQSPVKHPSQYEGVFYTDGSAIKSPDPTKSNNAGMGIVHATYKPEYQVLNQWSIPLGNHTAQMAEIAAVEFACKKALKIPGPVLVITDSFYVAESANKELPYWKSNGFVNNKKKPLKHISKWKSIAECLSMKPDITIQHEKGISLQIPVFILKGNALADKLATQGSYVVNAGKRTADGSEFEKRTADGSEFESPKKKAKVE

SEQ ID NO: 1337 - protein, 2176 aa, synthetic construct
MPAAKRVKLDGGDKKYSIGLDIGTNSVGWAVITDEYKVPSKKFKVLGNTDRHSIKKNLIGALLFDSGETAEATRLKRTARRRYTRRKNRICYLQEIFSNEMAKVDDSFFHRLEESFLVEEDKKHERHPIFGNIVDEVAYHEKYPTIYHLRKKLVDSTDKADLRLIYLALAHMIKFRGHFLIEGDLNPDNSDVDKLFIQLVQTYNQLFEENPINASGVDAKAILSARLSKSRRLENLIAQLPGEKKNGLFGNLIALSLGLTPNFKSNFDLAEDAKLQLSKDTYDDDLDNLLAQIGDQYADLFLAAKNLSDAILLSDILRVNTEITKAPLSASMIKRYDEHHQDLTLLKALVRQQLPEKYKEIFFDQSKNGYAGYIDGGASQEEFYKFIKPILEKMDGTEELLVKLNREDLLRKQRTFDNGSIPHQIHLGELHAILRRQEDFYPFLKDNREKIEKILTFRIPYYVGPLARGNSRFAWMTRKSEETITPWNFEEVVDKGASAQSFIERMTNFDKNLPNEKVLPKHSLLYEYFTVYNELTKVKYVTEGMRKPAFLSGEQKKAIVDLLFKTNRKVTVKQLKEDYFKKIECFDSVEISGVEDRFNASLGTYHDLLKIIKDKDFLDNEENEDILEDIVLTLTLFEDREMIEERLKTYAHLFDDKVMKQLKRRRYTGWGRLSRKLINGIRDKQSGKTILDFLKSDGFANRNFMQLIHDDSLTFKEDIQKAQVSGQGDSLHEHIANLAGSPAIKKGILQTVKVVDELVKVMGRHKPENIVIEMARENQTTQKGQKNSRERMKRIEEGIKELGSQILKEHPVENTQLQNEKLYLYYLQNGRDMYVDQELDINRLSDYDVDHIVPQSFLKDDSIDNKVLTRSDKARGKSDNVPSEEVVKKMKNYWRQLLNAKLITQRKFDNLTKAERGGLSELDKAGFIKRQLVETRQITKHVAQILDSRMNTKYDENDKLIREVKVITLKSKLVSDFRKDFQFYKVREINNYHHAHDAYLNAVVGTALIKKYPKLESEFVYGDYKVYDVRKMIAKSEQEIGKATAKYFFYSNIMNFFKTEITLANGEIRKRPLIETNGETGEIVWDKGRDFATVRKVLSMPQVNIVKKTEVQTGGFSKESILPKRNSDKLIARKKDWDPKKYGGFDSPTVAYSVLVVAKVEKGKSKKLKSVKELLGITIMERSSFEKNPIDFLEAKGYKEVKKDLIIKLPKYSLFELENGRKRMLASAGELQKGNELALPSKYVNFLYLASHYEKLKGSPEDNEQKQLFVEQHKHYLDEIIEQISEFSKRVILADANLDKVLSAYNKHRDKPIREQAENIIHLFTLTNLGAPAAFKYFDTTIDRKRYTSTKEVLDATLIHQSITGLYETRIDLSQLGGDGGGGGGSSEAAAKGGMNPLQLLQPLPAEIKGTKLLAHWNSGATITCIPESFLEDEQPIKKTLIKTIHGEKQQNVYYVTFKVKGRKVEAEVIASPYEYILLSPTDVPWLTQQPLQLTILVPLQEYQEKILSKTALPEDQKQQLKTLFVKYDNLWQHWENQVGHRKIRPHNIATGDYPPRPQKQYPINPKAKPSIQIVIDDLLKQGVLTPQNSTMNTPVYPVPKPDGRWRMVLDYREVNKTIPLTAAQNQHSAGILATIVRQKYKTTLDLANGFWAHPITPESYWLTAFTWQGKQYCWTRLPQGFLNSPALFNADVVDLLKEIPNVQVYVDDIYLSHDDPKEHVQQLEKVFQILLQAGYVVSLKKSEIGQKTVEFLGFNITKEGRGLTDTFKTKLLNITPPKDLKQLQSILGLLNFARNFIPNFAELVQPLYNLIAPAKGKYIEWSEENTKQLNMVIEALNTASNLEERLPEQRLVIKVNTSPSAGYVRYYNETGKKPIMYLNYVFSKAELKFSMLEKLLTTMHKALIKAMDLAMGQEILVYSPIVSMTKIQKTPLPERKALPIRWITWMTYLEDPRIQFHYDKTLPELKHIPDVYTSSQSPVKHPSQYEGVFYTDGSAIKSPDPTKSNNAGMGIVHATYKPEYQVLNQWSIPLGNHTAQMAEIAAVEFACKKALKIPGPVLVITDSFYVAESANKELPYWKSNGFVNNKKKPLKHISKWKSIAECLSMKPDITIQHEKGISLQIPVFILKGNALADKLATQGSYVVNAGKRTADGSEFEKRTADGSEFESPKKKAKVE

SEQ ID NO: 1338 - protein, 2174 aa, synthetic construct
MPAAKRVKLDGGDKKYSIGLDIGTNSVGWAVITDEYKVPSKKFKVLGNTDRHSIKKNLIGALLFDSGETAEATRLKRTARRRYTRRKNRICYLQEIFSNEMAKVDDSFFHRLEESFLVEEDKKHERHPIFGNIVDEVAYHEKYPTIYHLRKKLVDSTDKADLRLIYLALAHMIKFRGHFLIEGDLNPDNSDVDKLFIQLVQTYNQLFEENPINASGVDAKAILSARLSKSRRLENLIAQLPGEKKNGLFGNLIALSLGLTPNFKSNFDLAEDAKLQLSKDTYDDDLDNLLAQIGDQYADLFLAAKNLSDAILLSDILRVNTEITKAPLSASMIKRYDEHHQDLTLLKALVRQQLPEKYKEIFFDQSKNGYAGYIDGGASQEEFYKFIKPILEKMDGTEELLVKLNREDLLRKQRTFDNGSIPHQIHLGELHAILRRQEDFYPFLKDNREKIEKILTFRIPYYVGPLARGNSRFAWMTRKSEETITPWNFEEVVDKGASAQSFIERMTNFDKNLPNEKVLPKHSLLYEYFTVYNELTKVKYVTEGMRKPAFLSGEQKKAIVDLLFKTNRKVTVKQLKEDYFKKIECFDSVEISGVEDRFNASLGTYHDLLKIIKDKDFLDNEENEDILEDIVLTLTLFEDREMIEERLKTYAHLFDDKVMKQLKRRRYTGWGRLSRKLINGIRDKQSGKTILDFLKSDGFANRNFMQLIHDDSLTFKEDIQKAQVSGQGDSLHEHIANLAGSPAIKKGILQTVKVVDELVKVMGRHKPENIVIEMARENQTTQKGQKNSRERMKRIEEGIKELGSQILKEHPVENTQLQNEKLYLYYLQNGRDMYVDQELDINRLSDYDVDHIVPQSFLKDDSIDNKVLTRSDKARGKSDNVPSEEVVKKMKNYWRQLLNAKLITQRKFDNLTKAERGGLSELDKAGFIKRQLVETRQITKHVAQILDSRMNTKYDENDKLIREVKVITLKSKLVSDFRKDFQFYKVREINNYHHAHDAYLNAVVGTALIKKYPKLESEFVYGDYKVYDVRKMIAKSEQEIGKATAKYFFYSNIMNFFKTEITLANGEIRKRPLIETNGETGEIVWDKGRDFATVRKVLSMPQVNIVKKTEVQTGGFSKESILPKRNSDKLIARKKDWDPKKYGGFDSPTVAYSVLVVAKVEKGKSKKLKSVKELLGITIMERSSFEKNPIDFLEAKGYKEVKKDLIIKLPKYSLFELENGRKRMLASAGELQKGNELALPSKYVNFLYLASHYEKLKGSPEDNEQKQLFVEQHKHYLDEIIEQISEFSKRVILADANLDKVLSAYNKHRDKPIREQAENIIHLFTLTNLGAPAAFKYFDTTIDRKRYTSTKEVLDATLIHQSITGLYETRIDLSQLGGDGGGGGGGSGSSGGMNPLQLLQPLPAEIKGTKLLAHWNSGATITCIPESFLEDEQPIKKTLIKTIHGEKQQNVYYVTFKVKGRKVEAEVIASPYEYILLSPTDVPWLTQQPLQLTILVPLQEYQEKILSKTALPEDQKQQLKTLFVKYDNLWQHWENQVGHRKIRPHNIATGDYPPRPQKQYPINPKAKPSIQIVIDDLLKQGVLTPQNSTMNTPVYPVPKPDGRWRMVLDYREVNKTIPLTAAQNQHSAGILATIVRQKYKTTLDLANGFWAHPITPESYWLTAFTWQGKQYCWTRLPQGFLNSPALFNADVVDLLKEIPNVQVYVDDIYLSHDDPKEHVQQLEKVFQILLQAGYVVSLKKSEIGQKTVEFLGFNITKEGRGLTDTFKTKLLNITPPKDLKQLQSILGLLNFARNFIPNFAELVQPLYNLIAPAKGKYIEWSEENTKQLNMVIEALNTASNLEERLPEQRLVIKVNTSPSAGYVRYYNETGKKPIMYLNYVFSKAELKFSMLEKLLTTMHKALIKAMDLAMGQEILVYSPIVSMTKIQKTPLPERKALPIRWITWMTYLEDPRIQFHYDKTLPELKHIPDVYTSSQSPVKHPSQYEGVFYTDGSAIKSPDPTKSNNAGMGIVHATYKPEYQVLNQWSIPLGNHTAQMAEIAAVEFACKKALKIPGPVLVITDSFYVAESANKELPYWKSNGFVNNKKKPLKHISKWKSIAECLSMKPDITIQHEKGISLQIPVFILKGNALADKLATQGSYVVNAGKRTADGSEFEKRTADGSEFESPKKKAKVE

SEQ ID NO: 1339 - protein, 2176 aa, synthetic construct
MPAAKRVKLDGGDKKYSIGLDIGTNSVGWAVITDEYKVPSKKFKVLGNTDRHSIKKNLIGALLFDSGETAEATRLKRTARRRYTRRKNRICYLQEIFSNEMAKVDDSFFHRLEESFLVEEDKKHERHPIFGNIVDEVAYHEKYPTIYHLRKKLVDSTDKADLRLIYLALAHMIKFRGHFLIEGDLNPDNSDVDKLFIQLVQTYNQLFEENPINASGVDAKAILSARLSKSRRLENLIAQLPGEKKNGLFGNLIALSLGLTPNFKSNFDLAEDAKLQLSKDTYDDDLDNLLAQIGDQYADLFLAAKNLSDAILLSDILRVNTEITKAPLSASMIKRYDEHHQDLTLLKALVRQQLPEKYKEIFFDQSKNGYAGYIDGGASQEEFYKFIKPILEKMDGTEELLVKLNREDLLRKQRTFDNGSIPHQIHLGELHAILRRQEDFYPFLKDNREKIEKILTFRIPYYVGPLARGNSRFAWMTRKSEETITPWNFEEVVDKGASAQSFIERMTNFDKNLPNEKVLPKHSLLYEYFTVYNELTKVKYVTEGMRKPAFLSGEQKKAIVDLLFKTNRKVTVKQLKEDYFKKIECFDSVEISGVEDRFNASLGTYHDLLKIIKDKDFLDNEENEDILEDIVLTLTLFEDREMIEERLKTYAHLFDDKVMKQLKRRRYTGWGRLSRKLINGIRDKQSGKTILDFLKSDGFANRNFMQLIHDDSLTFKEDIQKAQVSGQGDSLHEHIANLAGSPAIKKGILQTVKVVDELVKVMGRHKPENIVIEMARENQTTQKGQKNSRERMKRIEEGIKELGSQILKEHPVENTQLQNEKLYLYYLQNGRDMYVDQELDINRLSDYDVDHIVPQSFLKDDSIDNKVLTRSDKARGKSDNVPSEEVVKKMKNYWRQLLNAKLITQRKFDNLTKAERGGLSELDKAGFIKRQLVETRQITKHVAQILDSRMNTKYDENDKLIREVKVITLKSKLVSDFRKDFQFYKVREINNYHHAHDAYLNAVVGTALIKKYPKLESEFVYGDYKVYDVRKMIAKSEQEIGKATAKYFFYSNIMNFFKTEITLANGEIRKRPLIETNGETGEIVWDKGRDFATVRKVLSMPQVNIVKKTEVQTGGFSKESILPKRNSDKLIARKKDWDPKKYGGFDSPTVAYSVLVVAKVEKGKSKKLKSVKELLGITIMERSSFEKNPIDFLEAKGYKEVKKDLIIKLPKYSLFELENGRKRMLASAGELQKGNELALPSKYVNFLYLASHYEKLKGSPEDNEQKQLFVEQHKHYLDEIIEQISEFSKRVILADANLDKVLSAYNKHRDKPIREQAENIIHLFTLTNLGAPAAFKYFDTTIDRKRYTSTKEVLDATLIHQSITGLYETRIDLSQLGGDGGGGGEAAAKGSSGGMNPLQLLQPLPAEIKGTKLLAHWNSGATITCIPESFLEDEQPIKKTLIKTIHGEKQQNVYYVTFKVKGRKVEAEVIASPYEYILLSPTDVPWLTQQPLQLTILVPLQEYQEKILSKTALPEDQKQQLKTLFVKYDNLWQHWENQVGHRKIRPHNIATGDYPPRPQKQYPINPKAKPSIQIVIDDLLKQGVLTPQNSTMNTPVYPVPKPDGRWRMVLDYREVNKTIPLTAAQNQHSAGILATIVRQKYKTTLDLANGFWAHPITPESYWLTAFTWQGKQYCWTRLPQGFLNSPALFNADVVDLLKEIPNVQVYVDDIYLSHDDPKEHVQQLEKVFQILLQAGYVVSLKKSEIGQKTVEFLGFNITKEGRGLTDTFKTKLLNITPPKDLKQLQSILGLLNFARNFIPNFAELVQPLYNLIAPAKGKYIEWSEENTKQLNMVIEALNTASNLEERLPEQRLVIKVNTSPSAGYVRYYNETGKKPIMYLNYVFSKAELKFSMLEKLLTTMHKALIKAMDLAMGQEILVYSPIVSMTKIQKTPLPERKALPIRWITWMTYLEDPRIQFHYDKTLPELKHIPDVYTSSQSPVKHPSQYEGVFYTDGSAIKSPDPTKSNNAGMGIVHATYKPEYQVLNQWSIPLGNHTAQMAEIAAVEFACKKALKIPGPVLVITDSFYVAESANKELPYWKSNGFVNNKKKPLKHISKWKSIAECLSMKPDITIQHEKGISLQIPVFILKGNALADKLATQGSYVVNAGKRTADGSEFEKRTADGSEFESPKKKAKVE

SEQ ID NO: 1340 - protein, 2171 aa, synthetic construct
MPAAKRVKLDGGDKKYSIGLDIGTNSVGWAVITDEYKVPSKKFKVLGNTDRHSIKKNLIGALLFDSGETAEATRLKRTARRRYTRRKNRICYLQEIFSNEMAKVDDSFFHRLEESFLVEEDKKHERHPIFGNIVDEVAYHEKYPTIYHLRKKLVDSTDKADLRLIYLALAHMIKFRGHFLIEGDLNPDNSDVDKLFIQLVQTYNQLFEENPINASGVDAKAILSARLSKSRRLENLIAQLPGEKKNGLFGNLIALSLGLTPNFKSNFDLAEDAKLQLSKDTYDDDLDNLLAQIGDQYADLFLAAKNLSDAILLSDILRVNTEITKAPLSASMIKRYDEHHQDLTLLKALVRQQLPEKYKEIFFDQSKNGYAGYIDGGASQEEFYKFIKPILEKMDGTEELLVKLNREDLLRKQRTFDNGSIPHQIHLGELHAILRRQEDFYPFLKDNREKIEKILTFRIPYYVGPLARGNSRFAWMTRKSEETITPWNFEEVVDKGASAQSFIERMTNFDKNLPNEKVLPKHSLLYEYFTVYNELTKVKYVTEGMRKPAFLSGEQKKAIVDLLFKTNRKVTVKQLKEDYFKKIECFDSVEISGVEDRFNASLGTYHDLLKIIKDKDFLDNEENEDILEDIVLTLTLFEDREMIEERLKTYAHLFDDKVMKQLKRRRYTGWGRLSRKLINGIRDKQSGKTILDFLKSDGFANRNFMQLIHDDSLTFKEDIQKAQVSGQGDSLHEHIANLAGSPAIKKGILQTVKVVDELVKVMGRHKPENIVIEMARENQTTQKGQKNSRERMKRIEEGIKELGSQILKEHPVENTQLQNEKLYLYYLQNGRDMYVDQELDINRLSDYDVDHIVPQSFLKDDSIDNKVLTRSDKARGKSDNVPSEEVVKKMKNYWRQLLNAKLITQRKFDNLTKAERGGLSELDKAGFIKRQLVETRQITKHVAQILDSRMNTKYDENDKLIREVKVITLKSKLVSDFRKDFQFYKVREINNYHHAHDAYLNAVVGTALIKKYPKLESEFVYGDYKVYDVRKMIAKSEQEIGKATAKYFFYSNIMNFFKTEITLANGEIRKRPLIETNGETGEIVWDKGRDFATVRKVLSMPQVNIVKKTEVQTGGFSKESILPKRNSDKLIARKKDWDPKKYGGFDSPTVAYSVLVVAKVEKGKSKKLKSVKELLGITIMERSSFEKNPIDFLEAKGYKEVKKDLIIKLPKYSLFELENGRKRMLASAGELQKGNELALPSKYVNFLYLASHYEKLKGSPEDNEQKQLFVEQHKHYLDEIIEQISEFSKRVILADANLDKVLSAYNKHRDKPIREQAENIIHLFTLTNLGAPAAFKYFDTTIDRKRYTSTKEVLDATLIHQSITGLYETRIDLSQLGGDGGGSSGGGGGMNPLQLLQPLPAEIKGTKLLAHWNSGATITCIPESFLEDEQPIKKTLIKTIHGEKQQNVYYVTFKVKGRKVEAEVIASPYEYILLSPTDVPWLTQQPLQLTILVPLQEYQEKILSKTALPEDQKQQLKTLFVKYDNLWQHWENQVGHRKIRPHNIATGDYPPRPQKQYPINPKAKPSIQIVIDDLLKQGVLTPQNSTMNTPVYPVPKPDGRWRMVLDYREVNKTIPLTAAQNQHSAGILATIVRQKYKTTLDLANGFWAHPITPESYWLTAFTWQGKQYCWTRLPQGFLNSPALFNADVVDLLKEIPNVQVYVDDIYLSHDDPKEHVQQLEKVFQILLQAGYVVSLKKSEIGQKTVEFLGFNITKEGRGLTDTFKTKLLNITPPKDLKQLQSILGLLNFARNFIPNFAELVQPLYNLIAPAKGKYIEWSEENTKQLNMVIEALNTASNLEERLPEQRLVIKVNTSPSAGYVRYYNETGKKPIMYLNYVFSKAELKFSMLEKLLTTMHKALIKAMDLAMGQEILVYSPIVSMTKIQKTPLPERKALPIRWITWMTYLEDPRIQFHYDKTLPELKHIPDVYTSSQSPVKHPSQYEGVFYTDGSAIKSPDPTKSNNAGMGIVHATYKPEYQVLNQWSIPLGNHTAQMAEIAAVEFACKKALKIPGPVLVITDSFYVAESANKELPYWKSNGFVNNKKKPLKHISKWKSIAECLSMKPDITIQHEKGISLQIPVFILKGNALADKLATQGSYVVNAGKRTADGSEFEKRTADGSEFESPKKKAKVE

SEQ ID NO: 1341 - protein, 2171 aa, synthetic construct
MPAAKRVKLDGGDKKYSIGLDIGTNSVGWAVITDEYKVPSKKFKVLGNTDRHSIKKNLIGALLFDSGETAEATRLKRTARRRYTRRKNRICYLQEIFSNEMAKVDDSFFHRLEESFLVEEDKKHERHPIFGNIVDEVAYHEKYPTIYHLRKKLVDSTDKADLRLIYLALAHMIKFRGHFLIEGDLNPDNSDVDKLFIQLVQTYNQLFEENPINASGVDAKAILSARLSKSRRLENLIAQLPGEKKNGLFGNLIALSLGLTPNFKSNFDLAEDAKLQLSKDTYDDDLDNLLAQIGDQYADLFLAAKNLSDAILLSDILRVNTEITKAPLSASMIKRYDEHHQDLTLLKALVRQQLPEKYKEIFFDQSKNGYAGYIDGGASQEEFYKFIKPILEKMDGTEELLVKLNREDLLRKQRTFDNGSIPHQIHLGELHAILRRQEDFYPFLKDNREKIEKILTFRIPYYVGPLARGNSRFAWMTRKSEETITPWNFEEVVDKGASAQSFIERMTNFDKNLPNEKVLPKHSLLYEYFTVYNELTKVKYVTEGMRKPAFLSGEQKKAIVDLLFKTNRKVTVKQLKEDYFKKIECFDSVEISGVEDRFNASLGTYHDLLKIIKDKDFLDNEENEDILEDIVLTLTLFEDREMIEERLKTYAHLFDDKVMKQLKRRRYTGWGRLSRKLINGIRDKQSGKTILDFLKSDGFANRNFMQLIHDDSLTFKEDIQKAQVSGQGDSLHEHIANLAGSPAIKKGILQTVKVVDELVKVMGRHKPENIVIEMARENQTTQKGQKNSRERMKRIEEGIKELGSQILKEHPVENTQLQNEKLYLYYLQNGRDMYVDQELDINRLSDYDVDHIVPQSFLKDDSIDNKVLTRSDKARGKSDNVPSEEVVKKMKNYWRQLLNAKLITQRKFDNLTKAERGGLSELDKAGFIKRQLVETRQITKHVAQILDSRMNTKYDENDKLIREVKVITLKSKLVSDFRKDFQFYKVREINNYHHAHDAYLNAVVGTALIKKYPKLESEFVYGDYKVYDVRKMIAKSEQEIGKATAKYFFYSNIMNFFKTEITLANGEIRKRPLIETNGETGEIVWDKGRDFATVRKVLSMPQVNIVKKTEVQTGGFSKESILPKRNSDKLIARKKDWDPKKYGGFDSPTVAYSVLVVAKVEKGKSKKLKSVKELLGITIMERSSFEKNPIDFLEAKGYKEVKKDLIIKLPKYSLFELENGRKRMLASAGELQKGNELALPSKYVNFLYLASHYEKLKGSPEDNEQKQLFVEQHKHYLDEIIEQISEFSKRVILADANLDKVLSAYNKHRDKPIREQAENIIHLFTLTNLGAPAAFKYFDTTIDRKRYTSTKEVLDATLIHQSITGLYETRIDLSQLGGDGGGGGGGSGGMNPLQLLQPLPAEIKGTKLLAHWNSGATITCIPESFLEDEQPIKKTLIKTIHGEKQQNVYYVTFKVKGRKVEAEVIASPYEYILLSPTDVPWLTQQPLQLTILVPLQEYQEKILSKTALPEDQKQQLKTLFVKYDNLWQHWENQVGHRKIRPHNIATGDYPPRPQKQYPINPKAKPSIQIVIDDLLKQGVLTPQNSTMNTPVYPVPKPDGRWRMVLDYREVNKTIPLTAAQNQHSAGILATIVRQKYKTTLDLANGFWAHPITPESYWLTAFTWQGKQYCWTRLPQGFLNSPALFNADVVDLLKEIPNVQVYVDDIYLSHDDPKEHVQQLEKVFQILLQAGYVVSLKKSEIGQKTVEFLGFNITKEGRGLTDTFKTKLLNITPPKDLKQLQSILGLLNFARNFIPNFAELVQPLYNLIAPAKGKYIEWSEENTKQLNMVIEALNTASNLEERLPEQRLVIKVNTSPSAGYVRYYNETGKKPIMYLNYVFSKAELKFSMLEKLLTTMHKALIKAMDLAMGQEILVYSPIVSMTKIQKTPLPERKALPIRWITWMTYLEDPRIQFHYDKTLPELKHIPDVYTSSQSPVKHPSQYEGVFYTDGSAIKSPDPTKSNNAGMGIVHATYKPEYQVLNQWSIPLGNHTAQMAEIAAVEFACKKALKIPGPVLVITDSFYVAESANKELPYWKSNGFVNNKKKPLKHISKWKSIAECLSMKPDITIQHEKGISLQIPVFILKGNALADKLATQGSYVVNAGKRTADGSEFEKRTADGSEFESPKKKAKVE

SEQ ID NO: 1342 - protein, 2176 aa, synthetic construct
MPAAKRVKLDGGDKKYSIGLDIGTNSVGWAVITDEYKVPSKKFKVLGNTDRHSIKKNLIGALLFDSGETAEATRLKRTARRRYTRRKNRICYLQEIFSNEMAKVDDSFFHRLEESFLVEEDKKHERHPIFGNIVDEVAYHEKYPTIYHLRKKLVDSTDKADLRLIYLALAHMIKFRGHFLIEGDLNPDNSDVDKLFIQLVQTYNQLFEENPINASGVDAKAILSARLSKSRRLENLIAQLPGEKKNGLFGNLIALSLGLTPNFKSNFDLAEDAKLQLSKDTYDDDLDNLLAQIGDQYADLFLAAKNLSDAILLSDILRVNTEITKAPLSASMIKRYDEHHQDLTLLKALVRQQLPEKYKEIFFDQSKNGYAGYIDGGASQEEFYKFIKPILEKMDGTEELLVKLNREDLLRKQRTFDNGSIPHQIHLGELHAILRRQEDFYPFLKDNREKIEKILTFRIPYYVGPLARGNSRFAWMTRKSEETITPWNFEEVVDKGASAQSFIERMTNFDKNLPNEKVLPKHSLLYEYFTVYNELTKVKYVTEGMRKPAFLSGEQKKAIVDLLFKTNRKVTVKQLKEDYFKKIECFDSVEISGVEDRFNASLGTYHDLLKIIKDKDFLDNEENEDILEDIVLTLTLFEDREMIEERLKTYAHLFDDKVMKQLKRRRYTGWGRLSRKLINGIRDKQSGKTILDFLKSDGFANRNFMQLIHDDSLTFKEDIQKAQVSGQGDSLHEHIANLAGSPAIKKGILQTVKVVDELVKVMGRHKPENIVIEMARENQTTQKGQKNSRERMKRIEEGIKELGSQILKEHPVENTQLQNEKLYLYYLQNGRDMYVDQELDINRLSDYDVDHIVPQSFLKDDSIDNKVLTRSDKARGKSDNVPSEEVVKKMKNYWRQLLNAKLITQRKFDNLTKAERGGLSELDKAGFIKRQLVETRQITKHVAQILDSRMNTKYDENDKLIREVKVITLKSKLVSDFRKDFQFYKVREINNYHHAHDAYLNAVVGTALIKKYPKLESEFVYGDYKVYDVRKMIAKSEQEIGKATAKYFFYSNIMNFFKTEITLANGEIRKRPLIETNGETGEIVWDKGRDFATVRKVLSMPQVNIVKKTEVQTGGFSKESILPKRNSDKLIARKKDWDPKKYGGFDSPTVAYSVLVVAKVEKGKSKKLKSVKELLGITIMERSSFEKNPIDFLEAKGYKEVKKDLIIKLPKYSLFELENGRKRMLASAGELQKGNELALPSKYVNFLYLASHYEKLKGSPEDNEQKQLFVEQHKHYLDEIIEQISEFSKRVILADANLDKVLSAYNKHRDKPIREQAENIIHLFTLTNLGAPAAFKYFDTTIDRKRYTSTKEVLDATLIHQSITGLYETRIDLSQLGGDGGEAAAKGGGPAPGGMNPLQLLQPLPAEIKGTKLLAHWNSGATITCIPESFLEDEQPIKKTLIKTIHGEKQQNVYYVTFKVKGRKVEAEVIASPYEYILLSPTDVPWLTQQPLQLTILVPLQEYQEKILSKTALPEDQKQQLKTLFVKYDNLWQHWENQVGHRKIRPHNIATGDYPPRPQKQYPINPKAKPSIQIVIDDLLKQGVLTPQNSTMNTPVYPVPKPDGRWRMVLDYREVNKTIPLTAAQNQHSAGILATIVRQKYKTTLDLANGFWAHPITPESYWLTAFTWQGKQYCWTRLPQGFLNSPALFNADVVDLLKEIPNVQVYVDDIYLSHDDPKEHVQQLEKVFQILLQAGYVVSLKKSEIGQKTVEFLGFNITKEGRGLTDTFKTKLLNITPPKDLKQLQSILGLLNFARNFIPNFAELVQPLYNLIAPAKGKYIEWSEENTKQLNMVIEALNTASNLEERLPEQRLVIKVNTSPSAGYVRYYNETGKKPIMYLNYVFSKAELKFSMLEKLLTTMHKALIKAMDLAMGQEILVYSPIVSMTKIQKTPLPERKALPIRWITWMTYLEDPRIQFHYDKTLPELKHIPDVYTSSQSPVKHPSQYEGVFYTDGSAIKSPDPTKSNNAGMGIVHATYKPEYQVLNQWSIPLGNHTAQMAEIAAVEFACKKALKIPGPVLVITDSFYVAESANKELPYWKSNGFVNNKKKPLKHISKWKSIAECLSMKPDITIQHEKGISLQIPVFILKGNALADKLATQGSYVVNAGKRTADGSEFEKRTADGSEFESPKKKAKVE

SEQ ID NO: 1343 - protein, 2171 aa, synthetic construct
MPAAKRVKLDGGDKKYSIGLDIGTNSVGWAVITDEYKVPSKKFKVLGNTDRHSIKKNLIGALLFDSGETAEATRLKRTARRRYTRRKNRICYLQEIFSNEMAKVDDSFFHRLEESFLVEEDKKHERHPIFGNIVDEVAYHEKYPTIYHLRKKLVDSTDKADLRLIYLALAHMIKFRGHFLIEGDLNPDNSDVDKLFIQLVQTYNQLFEENPINASGVDAKAILSARLSKSRRLENLIAQLPGEKKNGLFGNLIALSLGLTPNFKSNFDLAEDAKLQLSKDTYDDDLDNLLAQIGDQYADLFLAAKNLSDAILLSDILRVNTEITKAPLSASMIKRYDEHHQDLTLLKALVRQQLPEKYKEIFFDQSKNGYAGYIDGGASQEEFYKFIKPILEKMDGTEELLVKLNREDLLRKQRTFDNGSIPHQIHLGELHAILRRQEDFYPFLKDNREKIEKILTFRIPYYVGPLARGNSRFAWMTRKSEETITPWNFEEVVDKGASAQSFIERMTNFDKNLPNEKVLPKHSLLYEYFTVYNELTKVKYVTEGMRKPAFLSGEQKKAIVDLLFKTNRKVTVKQLKEDYFKKIECFDSVEISGVEDRFNASLGTYHDLLKIIKDKDFLDNEENEDILEDIVLTLTLFEDREMIEERLKTYAHLFDDKVMKQLKRRRYTGWGRLSRKLINGIRDKQSGKTILDFLKSDGFANRNFMQLIHDDSLTFKEDIQKAQVSGQGDSLHEHIANLAGSPAIKKGILQTVKVVDELVKVMGRHKPENIVIEMARENQTTQKGQKNSRERMKRIEEGIKELGSQILKEHPVENTQLQNEKLYLYYLQNGRDMYVDQELDINRLSDYDVDHIVPQSFLKDDSIDNKVLTRSDKARGKSDNVPSEEVVKKMKNYWRQLLNAKLITQRKFDNLTKAERGGLSELDKAGFIKRQLVETRQITKHVAQILDSRMNTKYDENDKLIREVKVITLKSKLVSDFRKDFQFYKVREINNYHHAHDAYLNAVVGTALIKKYPKLESEFVYGDYKVYDVRKMIAKSEQEIGKATAKYFFYSNIMNFFKTEITLANGEIRKRPLIETNGETGEIVWDKGRDFATVRKVLSMPQVNIVKKTEVQTGGFSKESILPKRNSDKLIARKKDWDPKKYGGFDSPTVAYSVLVVAKVEKGKSKKLKSVKELLGITIMERSSFEKNPIDFLEAKGYKEVKKDLIIKLPKYSLFELENGRKRMLASAGELQKGNELALPSKYVNFLYLASHYEKLKGSPEDNEQKQLFVEQHKHYLDEIIEQISEFSKRVILADANLDKVLSAYNKHRDKPIREQAENIIHLFTLTNLGAPAAFKYFDTTIDRKRYTSTKEVLDATLIHQSITGLYETRIDLSQLGGDGGGGGGSSGGMNPLQLLQPLPAEIKGTKLLAHWNSGATITCIPESFLEDEQPIKKTLIKTIHGEKQQNVYYVTFKVKGRKVEAEVIASPYEYILLSPTDVPWLTQQPLQLTILVPLQEYQEKILSKTALPEDQKQQLKTLFVKYDNLWQHWENQVGHRKIRPHNIATGDYPPRPQKQYPINPKAKPSIQIVIDDLLKQGVLTPQNSTMNTPVYPVPKPDGRWRMVLDYREVNKTIPLTAAQNQHSAGILATIVRQKYKTTLDLANGFWAHPITPESYWLTAFTWQGKQYCWTRLPQGFLNSPALFNADVVDLLKEIPNVQVYVDDIYLSHDDPKEHVQQLEKVFQILLQAGYVVSLKKSEIGQKTVEFLGFNITKEGRGLTDTFKTKLLNITPPKDLKQLQSILGLLNFARNFIPNFAELVQPLYNLIAPAKGKYIEWSEENTKQLNMVIEALNTASNLEERLPEQRLVIKVNTSPSAGYVRYYNETGKKPIMYLNYVFSKAELKFSMLEKLLTTMHKALIKAMDLAMGQEILVYSPIVSMTKIQKTPLPERKALPIRWITWMTYLEDPRIQFHYDKTLPELKHIPDVYTSSQSPVKHPSQYEGVFYTDGSAIKSPDPTKSNNAGMGIVHATYKPEYQVLNQWSIPLGNHTAQMAEIAAVEFACKKALKIPGPVLVITDSFYVAESANKELPYWKSNGFVNNKKKPLKHISKWKSIAECLSMKPDITIQHEKGISLQIPVFILKGNALADKLATQGSYVVNAGKRTADGSEFEKRTADGSEFESPKKKAKVE

SEQ ID NO: 1344 - protein, 2174 aa, synthetic construct
MPAAKRVKLDGGDKKYSIGLDIGTNSVGWAVITDEYKVPSKKFKVLGNTDRHSIKKNLIGALLFDSGETAEATRLKRTARRRYTRRKNRICYLQEIFSNEMAKVDDSFFHRLEESFLVEEDKKHERHPIFGNIVDEVAYHEKYPTIYHLRKKLVDSTDKADLRLIYLALAHMIKFRGHFLIEGDLNPDNSDVDKLFIQLVQTYNQLFEENPINASGVDAKAILSARLSKSRRLENLIAQLPGEKKNGLFGNLIALSLGLTPNFKSNFDLAEDAKLQLSKDTYDDDLDNLLAQIGDQYADLFLAAKNLSDAILLSDILRVNTEITKAPLSASMIKRYDEHHQDLTLLKALVRQQLPEKYKEIFFDQSKNGYAGYIDGGASQEEFYKFIKPILEKMDGTEELLVKLNREDLLRKQRTFDNGSIPHQIHLGELHAILRRQEDFYPFLKDNREKIEKILTFRIPYYVGPLARGNSRFAWMTRKSEETITPWNFEEVVDKGASAQSFIERMTNFDKNLPNEKVLPKHSLLYEYFTVYNELTKVKYVTEGMRKPAFLSGEQKKAIVDLLFKTNRKVTVKQLKEDYFKKIECFDSVEISGVEDRFNASLGTYHDLLKIIKDKDFLDNEENEDILEDIVLTLTLFEDREMIEERLKTYAHLFDDKVMKQLKRRRYTGWGRLSRKLINGIRDKQSGKTILDFLKSDGFANRNFMQLIHDDSLTFKEDIQKAQVSGQGDSLHEHIANLAGSPAIKKGILQTVKVVDELVKVMGRHKPENIVIEMARENQTTQKGQKNSRERMKRIEEGIKELGSQILKEHPVENTQLQNEKLYLYYLQNGRDMYVDQELDINRLSDYDVDHIVPQSFLKDDSIDNKVLTRSDKARGKSDNVPSEEVVKKMKNYWRQLLNAKLITQRKFDNLTKAERGGLSELDKAGFIKRQLVETRQITKHVAQILDSRMNTKYDENDKLIREVKVITLKSKLVSDFRKDFQFYKVREINNYHHAHDAYLNAVVGTALIKKYPKLESEFVYGDYKVYDVRKMIAKSEQEIGKATAKYFFYSNIMNFFKTEITLANGEIRKRPLIETNGETGEIVWDKGRDFATVRKVLSMPQVNIVKKTEVQTGGFSKESILPKRNSDKLIARKKDWDPKKYGGFDSPTVAYSVLVVAKVEKGKSKKLKSVKELLGITIMERSSFEKNPIDFLEAKGYKEVKKDLIIKLPKYSLFELENGRKRMLASAGELQKGNELALPSKYVNFLYLASHYEKLKGSPEDNEQKQLFVEQHKHYLDEIIEQISEFSKRVILADANLDKVLSAYNKHRDKPIREQAENIIHLFTLTNLGAPAAFKYFDTTIDRKRYTSTKEVLDATLIHQSITGLYETRIDLSQLGGDGGGSSGSSGSSGGMNPLQLLQPLPAEIKGTKLLAHWNSGATITCIPESFLEDEQPIKKTLIKTIHGEKQQNVYYVTFKVKGRKVEAEVIASPYEYILLSPTDVPWLTQQPLQLTILVPLQEYQEKILSKTALPEDQKQQLKTLFVKYDNLWQHWENQVGHRKIRPHNIATGDYPPRPQKQYPINPKAKPSIQIVIDDLLKQGVLTPQNSTMNTPVYPVPKPDGRWRMVLDYREVNKTIPLTAAQNQHSAGILATIVRQKYKTTLDLANGFWAHPITPESYWLTAFTWQGKQYCWTRLPQGFLNSPALFNADVVDLLKEIPNVQVYVDDIYLSHDDPKEHVQQLEKVFQILLQAGYVVSLKKSEIGQKTVEFLGFNITKEGRGLTDTFKTKLLNITPPKDLKQLQSILGLLNFARNFIPNFAELVQPLYNLIAPAKGKYIEWSEENTKQLNMVIEALNTASNLEERLPEQRLVIKVNTSPSAGYVRYYNETGKKPIMYLNYVFSKAELKFSMLEKLLTTMHKALIKAMDLAMGQEILVYSPIVSMTKIQKTPLPERKALPIRWITWMTYLEDPRIQFHYDKTLPELKHIPDVYTSSQSPVKHPSQYEGVFYTDGSAIKSPDPTKSNNAGMGIVHATYKPEYQVLNQWSIPLGNHTAQMAEIAAVEFACKKALKIPGPVLVITDSFYVAESANKELPYWKSNGFVNNKKKPLKHISKWKSIAECLSMKPDITIQHEKGISLQIPVFILKGNALADKLATQGSYVVNAGKRTADGSEFEKRTADGSEFESPKKKAKVE

SEQ ID NO: 1345 - protein, 2171 aa, synthetic construct
MPAAKRVKLDGGDKKYSIGLDIGTNSVGWAVITDEYKVPSKKFKVLGNTDRHSIKKNLIGALLFDSGETAEATRLKRTARRRYTRRKNRICYLQEIFSNEMAKVDDSFFHRLEESFLVEEDKKHERHPIFGNIVDEVAYHEKYPTIYHLRKKLVDSTDKADLRLIYLALAHMIKFRGHFLIEGDLNPDNSDVDKLFIQLVQTYNQLFEENPINASGVDAKAILSARLSKSRRLENLIAQLPGEKKNGLFGNLIALSLGLTPNFKSNFDLAEDAKLQLSKDTYDDDLDNLLAQIGDQYADLFLAAKNLSDAILLSDILRVNTEITKAPLSASMIKRYDEHHQDLTLLKALVRQQLPEKYKEIFFDQSKNGYAGYIDGGASQEEFYKFIKPILEKMDGTEELLVKLNREDLLRKQRTFDNGSIPHQIHLGELHAILRRQEDFYPFLKDNREKIEKILTFRIPYYVGPLARGNSRFAWMTRKSEETITPWNFEEVVDKGASAQSFIERMTNFDKNLPNEKVLPKHSLLYEYFTVYNELTKVKYVTEGMRKPAFLSGEQKKAIVDLLFKTNRKVTVKQLKEDYFKKIECFDSVEISGVEDRFNASLGTYHDLLKIIKDKDFLDNEENEDILEDIVLTLTLFEDREMIEERLKTYAHLFDDKVMKQLKRRRYTGWGRLSRKLINGIRDKQSGKTILDFLKSDGFANRNFMQLIHDDSLTFKEDIQKAQVSGQGDSLHEHIANLAGSPAIKKGILQTVKVVDELVKVMGRHKPENIVIEMARENQTTQKGQKNSRERMKRIEEGIKELGSQILKEHPVENTQLQNEKLYLYYLQNGRDMYVDQELDINRLSDYDVDHIVPQSFLKDDSIDNKVLTRSDKARGKSDNVPSEEVVKKMKNYWRQLLNAKLITQRKFDNLTKAERGGLSELDKAGFIKRQLVETRQITKHVAQILDSRMNTKYDENDKLIREVKVITLKSKLVSDFRKDFQFYKVREINNYHHAHDAYLNAVVGTALIKKYPKLESEFVYGDYKVYDVRKMIAKSEQEIGKATAKYFFYSNIMNFFKTEITLANGEIRKRPLIETNGETGEIVWDKGRDFATVRKVLSMPQVNIVKKTEVQTGGFSKESILPKRNSDKLIARKKDWDPKKYGGFDSPTVAYSVLVVAKVEKGKSKKLKSVKELLGITIMERSSFEKNPIDFLEAKGYKEVKKDLIIKLPKYSLFELENGRKRMLASAGELQKGNELALPSKYVNFLYLASHYEKLKGSPEDNEQKQLFVEQHKHYLDEIIEQISEFSKRVILADANLDKVLSAYNKHRDKPIREQAENIIHLFTLTNLGAPAAFKYFDTTIDRKRYTSTKEVLDATLIHQSITGLYETRIDLSQLGGDGGPAPGGGGGMNPLQLLQPLPAEIKGTKLLAHWNSGATITCIPESFLEDEQPIKKTLIKTIHGEKQQNVYYVTFKVKGRKVEAEVIASPYEYILLSPTDVPWLTQQPLQLTILVPLQEYQEKILSKTALPEDQKQQLKTLFVKYDNLWQHWENQVGHRKIRPHNIATGDYPPRPQKQYPINPKAKPSIQIVIDDLLKQGVLTPQNSTMNTPVYPVPKPDGRWRMVLDYREVNKTIPLTAAQNQHSAGILATIVRQKYKTTLDLANGFWAHPITPESYWLTAFTWQGKQYCWTRLPQGFLNSPALFNADVVDLLKEIPNVQVYVDDIYLSHDDPKEHVQQLEKVFQILLQAGYVVSLKKSEIGQKTVEFLGFNITKEGRGLTDTFKTKLLNITPPKDLKQLQSILGLLNFARNFIPNFAELVQPLYNLIAPAKGKYIEWSEENTKQLNMVIEALNTASNLEERLPEQRLVIKVNTSPSAGYVRYYNETGKKPIMYLNYVFSKAELKFSMLEKLLTTMHKALIKAMDLAMGQEILVYSPIVSMTKIQKTPLPERKALPIRWITWMTYLEDPRIQFHYDKTLPELKHIPDVYTSSQSPVKHPSQYEGVFYTDGSAIKSPDPTKSNNAGMGIVHATYKPEYQVLNQWSIPLGNHTAQMAEIAAVEFACKKALKIPGPVLVITDSFYVAESANKELPYWKSNGFVNNKKKPLKHISKWKSIAECLSMKPDITIQHEKGISLQIPVFILKGNALADKLATQGSYVVNAGKRTADGSEFEKRTADGSEFESPKKKAKVE

SEQ ID NO: 1346 - protein, 2195 aa, synthetic construct
MPAAKRVKLDGGDKKYSIGLDIGTNSVGWAVITDEYKVPSKKFKVLGNTDRHSIKKNLIGALLFDSGETAEATRLKRTARRRYTRRKNRICYLQEIFSNEMAKVDDSFFHRLEESFLVEEDKKHERHPIFGNIVDEVAYHEKYPTIYHLRKKLVDSTDKADLRLIYLALAHMIKFRGHFLIEGDLNPDNSDVDKLFIQLVQTYNQLFEENPINASGVDAKAILSARLSKSRRLENLIAQLPGEKKNGLFGNLIALSLGLTPNFKSNFDLAEDAKLQLSKDTYDDDLDNLLAQIGDQYADLFLAAKNLSDAILLSDILRVNTEITKAPLSASMIKRYDEHHQDLTLLKALVRQQLPEKYKEIFFDQSKNGYAGYIDGGASQEEFYKFIKPILEKMDGTEELLVKLNREDLLRKQRTFDNGSIPHQIHLGELHAILRRQEDFYPFLKDNREKIEKILTFRIPYYVGPLARGNSRFAWMTRKSEETITPWNFEEVVDKGASAQSFIERMTNFDKNLPNEKVLPKHSLLYEYFTVYNELTKVKYVTEGMRKPAFLSGEQKKAIVDLLFKTNRKVTVKQLKEDYFKKIECFDSVEISGVEDRFNASLGTYHDLLKIIKDKDFLDNEENEDILEDIVLTLTLFEDREMIEERLKTYAHLFDDKVMKQLKRRRYTGWGRLSRKLINGIRDKQSGKTILDFLKSDGFANRNFMQLIHDDSLTFKEDIQKAQVSGQGDSLHEHIANLAGSPAIKKGILQTVKVVDELVKVMGRHKPENIVIEMARENQTTQKGQKNSRERMKRIEEGIKELGSQILKEHPVENTQLQNEKLYLYYLQNGRDMYVDQELDINRLSDYDVDHIVPQSFLKDDSIDNKVLTRSDKARGKSDNVPSEEVVKKMKNYWRQLLNAKLITQRKFDNLTKAERGGLSELDKAGFIKRQLVETRQITKHVAQILDSRMNTKYDENDKLIREVKVITLKSKLVSDFRKDFQFYKVREINNYHHAHDAYLNAVVGTALIKKYPKLESEFVYGDYKVYDVRKMIAKSEQEIGKATAKYFFYSNIMNFFKTEITLANGEIRKRPLIETNGETGEIVWDKGRDFATVRKVLSMPQVNIVKKTEVQTGGFSKESILPKRNSDKLIARKKDWDPKKYGGFDSPTVAYSVLVVAKVEKGKSKKLKSVKELLGITIMERSSFEKNPIDFLEAKGYKEVKKDLIIKLPKYSLFELENGRKRMLASAGELQKGNELALPSKYVNFLYLASHYEKLKGSPEDNEQKQLFVEQHKHYLDEIIEQISEFSKRVILADANLDKVLSAYNKHRDKPIREQAENIIHLFTLTNLGAPAAFKYFDTTIDRKRYTSTKEVLDATLIHQSITGLYETRIDLSQLGGDGGEAAAKEAAAKEAAAKEAAAKEAAAKEAAAKGGMNPLQLLQPLPAEIKGTKLLAHWNSGATITCIPESFLEDEQPIKKTLIKTIHGEKQQNVYYVTFKVKGRKVEAEVIASPYEYILLSPTDVPWLTQQPLQLTILVPLQEYQEKILSKTALPEDQKQQLKTLFVKYDNLWQHWENQVGHRKIRPHNIATGDYPPRPQKQYPINPKAKPSIQIVIDDLLKQGVLTPQNSTMNTPVYPVPKPDGRWRMVLDYREVNKTIPLTAAQNQHSAGILATIVRQKYKTTLDLANGFWAHPITPESYWLTAFTWQGKQYCWTRLPQGFLNSPALFNADVVDLLKEIPNVQVYVDDIYLSHDDPKEHVQQLEKVFQILLQAGYVVSLKKSEIGQKTVEFLGFNITKEGRGLTDTFKTKLLNITPPKDLKQLQSILGKLNFARNFIPNFAELVQPLYNLIAPAKGKYIEWSEENTKQLNMVIEALNTASNLEERLPEQRLVIKVNTSPSAGYVRYYNETGKKPIMYLNYVFSKAELKFSMLEKLLTTMHKALIKAMDLAMGQEILVYSPIVSMTKIQKTPLPERKALPIRWITWMTYLEDPRIQFHYDKTLPELKHIPDVYTSSQSPVKHPSQYEGVFYTDGSAIKSPDPTKSNNAGMGIVHATYKPEYQVLNQWSIPLGNHTAQMAEIAAVEFACKKALKIPGPVLVITDSFYVAESANKELPYWKSNGFVNNKKKPLKHISKWKSIAECLSMKPDITIQHEKGISLQIPVFILKGNALADKLATQGSYVVNAGKRTADGSEFEKRTADGSEFESPKKKAKVE

SEQ ID NO: 1347 - protein, 2185 aa, synthetic construct
MPAAKRVKLDGGDKKYSIGLDIGTNSVGWAVITDEYKVPSKKFKVLGNTDRHSIKKNLIGALLFDSGETAEATRLKRTARRRYTRRKNRICYLQEIFSNEMAKVDDSFFHRLEESFLVEEDKKHERHPIFGNIVDEVAYHEKYPTIYHLRKKLVDSTDKADLRLIYLALAHMIKFRGHFLIEGDLNPDNSDVDKLFIQLVQTYNQLFEENPINASGVDAKAILSARLSKSRRLENLIAQLPGEKKNGLFGNLIALSLGLTPNFKSNFDLAEDAKLQLSKDTYDDDLDNLLAQIGDQYADLFLAAKNLSDAILLSDILRVNTEITKAPLSASMIKRYDEHHQDLTLLKALVRQQLPEKYKEIFFDQSKNGYAGYIDGGASQEEFYKFIKPILEKMDGTEELLVKLNREDLLRKQRTFDNGSIPHQIHLGELHAILRRQEDFYPFLKDNREKIEKILTFRIPYYVGPLARGNSRFAWMTRKSEETITPWNFEEVVDKGASAQSFIERMTNFDKNLPNEKVLPKHSLLYEYFTVYNELTKVKYVTEGMRKPAFLSGEQKKAIVDLLFKTNRKVTVKQLKEDYFKKIECFDSVEISGVEDRFNASLGTYHDLLKIIKDKDFLDNEENEDILEDIVLTLTLFEDREMIEERLKTYAHLFDDKVMKQLKRRRYTGWGRLSRKLINGIRDKQSGKTILDFLKSDGFANRNFMQLIHDDSLTFKEDIQKAQVSGQGDSLHEHIANLAGSPAIKKGILQTVKVVDELVKVMGRHKPENIVIEMARENQTTQKGQKNSRERMKRIEEGIKELGSQILKEHPVENTQLQNEKLYLYYLQNGRDMYVDQELDINRLSDYDVDHIVPQSFLKDDSIDNKVLTRSDKARGKSDNVPSEEVVKKMKNYWRQLLNAKLITQRKFDNLTKAERGGLSELDKAGFIKRQLVETRQITKHVAQILDSRMNTKYDENDKLIREVKVITLKSKLVSDFRKDFQFYKVREINNYHHAHDAYLNAVVGTALIKKYPKLESEFVYGDYKVYDVRKMIAKSEQEIGKATAKYFFYSNIMNFFKTEITLANGEIRKRPLIETNGETGEIVWDKGRDFATVRKVLSMPQVNIVKKTEVQTGGFSKESILPKRNSDKLIARKKDWDPKKYGGFDSPTVAYSVLVVAKVEKGKSKKLKSVKELLGITIMERSSFEKNPIDFLEAKGYKEVKKDLIIKLPKYSLFELENGRKRMLASAGELQKGNELALPSKYVNFLYLASHYEKLKGSPEDNEQKQLFVEQHKHYLDEIIEQISEFSKRVILADANLDKVLSAYNKHRDKPIREQAENIIHLFTLTNLGAPAAFKYFDTTIDRKRYTSTKEVLDATLIHQSITGLYETRIDLSQLGGDGGEAAAKEAAAKEAAAKEAAAKGGMNPLQLLQPLPAEIKGTKLLAHWNSGATITCIPESFLEDEQPIKKTLIKTIHGEKQQNVYYVTFKVKGRKVEAEVIASPYEYILLSPTDVPWLTQQPLQLTILVPLQEYQEKILSKTALPEDQKQQLKTLFVKYDNLWQHWENQVGHRKIRPHNIATGDYPPRPQKQYPINPKAKPSIQIVIDDLLKQGVLTPQNSTMNTPVYPVPKPDGRWRMVLDYREVNKTIPLTAAQNQHSAGILATIVRQKYKTTLDLANGFWAHPITPESYWLTAFTWQGKQYCWTRLPQGFLNSPALFNADVVDLLKEIPNVQVYVDDIYLSHDDPKEHVQQLEKVFQILLQAGYVVSLKKSEIGQKTVEFLGFNITKEGRGLTDTFKTKLLNITPPKDLKQLQSILGKLNFARNFIPNFAELVQPLYNLIAPAKGKYIEWSEENTKQLNMVIEALNTASNLEERLPEQRLVIKVNTSPSAGYVRYYNETGKKPIMYLNYVFSKAELKFSMLEKLLTTMHKALIKAMDLAMGQEILVYSPIVSMTKIQKTPLPERKALPIRWITWMTYLEDPRIQFHYDKTLPELKHIPDVYTSSQSPVKHPSQYEGVFYTDGSAIKSPDPTKSNNAGMGIVHATYKPEYQVLNQWSIPLGNHTAQMAEIAAVEFACKKALKIPGPVLVITDSFYVAESANKELPYWKSNGFVNNKKKPLKHISKWKSIAECLSMKPDITIQHEKGISLQIPVFILKGNALADKLATQGSYVVNAGKRTADGSEFEKRTADGSEFESPKKKAKVE

SEQ ID NO: 1348 - protein, 2176 aa, synthetic construct
MPAAKRVKLDGGDKKYSIGLDIGTNSVGWAVITDEYKVPSKKFKVLGNTDRHSIKKNLIGALLFDSGETAEATRLKRTARRRYTRRKNRICYLQEIFSNEMAKVDDSFFHRLEESFLVEEDKKHERHPIFGNIVDEVAYHEKYPTIYHLRKKLVDSTDKADLRLIYLALAHMIKFRGHFLIEGDLNPDNSDVDKLFIQLVQTYNQLFEENPINASGVDAKAILSARLSKSRRLENLIAQLPGEKKNGLFGNLIALSLGLTPNFKSNFDLAEDAKLQLSKDTYDDDLDNLLAQIGDQYADLFLAAKNLSDAILLSDILRVNTEITKAPLSASMIKRYDEHHQDLTLLKALVRQQLPEKYKEIFFDQSKNGYAGYIDGGASQEEFYKFIKPILEKMDGTEELLVKLNREDLLRKQRTFDNGSIPHQIHLGELHAILRRQEDFYPFLKDNREKIEKILTFRIPYYVGPLARGNSRFAWMTRKSEETITPWNFEEVVDKGASAQSFIERMTNFDKNLPNEKVLPKHSLLYEYFTVYNELTKVKYVTEGMRKPAFLSGEQKKAIVDLLFKTNRKVTVKQLKEDYFKKIECFDSVEISGVEDRFNASLGTYHDLLKIIKDKDFLDNEENEDILEDIVLTLTLFEDREMIEERLKTYAHLFDDKVMKQLKRRRYTGWGRLSRKLINGIRDKQSGKTILDFLKSDGFANRNFMQLIHDDSLTFKEDIQKAQVSGQGDSLHEHIANLAGSPAIKKGILQTVKVVDELVKVMGRHKPENIVIEMARENQTTQKGQKNSRERMKRIEEGIKELGSQILKEHPVENTQLQNEKLYLYYLQNGRDMYVDQELDINRLSDYDVDHIVPQSFLKDDSIDNKVLTRSDKARGKSDNVPSEEVVKKMKNYWRQLLNAKLITQRKFDNLTKAERGGLSELDKAGFIKRQLVETRQITKHVAQILDSRMNTKYDENDKLIREVKVITLKSKLVSDFRKDFQFYKVREINNYHHAHDAYLNAVVGTALIKKYPKLESEFVYGDYKVYDVRKMIAKSEQEIGKATAKYFFYSNIMNFFKTEITLANGEIRKRPLIETNGETGEIVWDKGRDFATVRKVLSMPQVNIVKKTEVQTGGFSKESILPKRNSDKLIARKKDWDPKKYGGFDSPTVAYSVLVVAKVEKGKSKKLKSVKELLGITIMERSSFEKNPIDFLEAKGYKEVKKDLIIKLPKYSLFELENGRKRMLASAGELQKGNELALPSKYVNFLYLASHYEKLKGSPEDNEQKQLFVEQHKHYLDEIIEQISEFSKRVILADANLDKVLSAYNKHRDKPIREQAENIIHLFTLTNLGAPAAFKYFDTTIDRKRYTSTKEVLDATLIHQSITGLYETRIDLSQLGGDGGGGSPAPEAAAKGGMNPLQLLQPLPAEIKGTKLLAHWNSGATITCIPESFLEDEQPIKKTLIKTIHGEKQQNVYYVTFKVKGRKVEAEVIASPYEYILLSPTDVPWLTQQPLQLTILVPLQEYQEKILSKTALPEDQKQQLKTLFVKYDNLWQHWENQVGHRKIRPHNIATGDYPPRPQKQYPINPKAKPSIQIVIDDLLKQGVLTPQNSTMNTPVYPVPKPDGRWRMVLDYREVNKTIPLTAAQNQHSAGILATIVRQKYKTTLDLANGFWAHPITPESYWLTAFTWQGKQYCWTRLPQGFLNSPALFNADVVDLLKEIPNVQVYVDDIYLSHDDPKEHVQQLEKVFQILLQAGYVVSLKKSEIGQKTVEFLGFNITKEGRGLTDTFKTKLLNITPPKDLKQLQSILGKLNFARNFIPNFAELVQPLYNLIAPAKGKYIEWSEENTKQLNMVIEALNTASNLEERLPEQRLVIKVNTSPSAGYVRYYNETGKKPIMYLNYVFSKAELKFSMLEKLLTTMHKALIKAMDLAMGQEILVYSPIVSMTKIQKTPLPERKALPIRWITWMTYLEDPRIQFHYDKTLPELKHIPDVYTSSQSPVKHPSQYEGVFYTDGSAIKSPDPTKSNNAGMGIVHATYKPEYQVLNQWSIPLGNHTAQMAEIAAVEFACKKALKIPGPVLVITDSFYVAESANKELPYWKSNGFVNNKKKPLKHISKWKSIAECLSMKPDITIQHEKGISLQIPVFILKGNALADKLATQGSYVVNAGKRTADGSEFEKRTADGSEFESPKKKAKVE

SEQ ID NO: 1349 - protein, 2177 aa, synthetic construct
MPAAKRVKLDGGDKKYSIGLDIGTNSVGWAVITDEYKVPSKKFKVLGNTDRHSIKKNLIGALLFDSGETAEATRLKRTARRRYTRRKNRICYLQEIFSNEMAKVDDSFFHRLEESFLVEEDKKHERHPIFGNIVDEVAYHEKYPTIYHLRKKLVDSTDKADLRLIYLALAHMIKFRGHFLIEGDLNPDNSDVDKLFIQLVQTYNQLFEENPINASGVDAKAILSARLSKSRRLENLIAQLPGEKKNGLFGNLIALSLGLTPNFKSNFDLAEDAKLQLSKDTYDDDLDNLLAQIGDQYADLFLAAKNLSDAILLSDILRVNTEITKAPLSASMIKRYDEHHQDLTLLKALVRQQLPEKYKEIFFDQSKNGYAGYIDGGASQEEFYKFIKPILEKMDGTEELLVKLNREDLLRKQRTFDNGSIPHQIHLGELHAILRRQEDFYPFLKDNREKIEKILTFRIPYYVGPLARGNSRFAWMTRKSEETITPWNFEEVVDKGASAQSFIERMTNFDKNLPNEKVLPKHSLLYEYFTVYNELTKVKYVTEGMRKPAFLSGEQKKAIVDLLFKTNRKVTVKQLKEDYFKKIECFDSVEISGVEDRFNASLGTYHDLLKIIKDKDFLDNEENEDILEDIVLTLTLFEDREMIEERLKTYAHLFDDKVMKQLKRRRYTGWGRLSRKLINGIRDKQSGKTILDFLKSDGFANRNFMQLIHDDSLTFKEDIQKAQVSGQGDSLHEHIANLAGSPAIKKGILQTVKVVDELVKVMGRHKPENIVIEMARENQTTQKGQKNSRERMKRIEEGIKELGSQILKEHPVENTQLQNEKLYLYYLQNGRDMYVDQELDINRLSDYDVDHIVPQSFLKDDSIDNKVLTRSDKARGKSDNVPSEEVVKKMKNYWRQLLNAKLITQRKFDNLTKAERGGLSELDKAGFIKRQLVETRQITKHVAQILDSRMNTKYDENDKLIREVKVITLKSKLVSDFRKDFQFYKVREINNYHHAHDAYLNAVVGTALIKKYPKLESEFVYGDYKVYDVRKMIAKSEQEIGKATAKYFFYSNIMNFFKTEITLANGEIRKRPLIETNGETGEIVWDKGRDFATVRKVLSMPQVNIVKKTEVQTGGFSKESILPKRNSDKLIARKKDWDPKKYGGFDSPTVAYSVLVVAKVEKGKSKKLKSVKELLGITIMERSSFEKNPIDFLEAKGYKEVKKDLIIKLPKYSLFELENGRKRMLASAGELQKGNELALPSKYVNFLYLASHYEKLKGSPEDNEQKQLFVEQHKHYLDEIIEQISEFSKRVILADANLDKVLSAYNKHRDKPIREQAENIIHLFTLTNLGAPAAFKYFDTTIDRKRYTSTKEVLDATLIHQSITGLYETRIDLSQLGGDGGGSAGSAAGSGEFGGMNPLQLLQPLPAEIKGTKLLAHWNSGATITCIPESFLEDEQPIKKTLIKTIHGEKQQNVYYVTFKVKGRKVEAEVIASPYEYILLSPTDVPWLTQQPLQLTILVPLQEYQEKILSKTALPEDQKQQLKTLFVKYDNLWQHWENQVGHRKIRPHNIATGDYPPRPQKQYPINPKAKPSIQIVIDDLLKQGVLTPQNSTMNTPVYPVPKPDGRWRMVLDYREVNKTIPLTAAQNQHSAGILATIVRQKYKTTLDLANGFWAHPITPESYWLTAFTWQGKQYCWTRLPQGFLNSPALFNADVVDLLKEIPNVQVYVDDIYLSHDDPKEHVQQLEKVFQILLQAGYVVSLKKSEIGQKTVEFLGFNITKEGRGLTDTFKTKLLNITPPKDLKQLQSILGKLNFARNFIPNFAELVQPLYNLIAPAKGKYIEWSEENTKQLNMVIEALNTASNLEERLPEQRLVIKVNTSPSAGYVRYYNETGKKPIMYLNYVFSKAELKFSMLEKLLTTMHKALIKAMDLAMGQEILVYSPIVSMTKIQKTPLPERKALPIRWITWMTYLEDPRIQFHYDKTLPELKHIPDVYTSSQSPVKHPSQYEGVFYTDGSAIKSPDPTKSNNAGMGIVHATYKPEYQVLNQWSIPLGNHTAQMAEIAAVEFACKKALKIPGPVLVITDSFYVAESANKELPYWKSNGFVNNKKKPLKHISKWKSIAECLSMKPDITIQHEKGISLQIPVFILKGNALADKLATQGSYVVNAGKRTADGSEFEKRTADGSEFESPKKKAKVE

SEQ ID NO: 1350 - protein, 2173 aa, synthetic construct
MPAAKRVKLDGGDKKYSIGLDIGTNSVGWAVITDEYKVPSKKFKVLGNTDRHSIKKNLIGALLFDSGETAEATRLKRTARRRYTRRKNRICYLQEIFSNEMAKVDDSFFHRLEESFLVEEDKKHERHPIFGNIVDEVAYHEKYPTIYHLRKKLVDSTDKADLRLIYLALAHMIKFRGHFLIEGDLNPDNSDVDKLFIQLVQTYNQLFEENPINASGVDAKAILSARLSKSRRLENLIAQLPGEKKNGLFGNLIALSLGLTPNFKSNFDLAEDAKLQLSKDTYDDDLDNLLAQIGDQYADLFLAAKNLSDAILLSDILRVNTEITKAPLSASMIKRYDEHHQDLTLLKALVRQQLPEKYKEIFFDQSKNGYAGYIDGGASQEEFYKFIKPILEKMDGTEELLVKLNREDLLRKQRTFDNGSIPHQIHLGELHAILRRQEDFYPFLKDNREKIEKILTFRIPYYVGPLARGNSRFAWMTRKSEETITPWNFEEVVDKGASAQSFIERMTNFDKNLPNEKVLPKHSLLYEYFTVYNELTKVKYVTEGMRKPAFLSGEQKKAIVDLLFKTNRKVTVKQLKEDYFKKIECFDSVEISGVEDRFNASLGTYHDLLKIIKDKDFLDNEENEDILEDIVLTLTLFEDREMIEERLKTYAHLFDDKVMKQLKRRRYTGWGRLSRKLINGIRDKQSGKTILDFLKSDGFANRNFMQLIHDDSLTFKEDIQKAQVSGQGDSLHEHIANLAGSPAIKKGILQTVKVVDELVKVMGRHKPENIVIEMARENQTTQKGQKNSRERMKRIEEGIKELGSQILKEHPVENTQLQNEKLYLYYLQNGRDMYVDQELDINRLSDYDVDHIVPQSFLKDDSIDNKVLTRSDKARGKSDNVPSEEVVKKMKNYWRQLLNAKLITQRKFDNLTKAERGGLSELDKAGFIKRQLVETRQITKHVAQILDSRMNTKYDENDKLIREVKVITLKSKLVSDFRKDFQFYKVREINNYHHAHDAYLNAVVGTALIKKYPKLESEFVYGDYKVYDVRKMIAKSEQEIGKATAKYFFYSNIMNFFKTEITLANGEIRKRPLIETNGETGEIVWDKGRDFATVRKVLSMPQVNIVKKTEVQTGGFSKESILPKRNSDKLIARKKDWDPKKYGGFDSPTVAYSVLVVAKVEKGKSKKLKSVKELLGITIMERSSFEKNPIDFLEAKGYKEVKKDLIIKLPKYSLFELENGRKRMLASAGELQKGNELALPSKYVNFLYLASHYEKLKGSPEDNEQKQLFVEQHKHYLDEIIEQISEFSKRVILADANLDKVLSAYNKHRDKPIREQAENIIHLFTLTNLGAPAAFKYFDTTIDRKRYTSTKEVLDATLIHQSITGLYETRIDLSQLGGDGGGGGEAAAKGGMNPLQLLQPLPAEIKGTKLLAHWNSGATITCIPESFLEDEQPIKKTLIKTIHGEKQQNVYYVTFKVKGRKVEAEVIASPYEYILLSPTDVPWLTQQPLQLTILVPLQEYQEKILSKTALPEDQKQQLKTLFVKYDNLWQHWENQVGHRKIRPHNIATGDYPPRPQKQYPINPKAKPSIQIVIDDLLKQGVLTPQNSTMNTPVYPVPKPDGRWRMVLDYREVNKTIPLTAAQNQHSAGILATIVRQKYKTTLDLANGFWAHPITPESYWLTAFTWQGKQYCWTRLPQGFLNSPALFNADVVDLLKEIPNVQVYVDDIYLSHDDPKEHVQQLEKVFQILLQAGYVVSLKKSEIGQKTVEFLGFNITKEGRGLTDTFKTKLLNITPPKDLKQLQSILGKLNFARNFIPNFAELVQPLYNLIAPAKGKYIEWSEENTKQLNMVIEALNTASNLEERLPEQRLVIKVNTSPSAGYVRYYNETGKKPIMYLNYVFSKAELKFSMLEKLLTTMHKALIKAMDLAMGQEILVYSPIVSMTKIQKTPLPERKALPIRWITWMTYLEDPRIQFHYDKTLPELKHIPDVYTSSQSPVKHPSQYEGVFYTDGSAIKSPDPTKSNNAGMGIVHATYKPEYQVLNQWSIPLGNHTAQMAEIAAVEFACKKALKIPGPVLVITDSFYVAESANKELPYWKSNGFVNNKKKPLKHISKWKSIAECLSMKPDITIQHEKGISLQIPVFILKGNALADKLATQGSYVVNAGKRTADGSEFEKRTADGSEFESPKKKAKVE

SEQ ID NO: 1351 - protein, 2176 aa, synthetic construct
MPAAKRVKLDGGDKKYSIGLDIGTNSVGWAVITDEYKVPSKKFKVLGNTDRHSIKKNLIGALLFDSGETAEATRLKRTARRRYTRRKNRICYLQEIFSNEMAKVDDSFFHRLEESFLVEEDKKHERHPIFGNIVDEVAYHEKYPTIYHLRKKLVDSTDKADLRLIYLALAHMIKFRGHFLIEGDLNPDNSDVDKLFIQLVQTYNQLFEENPINASGVDAKAILSARLSKSRRLENLIAQLPGEKKNGLFGNLIALSLGLTPNFKSNFDLAEDAKLQLSKDTYDDDLDNLLAQIGDQYADLFLAAKNLSDAILLSDILRVNTEITKAPLSASMIKRYDEHHQDLTLLKALVRQQLPEKYKEIFFDQSKNGYAGYIDGGASQEEFYKFIKPILEKMDGTEELLVKLNREDLLRKQRTFDNGSIPHQIHLGELHAILRRQEDFYPFLKDNREKIEKILTFRIPYYVGPLARGNSRFAWMTRKSEETITPWNFEEVVDKGASAQSFIERMTNFDKNLPNEKVLPKHSLLYEYFTVYNELTKVKYVTEGMRKPAFLSGEQKKAIVDLLFKTNRKVTVKQLKEDYFKKIECFDSVEISGVEDRFNASLGTYHDLLKIIKDKDFLDNEENEDILEDIVLTLTLFEDREMIEERLKTYAHLFDDKVMKQLKRRRYTGWGRLSRKLINGIRDKQSGKTILDFLKSDGFANRNFMQLIHDDSLTFKEDIQKAQVSGQGDSLHEHIANLAGSPAIKKGILQTVKVVDELVKVMGRHKPENIVIEMARENQTTQKGQKNSRERMKRIEEGIKELGSQILKEHPVENTQLQNEKLYLYYLQNGRDMYVDQELDINRLSDYDVDHIVPQSFLKDDSIDNKVLTRSDKARGKSDNVPSEEVVKKMKNYWRQLLNAKLITQRKFDNLTKAERGGLSELDKAGFIKRQLVETRQITKHVAQILDSRMNTKYDENDKLIREVKVITLKSKLVSDFRKDFQFYKVREINNYHHAHDAYLNAVVGTALIKKYPKLESEFVYGDYKVYDVRKMIAKSEQEIGKATAKYFFYSNIMNFFKTEITLANGEIRKRPLIETNGETGEIVWDKGRDFATVRKVLSMPQVNIVKKTEVQTGGFSKESILPKRNSDKLIARKKDWDPKKYGGFDSPTVAYSVLVVAKVEKGKSKKLKSVKELLGITIMERSSFEKNPIDFLEAKGYKEVKKDLIIKLPKYSLFELENGRKRMLASAGELQKGNELALPSKYVNFLYLASHYEKLKGSPEDNEQKQLFVEQHKHYLDEIIEQISEFSKRVILADANLDKVLSAYNKHRDKPIREQAENIIHLFTLTNLGAPAAFKYFDTTIDRKRYTSTKEVLDATLIHQSITGLYETRIDLSQLGGDGGGSSGGSEAAAKGGMNPLQLLQPLPAEIKGTKLLAHWNSGATITCIPESFLEDEQPIKKTLIKTIHGEKQQNVYYVTFKVKGRKVEAEVIASPYEYILLSPTDVPWLTQQPLQLTILVPLQEYQEKILSKTALPEDQKQQLKTLFVKYDNLWQHWENQVGHRKIRPHNIATGDYPPRPQKQYPINPKAKPSIQIVIDDLLKQGVLTPQNSTMNTPVYPVPKPDGRWRMVLDYREVNKTIPLTAAQNQHSAGILATIVRQKYKTTLDLANGFWAHPITPESYWLTAFTWQGKQYCWTRLPQGFLNSPALFNADVVDLLKEIPNVQVYVDDIYLSHDDPKEHVQQLEKVFQILLQAGYVVSLKKSEIGQKTVEFLGFNITKEGRGLTDTFKTKLLNITPPKDLKQLQSILGKLNFARNFIPNFAELVQPLYNLIAPAKGKYIEWSEENTKQLNMVIEALNTASNLEERLPEQRLVIKVNTSPSAGYVRYYNETGKKPIMYLNYVFSKAELKFSMLEKLLTTMHKALIKAMDLAMGQEILVYSPIVSMTKIQKTPLPERKALPIRWITWMTYLEDPRIQFHYDKTLPELKHIPDVYTSSQSPVKHPSQYEGVFYTDGSAIKSPDPTKSNNAGMGIVHATYKPEYQVLNQWSIPLGNHTAQMAEIAAVEFACKKALKIPGPVLVITDSFYVAESANKELPYWKSNGFVNNKKKPLKHISKWKSIAECLSMKPDITIQHEKGISLQIPVFILKGNALADKLATQGSYVVNAGKRTADGSEFEKRTADGSEFESPKKKAKVE

SEQ ID NO: 1352 - protein, 2174 aa, synthetic construct
MPAAKRVKLDGGDKKYSIGLDIGTNSVGWAVITDEYKVPSKKFKVLGNTDRHSIKKNLIGALLFDSGETAEATRLKRTARRRYTRRKNRICYLQEIFSNEMAKVDDSFFHRLEESFLVEEDKKHERHPIFGNIVDEVAYHEKYPTIYHLRKKLVDSTDKADLRLIYLALAHMIKFRGHFLIEGDLNPDNSDVDKLFIQLVQTYNQLFEENPINASGVDAKAILSARLSKSRRLENLIAQLPGEKKNGLFGNLIALSLGLTPNFKSNFDLAEDAKLQLSKDTYDDDLDNLLAQIGDQYADLFLAAKNLSDAILLSDILRVNTEITKAPLSASMIKRYDEHHQDLTLLKALVRQQLPEKYKEIFFDQSKNGYAGYIDGGASQEEFYKFIKPILEKMDGTEELLVKLNREDLLRKQRTFDNGSIPHQIHLGELHAILRRQEDFYPFLKDNREKIEKILTFRIPYYVGPLARGNSRFAWMTRKSEETITPWNFEEVVDKGASAQSFIERMTNFDKNLPNEKVLPKHSLLYEYFTVYNELTKVKYVTEGMRKPAFLSGEQKKAIVDLLFKTNRKVTVKQLKEDYFKKIECFDSVEISGVEDRFNASLGTYHDLLKIIKDKDFLDNEENEDILEDIVLTLTLFEDREMIEERLKTYAHLFDDKVMKQLKRRRYTGWGRLSRKLINGIRDKQSGKTILDFLKSDGFANRNFMQLIHDDSLTFKEDIQKAQVSGQGDSLHEHIANLAGSPAIKKGILQTVKVVDELVKVMGRHKPENIVIEMARENQTTQKGQKNSRERMKRIEEGIKELGSQILKEHPVENTQLQNEKLYLYYLQNGRDMYVDQELDINRLSDYDVDHIVPQSFLKDDSIDNKVLTRSDKARGKSDNVPSEEVVKKMKNYWRQLLNAKLITQRKFDNLTKAERGGLSELDKAGFIKRQLVETRQITKHVAQILDSRMNTKYDENDKLIREVKVITLKSKLVSDFRKDFQFYKVREINNYHHAHDAYLNAVVGTALIKKYPKLESEFVYGDYKVYDVRKMIAKSEQEIGKATAKYFFYSNIMNFFKTEITLANGEIRKRPLIETNGETGEIVWDKGRDFATVRKVLSMPQVNIVKKTEVQTGGFSKESILPKRNSDKLIARKKDWDPKKYGGFDSPTVAYSVLVVAKVEKGKSKKLKSVKELLGITIMERSSFEKNPIDFLEAKGYKEVKKDLIIKLPKYSLFELENGRKRMLASAGELQKGNELALPSKYVNFLYLASHYEKLKGSPEDNEQKQLFVEQHKHYLDEIIEQISEFSKRVILADANLDKVLSAYNKHRDKPIREQAENIIHLFTLTNLGAPAAFKYFDTTIDRKRYTSTKEVLDATLIHQSITGLYETRIDLSQLGGDGGGSSPAPGGSGGMNPLQLLQPLPAEIKGTKLLAHWNSGATITCIPESFLEDEQPIKKTLIKTIHGEKQQNVYYVTFKVKGRKVEAEVIASPYEYILLSPTDVPWLTQQPLQLTILVPLQEYQEKILSKTALPEDQKQQLKTLFVKYDNLWQHWENQVGHRKIRPHNIATGDYPPRPQKQYPINPKAKPSIQIVIDDLLKQGVLTPQNSTMNTPVYPVPKPDGRWRMVLDYREVNKTIPLTAAQNQHSAGILATIVRQKYKTTLDLANGFWAHPITPESYWLTAFTWQGKQYCWTRLPQGFLNSPALFNADVVDLLKEIPNVQVYVDDIYLSHDDPKEHVQQLEKVFQILLQAGYVVSLKKSEIGQKTVEFLGFNITKEGRGLTDTFKTKLLNITPPKDLKQLQSILGKLNFARNFIPNFAELVQPLYNLIAPAKGKYIEWSEENTKQLNMVIEALNTASNLEERLPEQRLVIKVNTSPSAGYVRYYNETGKKPIMYLNYVFSKAELKFSMLEKLLTTMHKALIKAMDLAMGQEILVYSPIVSMTKIQKTPLPERKALPIRWITWMTYLEDPRIQFHYDKTLPELKHIPDVYTSSQSPVKHPSQYEGVFYTDGSAIKSPDPTKSNNAGMGIVHATYKPEYQVLNQWSIPLGNHTAQMAEIAAVEFACKKALKIPGPVLVITDSFYVAESANKELPYWKSNGFVNNKKKPLKHISKWKSIAECLSMKPDITIQHEKGISLQIPVFILKGNALADKLATQGSYVVNAGKRTADGSEFEKRTADGSEFESPKKKAKVE

SEQ ID NO: 1353 - protein, 2176 aa, synthetic construct
MPAAKRVKLDGGDKKYSIGLDIGTNSVGWAVITDEYKVPSKKFKVLGNTDRHSIKKNLIGALLFDSGETAEATRLKRTARRRYTRRKNRICYLQEIFSNEMAKVDDSFFHRLEESFLVEEDKKHERHPIFGNIVDEVAYHEKYPTIYHLRKKLVDSTDKADLRLIYLALAHMIKFRGHFLIEGDLNPDNSDVDKLFIQLVQTYNQLFEENPINASGVDAKAILSARLSKSRRLENLIAQLPGEKKNGLFGNLIALSLGLTPNFKSNFDLAEDAKLQLSKDTYDDDLDNLLAQIGDQYADLFLAAKNLSDAILLSDILRVNTEITKAPLSASMIKRYDEHHQDLTLLKALVRQQLPEKYKEIFFDQSKNGYAGYIDGGASQEEFYKFIKPILEKMDGTEELLVKLNREDLLRKQRTFDNGSIPHQIHLGELHAILRRQEDFYPFLKDNREKIEKILTFRIPYYVGPLARGNSRFAWMTRKSEETITPWNFEEVVDKGASAQSFIERMTNFDKNLPNEKVLPKHSLLYEYFTVYNELTKVKYVTEGMRKPAFLSGEQKKAIVDLLFKTNRKVTVKQLKEDYFKKIECFDSVEISGVEDRFNASLGTYHDLLKIIKDKDFLDNEENEDILEDIVLTLTLFEDREMIEERLKTYAHLFDDKVMKQLKRRRYTGWGRLSRKLINGIRDKQSGKTILDFLKSDGFANRNFMQLIHDDSLTFKEDIQKAQVSGQGDSLHEHIANLAGSPAIKKGILQTVKVVDELVKVMGRHKPENIVIEMARENQTTQKGQKNSRERMKRIEEGIKELGSQILKEHPVENTQLQNEKLYLYYLQNGRDMYVDQELDINRLSDYDVDHIVPQSFLKDDSIDNKVLTRSDKARGKSDNVPSEEVVKKMKNYWRQLLNAKLITQRKFDNLTKAERGGLSELDKAGFIKRQLVETRQITKHVAQILDSRMNTKYDENDKLIREVKVITLKSKLVSDFRKDFQFYKVREINNYHHAHDAYLNAVVGTALIKKYPKLESEFVYGDYKVYDVRKMIAKSEQEIGKATAKYFFYSNIMNFFKTEITLANGEIRKRPLIETNGETGEIVWDKGRDFATVRKVLSMPQVNIVKKTEVQTGGFSKESILPKRNSDKLIARKKDWDPKKYGGFDSPTVAYSVLVVAKVEKGKSKKLKSVKELLGITIMERSSFEKNPIDFLEAKGYKEVKKDLIIKLPKYSLFELENGRKRMLASAGELQKGNELALPSKYVNFLYLASHYEKLKGSPEDNEQKQLFVEQHKHYLDEIIEQISEFSKRVILADANLDKVLSAYNKHRDKPIREQAENIIHLFTLTNLGAPAAFKYFDTTIDRKRYTSTKEVLDATLIHQSITGLYETRIDLSQLGGDGGGSSPAPEAAAKGGMNPLQLLQPLPAEIKGTKLLAHWNSGATITCIPESFLEDEQPIKKTLIKTIHGEKQQNVYYVTFKVKGRKVEAEVIASPYEYILLSPTDVPWLTQQPLQLTILVPLQEYQEKILSKTALPEDQKQQLKTLFVKYDNLWQHWENQVGHRKIRPHNIATGDYPPRPQKQYPINPKAKPSIQIVIDDLLKQGVLTPQNSTMNTPVYPVPKPDGRWRMVLDYREVNKTIPLTAAQNQHSAGILATIVRQKYKTTLDLANGFWAHPITPESYWLTAFTWQGKQYCWTRLPQGFLNSPALFNADVVDLLKEIPNVQVYVDDIYLSHDDPKEHVQQLEKVFQILLQAGYVVSLKKSEIGQKTVEFLGFNITKEGRGLTDTFKTKLLNITPPKDLKQLQSILGKLNFARNFIPNFAELVQPLYNLIAPAKGKYIEWSEENTKQLNMVIEALNTASNLEERLPEQRLVIKVNTSPSAGYVRYYNETGKKPIMYLNYVFSKAELKFSMLEKLLTTMHKALIKAMDLAMGQEILVYSPIVSMTKIQKTPLPERKALPIRWITWMTYLEDPRIQFHYDKTLPELKHIPDVYTSSQSPVKHPSQYEGVFYTDGSAIKSPDPTKSNNAGMGIVHATYKPEYQVLNQWSIPLGNHTAQMAEIAAVEFACKKALKIPGPVLVITDSFYVAESANKELPYWKSNGFVNNKKKPLKHISKWKSIAECLSMKPDITIQHEKGISLQIPVFILKGNALADKLATQGSYVVNAGKRTADGSEFEKRTADGSEFESPKKKAKVE

SEQ ID NO: 1354 - protein, 2174 aa, synthetic construct
MPAAKRVKLDGGDKKYSIGLDIGTNSVGWAVITDEYKVPSKKFKVLGNTDRHSIKKNLIGALLFDSGETAEATRLKRTARRRYTRRKNRICYLQEIFSNEMAKVDDSFFHRLEESFLVEEDKKHERHPIFGNIVDEVAYHEKYPTIYHLRKKLVDSTDKADLRLIYLALAHMIKFRGHFLIEGDLNPDNSDVDKLFIQLVQTYNQLFEENPINASGVDAKAILSARLSKSRRLENLIAQLPGEKKNGLFGNLIALSLGLTPNFKSNFDLAEDAKLQLSKDTYDDDLDNLLAQIGDQYADLFLAAKNLSDAILLSDILRVNTEITKAPLSASMIKRYDEHHQDLTLLKALVRQQLPEKYKEIFFDQSKNGYAGYIDGGASQEEFYKFIKPILEKMDGTEELLVKLNREDLLRKQRTFDNGSIPHQIHLGELHAILRRQEDFYPFLKDNREKIEKILTFRIPYYVGPLARGNSRFAWMTRKSEETITPWNFEEVVDKGASAQSFIERMTNFDKNLPNEKVLPKHSLLYEYFTVYNELTKVKYVTEGMRKPAFLSGEQKKAIVDLLFKTNRKVTVKQLKEDYFKKIECFDSVEISGVEDRFNASLGTYHDLLKIIKDKDFLDNEENEDILEDIVLTLTLFEDREMIEERLKTYAHLFDDKVMKQLKRRRYTGWGRLSRKLINGIRDKQSGKTILDFLKSDGFANRNFMQLIHDDSLTFKEDIQKAQVSGQGDSLHEHIANLAGSPAIKKGILQTVKVVDELVKVMGRHKPENIVIEMARENQTTQKGQKNSRERMKRIEEGIKELGSQILKEHPVENTQLQNEKLYLYYLQNGRDMYVDQELDINRLSDYDVDHIVPQSFLKDDSIDNKVLTRSDKARGKSDNVPSEEVVKKMKNYWRQLLNAKLITQRKFDNLTKAERGGLSELDKAGFIKRQLVETRQITKHVAQILDSRMNTKYDENDKLIREVKVITLKSKLVSDFRKDFQFYKVREINNYHHAHDAYLNAVVGTALIKKYPKLESEFVYGDYKVYDVRKMIAKSEQEIGKATAKYFFYSNIMNFFKTEITLANGEIRKRPLIETNGETGEIVWDKGRDFATVRKVLSMPQVNIVKKTEVQTGGFSKESILPKRNSDKLIARKKDWDPKKYGGFDSPTVAYSVLVVAKVEKGKSKKLKSVKELLGITIMERSSFEKNPIDFLEAKGYKEVKKDLIIKLPKYSLFELENGRKRMLASAGELQKGNELALPSKYVNFLYLASHYEKLKGSPEDNEQKQLFVEQHKHYLDEIIEQISEFSKRVILADANLDKVLSAYNKHRDKPIREQAENIIHLFTLTNLGAPAAFKYFDTTIDRKRYTSTKEVLDATLIHQSITGLYETRIDLSQLGGDGGGGSGGGPAPGGMNPLQLLQPLPAEIKGTKLLAHWNSGATITCIPESFLEDEQPIKKTLIKTIHGEKQQNVYYVTFKVKGRKVEAEVIASPYEYILLSPTDVPWLTQQPLQLTILVPLQEYQEKILSKTALPEDQKQQLKTLFVKYDNLWQHWENQVGHRKIRPHNIATGDYPPRPQKQYPINPKAKPSIQIVIDDLLKQGVLTPQNSTMNTPVYPVPKPDGRWRMVLDYREVNKTIPLTAAQNQHSAGILATIVRQKYKTTLDLANGFWAHPITPESYWLTAFTWQGKQYCWTRLPQGFLNSPALFNADVVDLLKEIPNVQVYVDDIYLSHDDPKEHVQQLEKVFQILLQAGYVVSLKKSEIGQKTVEFLGFNITKEGRGLTDTFKTKLLNITPPKDLKQLQSILGKLNFARNFIPNFAELVQPLYNLIAPAKGKYIEWSEENTKQLNMVIEALNTASNLEERLPEQRLVIKVNTSPSAGYVRYYNETGKKPIMYLNYVFSKAELKFSMLEKLLTTMHKALIKAMDLAMGQEILVYSPIVSMTKIQKTPLPERKALPIRWITWMTYLEDPRIQFHYDKTLPELKHIPDVYTSSQSPVKHPSQYEGVFYTDGSAIKSPDPTKSNNAGMGIVHATYKPEYQVLNQWSIPLGNHTAQMAEIAAVEFACKKALKIPGPVLVITDSFYVAESANKELPYWKSNGFVNNKKKPLKHISKWKSIAECLSMKPDITIQHEKGISLQIPVFILKGNALADKLATQGSYVVNAGKRTADGSEFEKRTADGSEFESPKKKAKVE

SEQ ID NO: 1355 - protein, 2176 aa, synthetic construct
MPAAKRVKLDGGDKKYSIGLDIGTNSVGWAVITDEYKVPSKKFKVLGNTDRHSIKKNLIGALLFDSGETAEATRLKRTARRRYTRRKNRICYLQEIFSNEMAKVDDSFFHRLEESFLVEEDKKHERHPIFGNIVDEVAYHEKYPTIYHLRKKLVDSTDKADLRLIYLALAHMIKFRGHFLIEGDLNPDNSDVDKLFIQLVQTYNQLFEENPINASGVDAKAILSARLSKSRRLENLIAQLPGEKKNGLFGNLIALSLGLTPNFKSNFDLAEDAKLQLSKDTYDDDLDNLLAQIGDQYADLFLAAKNLSDAILLSDILRVNTEITKAPLSASMIKRYDEHHQDLTLLKALVRQQLPEKYKEIFFDQSKNGYAGYIDGGASQEEFYKFIKPILEKMDGTEELLVKLNREDLLRKQRTFDNGSIPHQIHLGELHAILRRQEDFYPFLKDNREKIEKILTFRIPYYVGPLARGNSRFAWMTRKSEETITPWNFEEVVDKGASAQSFIERMTNFDKNLPNEKVLPKHSLLYEYFTVYNELTKVKYVTEGMRKPAFLSGEQKKAIVDLLFKTNRKVTVKQLKEDYFKKIECFDSVEISGVEDRFNASLGTYHDLLKIIKDKDFLDNEENEDILEDIVLTLTLFEDREMIEERLKTYAHLFDDKVMKQLKRRRYTGWGRLSRKLINGIRDKQSGKTILDFLKSDGFANRNFMQLIHDDSLTFKEDIQKAQVSGQGDSLHEHIANLAGSPAIKKGILQTVKVVDELVKVMGRHKPENIVIEMARENQTTQKGQKNSRERMKRIEEGIKELGSQILKEHPVENTQLQNEKLYLYYLQNGRDMYVDQELDINRLSDYDVDHIVPQSFLKDDSIDNKVLTRSDKARGKSDNVPSEEVVKKMKNYWRQLLNAKLITQRKFDNLTKAERGGLSELDKAGFIKRQLVETRQITKHVAQILDSRMNTKYDENDKLIREVKVITLKSKLVSDFRKDFQFYKVREINNYHHAHDAYLNAVVGTALIKKYPKLESEFVYGDYKVYDVRKMIAKSEQEIGKATAKYFFYSNIMNFFKTEITLANGEIRKRPLIETNGETGEIVWDKGRDFATVRKVLSMPQVNIVKKTEVQTGGFSKESILPKRNSDKLIARKKDWDPKKYGGFDSPTVAYSVLVVAKVEKGKSKKLKSVKELLGITIMERSSFEKNPIDFLEAKGYKEVKKDLIIKLPKYSLFELENGRKRMLASAGELQKGNELALPSKYVNFLYLASHYEKLKGSPEDNEQKQLFVEQHKHYLDEIIEQISEFSKRVILADANLDKVLSAYNKHRDKPIREQAENIIHLFTLTNLGAPAAFKYFDTTIDRKRYTSTKEVLDATLIHQSITGLYETRIDLSQLGGDGGEAAAKGSSGGSGGMNPLQLLQPLPAEIKGTKLLAHWNSGATITCIPESFLEDEQPIKKTLIKTIHGEKQQNVYYVTFKVKGRKVEAEVIASPYEYILLSPTDVPWLTQQPLQLTILVPLQEYQEKILSKTALPEDQKQQLKTLFVKYDNLWQHWENQVGHRKIRPHNIATGDYPPRPQKQYPINPKAKPSIQIVIDDLLKQGVLTPQNSTMNTPVYPVPKPDGRWRMVLDYREVNKTIPLTAAQNQHSAGILATIVRQKYKTTLDLANGFWAHPITPESYWLTAFTWQGKQYCWTRLPQGFLNSPALFNADVVDLLKEIPNVQVYVDDIYLSHDDPKEHVQQLEKVFQILLQAGYVVSLKKSEIGQKTVEFLGFNITKEGRGLTDTFKTKLLNITPPKDLKQLQSILGKLNFARNFIPNFAELVQPLYNLIAPAKGKYIEWSEENTKQLNMVIEALNTASNLEERLPEQRLVIKVNTSPSAGYVRYYNETGKKPIMYLNYVFSKAELKFSMLEKLLTTMHKALIKAMDLAMGQEILVYSPIVSMTKIQKTPLPERKALPIRWITWMTYLEDPRIQFHYDKTLPELKHIPDVYTSSQSPVKHPSQYEGVFYTDGSAIKSPDPTKSNNAGMGIVHATYKPEYQVLNQWSIPLGNHTAQMAEIAAVEFACKKALKIPGPVLVITDSFYVAESANKELPYWKSNGFVNNKKKPLKHISKWKSIAECLSMKPDITIQHEKGISLQIPVFILKGNALADKLATQGSYVVNAGKRTADGSEFEKRTADGSEFESPKKKAKVE

SEQ ID NO: 1356 - protein, 2172 aa, synthetic construct
MPAAKRVKLDGGDKKYSIGLDIGTNSVGWAVITDEYKVPSKKFKVLGNTDRHSIKKNLIGALLFDSGETAEATRLKRTARRRYTRRKNRICYLQEIFSNEMAKVDDSFFHRLEESFLVEEDKKHERHPIFGNIVDEVAYHEKYPTIYHLRKKLVDSTDKADLRLIYLALAHMIKFRGHFLIEGDLNPDNSDVDKLFIQLVQTYNQLFEENPINASGVDAKAILSARLSKSRRLENLIAQLPGEKKNGLFGNLIALSLGLTPNFKSNFDLAEDAKLQLSKDTYDDDLDNLLAQIGDQYADLFLAAKNLSDAILLSDILRVNTEITKAPLSASMIKRYDEHHQDLTLLKALVRQQLPEKYKEIFFDQSKNGYAGYIDGGASQEEFYKFIKPILEKMDGTEELLVKLNREDLLRKQRTFDNGSIPHQIHLGELHAILRRQEDFYPFLKDNREKIEKILTFRIPYYVGPLARGNSRFAWMTRKSEETITPWNFEEVVDKGASAQSFIERMTNFDKNLPNEKVLPKHSLLYEYFTVYNELTKVKYVTEGMRKPAFLSGEQKKAIVDLLFKTNRKVTVKQLKEDYFKKIECFDSVEISGVEDRFNASLGTYHDLLKIIKDKDFLDNEENEDILEDIVLTLTLFEDREMIEERLKTYAHLFDDKVMKQLKRRRYTGWGRLSRKLINGIRDKQSGKTILDFLKSDGFANRNFMQLIHDDSLTFKEDIQKAQVSGQGDSLHEHIANLAGSPAIKKGILQTVKVVDELVKVMGRHKPENIVIEMARENQTTQKGQKNSRERMKRIEEGIKELGSQILKEHPVENTQLQNEKLYLYYLQNGRDMYVDQELDINRLSDYDVDHIVPQSFLKDDSIDNKVLTRSDKARGKSDNVPSEEVVKKMKNYWRQLLNAKLITQRKFDNLTKAERGGLSELDKAGFIKRQLVETRQITKHVAQILDSRMNTKYDENDKLIREVKVITLKSKLVSDFRKDFQFYKVREINNYHHAHDAYLNAVVGTALIKKYPKLESEFVYGDYKVYDVRKMIAKSEQEIGKATAKYFFYSNIMNFFKTEITLANGEIRKRPLIETNGETGEIVWDKGRDFATVRKVLSMPQVNIVKKTEVQTGGFSKESILPKRNSDKLIARKKDWDPKKYGGFDSPTVAYSVLVVAKVEKGKSKKLKSVKELLGITIMERSSFEKNPIDFLEAKGYKEVKKDLIIKLPKYSLFELENGRKRMLASAGELQKGNELALPSKYVNFLYLASHYEKLKGSPEDNEQKQLFVEQHKHYLDEIIEQISEFSKRVILADANLDKVLSAYNKHRDKPIREQAENIIHLFTLTNLGAPAAFKYFDTTIDRKRYTSTKEVLDATLIHQSITGLYETRIDLSQLGGDGGGGGGGGGGGMNPLQLLQPLPAEIKGTKLLAHWNSGATITCIPESFLEDEQPIKKTLIKTIHGEKQQNVYYVTFKVKGRKVEAEVIASPYEYILLSPTDVPWLTQQPLQLTILVPLQEYQEKILSKTALPEDQKQQLKTLFVKYDNLWQHWENQVGHRKIRPHNIATGDYPPRPQKQYPINPKAKPSIQIVIDDLLKQGVLTPQNSTMNTPVYPVPKPDGRWRMVLDYREVNKTIPLTAAQNQHSAGILATIVRQKYKTTLDLANGFWAHPITPESYWLTAFTWQGKQYCWTRLPQGFLNSPALFNADVVDLLKEIPNVQVYVDDIYLSHDDPKEHVQQLEKVFQILLQAGYVVSLKKSEIGQKTVEFLGFNITKEGRGLTDTFKTKLLNITPPKDLKQLQSILGKLNFARNFIPNFAELVQPLYNLIAPAKGKYIEWSEENTKQLNMVIEALNTASNLEERLPEQRLVIKVNTSPSAGYVRYYNETGKKPIMYLNYVFSKAELKFSMLEKLLTTMHKALIKAMDLAMGQEILVYSPIVSMTKIQKTPLPERKALPIRWITWMTYLEDPRIQFHYDKTLPELKHIPDVYTSSQSPVKHPSQYEGVFYTDGSAIKSPDPTKSNNAGMGIVHATYKPEYQVLNQWSIPLGNHTAQMAEIAAVEFACKKALKIPGPVLVITDSFYVAESANKELPYWKSNGFVNNKKKPLKHISKWKSIAECLSMKPDITIQHEKGISLQIPVFILKGNALADKLATQGSYVVNAGKRTADGSEFEKRTADGSEFESPKKKAKVE

SEQ ID NO: 1357 - protein, 2176 aa, synthetic construct
MPAAKRVKLDGGDKKYSIGLDIGTNSVGWAVITDEYKVPSKKFKVLGNTDRHSIKKNLIGALLFDSGETAEATRLKRTARRRYTRRKNRICYLQEIFSNEMAKVDDSFFHRLEESFLVEEDKKHERHPIFGNIVDEVAYHEKYPTIYHLRKKLVDSTDKADLRLIYLALAHMIKFRGHFLIEGDLNPDNSDVDKLFIQLVQTYNQLFEENPINASGVDAKAILSARLSKSRRLENLIAQLPGEKKNGLFGNLIALSLGLTPNFKSNFDLAEDAKLQLSKDTYDDDLDNLLAQIGDQYADLFLAAKNLSDAILLSDILRVNTEITKAPLSASMIKRYDEHHQDLTLLKALVRQQLPEKYKEIFFDQSKNGYAGYIDGGASQEEFYKFIKPILEKMDGTEELLVKLNREDLLRKQRTFDNGSIPHQIHLGELHAILRRQEDFYPFLKDNREKIEKILTFRIPYYVGPLARGNSRFAWMTRKSEETITPWNFEEVVDKGASAQSFIERMTNFDKNLPNEKVLPKHSLLYEYFTVYNELTKVKYVTEGMRKPAFLSGEQKKAIVDLLFKTNRKVTVKQLKEDYFKKIECFDSVEISGVEDRFNASLGTYHDLLKIIKDKDFLDNEENEDILEDIVLTLTLFEDREMIEERLKTYAHLFDDKVMKQLKRRRYTGWGRLSRKLINGIRDKQSGKTILDFLKSDGFANRNFMQLIHDDSLTFKEDIQKAQVSGQGDSLHEHIANLAGSPAIKKGILQTVKVVDELVKVMGRHKPENIVIEMARENQTTQKGQKNSRERMKRIEEGIKELGSQILKEHPVENTQLQNEKLYLYYLQNGRDMYVDQELDINRLSDYDVDHIVPQSFLKDDSIDNKVLTRSDKARGKSDNVPSEEVVKKMKNYWRQLLNAKLITQRKFDNLTKAERGGLSELDKAGFIKRQLVETRQITKHVAQILDSRMNTKYDENDKLIREVKVITLKSKLVSDFRKDFQFYKVREINNYHHAHDAYLNAVVGTALIKKYPKLESEFVYGDYKVYDVRKMIAKSEQEIGKATAKYFFYSNIMNFFKTEITLANGEIRKRPLIETNGETGEIVWDKGRDFATVRKVLSMPQVNIVKKTEVQTGGFSKESILPKRNSDKLIARKKDWDPKKYGGFDSPTVAYSVLVVAKVEKGKSKKLKSVKELLGITIMERSSFEKNPIDFLEAKGYKEVKKDLIIKLPKYSLFELENGRKRMLASAGELQKGNELALPSKYVNFLYLASHYEKLKGSPEDNEQKQLFVEQHKHYLDEIIEQISEFSKRVILADANLDKVLSAYNKHRDKPIREQAENIIHLFTLTNLGAPAAFKYFDTTIDRKRYTSTKEVLDATLIHQSITGLYETRIDLSQLGGDGGGSSEAAAKGGSGGMNPLQLLQPLPAEIKGTKLLAHWNSGATITCIPESFLEDEQPIKKTLIKTIHGEKQQNVYYVTFKVKGRKVEAEVIASPYEYILLSPTDVPWLTQQPLQLTILVPLQEYQEKILSKTALPEDQKQQLKTLFVKYDNLWQHWENQVGHRKIRPHNIATGDYPPRPQKQYPINPKAKPSIQIVIDDLLKQGVLTPQNSTMNTPVYPVPKPDGRWRMVLDYREVNKTIPLTAAQNQHSAGILATIVRQKYKTTLDLANGFWAHPITPESYWLTAFTWQGKQYCWTRLPQGFLNSPALFNADVVDLLKEIPNVQVYVDDIYLSHDDPKEHVQQLEKVFQILLQAGYVVSLKKSEIGQKTVEFLGFNITKEGRGLTDTFKTKLLNITPPKDLKQLQSILGKLNFARNFIPNFAELVQPLYNLIAPAKGKYIEWSEENTKQLNMVIEALNTASNLEERLPEQRLVIKVNTSPSAGYVRYYNETGKKPIMYLNYVFSKAELKFSMLEKLLTTMHKALIKAMDLAMGQEILVYSPIVSMTKIQKTPLPERKALPIRWITWMTYLEDPRIQFHYDKTLPELKHIPDVYTSSQSPVKHPSQYEGVFYTDGSAIKSPDPTKSNNAGMGIVHATYKPEYQVLNQWSIPLGNHTAQMAEIAAVEFACKKALKIPGPVLVITDSFYVAESANKELPYWKSNGFVNNKKKPLKHISKWKSIAECLSMKPDITIQHEKGISLQIPVFILKGNALADKLATQGSYVVNAGKRTADGSEFEKRTADGSEFESPKKKAKVE

SEQ ID NO: 1358 - protein, 2171 aa, synthetic construct
MPAAKRVKLDGGDKKYSIGLDIGTNSVGWAVITDEYKVPSKKFKVLGNTDRHSIKKNLIGALLFDSGETAEATRLKRTARRRYTRRKNRICYLQEIFSNEMAKVDDSFFHRLEESFLVEEDKKHERHPIFGNIVDEVAYHEKYPTIYHLRKKLVDSTDKADLRLIYLALAHMIKFRGHFLIEGDLNPDNSDVDKLFIQLVQTYNQLFEENPINASGVDAKAILSARLSKSRRLENLIAQLPGEKKNGLFGNLIALSLGLTPNFKSNFDLAEDAKLQLSKDTYDDDLDNLLAQIGDQYADLFLAAKNLSDAILLSDILRVNTEITKAPLSASMIKRYDEHHQDLTLLKALVRQQLPEKYKEIFFDQSKNGYAGYIDGGASQEEFYKFIKPILEKMDGTEELLVKLNREDLLRKQRTFDNGSIPHQIHLGELHAILRRQEDFYPFLKDNREKIEKILTFRIPYYVGPLARGNSRFAWMTRKSEETITPWNFEEVVDKGASAQSFIERMTNFDKNLPNEKVLPKHSLLYEYFTVYNELTKVKYVTEGMRKPAFLSGEQKKAIVDLLFKTNRKVTVKQLKEDYFKKIECFDSVEISGVEDRFNASLGTYHDLLKIIKDKDFLDNEENEDILEDIVLTLTLFEDREMIEERLKTYAHLFDDKVMKQLKRRRYTGWGRLSRKLINGIRDKQSGKTILDFLKSDGFANRNFMQLIHDDSLTFKEDIQKAQVSGQGDSLHEHIANLAGSPAIKKGILQTVKVVDELVKVMGRHKPENIVIEMARENQTTQKGQKNSRERMKRIEEGIKELGSQILKEHPVENTQLQNEKLYLYYLQNGRDMYVDQELDINRLSDYDVDHIVPQSFLKDDSIDNKVLTRSDKARGKSDNVPSEEVVKKMKNYWRQLLNAKLITQRKFDNLTKAERGGLSELDKAGFIKRQLVETRQITKHVAQILDSRMNTKYDENDKLIREVKVITLKSKLVSDFRKDFQFYKVREINNYHHAHDAYLNAVVGTALIKKYPKLESEFVYGDYKVYDVRKMIAKSEQEIGKATAKYFFYSNIMNFFKTEITLANGEIRKRPLIETNGETGEIVWDKGRDFATVRKVLSMPQVNIVKKTEVQTGGFSKESILPKRNSDKLIARKKDWDPKKYGGFDSPTVAYSVLVVAKVEKGKSKKLKSVKELLGITIMERSSFEKNPIDFLEAKGYKEVKKDLIIKLPKYSLFELENGRKRMLASAGELQKGNELALPSKYVNFLYLASHYEKLKGSPEDNEQKQLFVEQHKHYLDEIIEQISEFSKRVILADANLDKVLSAYNKHRDKPIREQAENIIHLFTLTNLGAPAAFKYFDTTIDRKRYTSTKEVLDATLIHQSITGLYETRIDLSQLGGDGGPAPGSSGGMNPLQLLQPLPAEIKGTKLLAHWNSGATITCIPESFLEDEQPIKKTLIKTIHGEKQQNVYYVTFKVKGRKVEAEVIASPYEYILLSPTDVPWLTQQPLQLTILVPLQEYQEKILSKTALPEDQKQQLKTLFVKYDNLWQHWENQVGHRKIRPHNIATGDYPPRPQKQYPINPKAKPSIQIVIDDLLKQGVLTPQNSTMNTPVYPVPKPDGRWRMVLDYREVNKTIPLTAAQNQHSAGILATIVRQKYKTTLDLANGFWAHPITPESYWLTAFTWQGKQYCWTRLPQGFLNSPALFNADVVDLLKEIPNVQVYVDDIYLSHDDPKEHVQQLEKVFQILLQAGYVVSLKKSEIGQKTVEFLGFNITKEGRGLTDTFKTKLLNITPPKDLKQLQSILGKLNFARNFIPNFAELVQPLYNLIAPAKGKYIEWSEENTKQLNMVIEALNTASNLEERLPEQRLVIKVNTSPSAGYVRYYNETGKKPIMYLNYVFSKAELKFSMLEKLLTTMHKALIKAMDLAMGQEILVYSPIVSMTKIQKTPLPERKALPIRWITWMTYLEDPRIQFHYDKTLPELKHIPDVYTSSQSPVKHPSQYEGVFYTDGSAIKSPDPTKSNNAGMGIVHATYKPEYQVLNQWSIPLGNHTAQMAEIAAVEFACKKALKIPGPVLVITDSFYVAESANKELPYWKSNGFVNNKKKPLKHISKWKSIAECLSMKPDITIQHEKGISLQIPVFILKGNALADKLATQGSYVVNAGKRTADGSEFEKRTADGSEFESPKKKAKVE

SEQ ID NO: 1359 - protein, 2176 aa, synthetic construct
MPAAKRVKLDGGDKKYSIGLDIGTNSVGWAVITDEYKVPSKKFKVLGNTDRHSIKKNLIGALLFDSGETAEATRLKRTARRRYTRRKNRICYLQEIFSNEMAKVDDSFFHRLEESFLVEEDKKHERHPIFGNIVDEVAYHEKYPTIYHLRKKLVDSTDKADLRLIYLALAHMIKFRGHFLIEGDLNPDNSDVDKLFIQLVQTYNQLFEENPINASGVDAKAILSARLSKSRRLENLIAQLPGEKKNGLFGNLIALSLGLTPNFKSNFDLAEDAKLQLSKDTYDDDLDNLLAQIGDQYADLFLAAKNLSDAILLSDILRVNTEITKAPLSASMIKRYDEHHQDLTLLKALVRQQLPEKYKEIFFDQSKNGYAGYIDGGASQEEFYKFIKPILEKMDGTEELLVKLNREDLLRKQRTFDNGSIPHQIHLGELHAILRRQEDFYPFLKDNREKIEKILTFRIPYYVGPLARGNSRFAWMTRKSEETITPWNFEEVVDKGASAQSFIERMTNFDKNLPNEKVLPKHSLLYEYFTVYNELTKVKYVTEGMRKPAFLSGEQKKAIVDLLFKTNRKVTVKQLKEDYFKKIECFDSVEISGVEDRFNASLGTYHDLLKIIKDKDFLDNEENEDILEDIVLTLTLFEDREMIEERLKTYAHLFDDKVMKQLKRRRYTGWGRLSRKLINGIRDKQSGKTILDFLKSDGFANRNFMQLIHDDSLTFKEDIQKAQVSGQGDSLHEHIANLAGSPAIKKGILQTVKVVDELVKVMGRHKPENIVIEMARENQTTQKGQKNSRERMKRIEEGIKELGSQILKEHPVENTQLQNEKLYLYYLQNGRDMYVDQELDINRLSDYDVDHIVPQSFLKDDSIDNKVLTRSDKARGKSDNVPSEEVVKKMKNYWRQLLNAKLITQRKFDNLTKAERGGLSELDKAGFIKRQLVETRQITKHVAQILDSRMNTKYDENDKLIREVKVITLKSKLVSDFRKDFQFYKVREINNYHHAHDAYLNAVVGTALIKKYPKLESEFVYGDYKVYDVRKMIAKSEQEIGKATAKYFFYSNIMNFFKTEITLANGEIRKRPLIETNGETGEIVWDKGRDFATVRKVLSMPQVNIVKKTEVQTGGFSKESILPKRNSDKLIARKKDWDPKKYGGFDSPTVAYSVLVVAKVEKGKSKKLKSVKELLGITIMERSSFEKNPIDFLEAKGYKEVKKDLIIKLPKYSLFELENGRKRMLASAGELQKGNELALPSKYVNFLYLASHYEKLKGSPEDNEQKQLFVEQHKHYLDEIIEQISEFSKRVILADANLDKVLSAYNKHRDKPIREQAENIIHLFTLTNLGAPAAFKYFDTTIDRKRYTSTKEVLDATLIHQSITGLYETRIDLSQLGGDGGPAPEAAAKGGSGGMNPLQLLQPLPAEIKGTKLLAHWNSGATITCIPESFLEDEQPIKKTLIKTIHGEKQQNVYYVTFKVKGRKVEAEVIASPYEYILLSPTDVPWLTQQPLQLTILVPLQEYQEKILSKTALPEDQKQQLKTLFVKYDNLWQHWENQVGHRKIRPHNIATGDYPPRPQKQYPINPKAKPSIQIVIDDLLKQGVLTPQNSTMNTPVYPVPKPDGRWRMVLDYREVNKTIPLTAAQNQHSAGILATIVRQKYKTTLDLANGFWAHPITPESYWLTAFTWQGKQYCWTRLPQGFLNSPALFNADVVDLLKEIPNVQVYVDDIYLSHDDPKEHVQQLEKVFQILLQAGYVVSLKKSEIGQKTVEFLGFNITKEGRGLTDTFKTKLLNITPPKDLKQLQSILGKLNFARNFIPNFAELVQPLYNLIAPAKGKYIEWSEENTKQLNMVIEALNTASNLEERLPEQRLVIKVNTSPSAGYVRYYNETGKKPIMYLNYVFSKAELKFSMLEKLLTTMHKALIKAMDLAMGQEILVYSPIVSMTKIQKTPLPERKALPIRWITWMTYLEDPRIQFHYDKTLPELKHIPDVYTSSQSPVKHPSQYEGVFYTDGSAIKSPDPTKSNNAGMGIVHATYKPEYQVLNQWSIPLGNHTAQMAEIAAVEFACKKALKIPGPVLVITDSFYVAESANKELPYWKSNGFVNNKKKPLKHISKWKSIAECLSMKPDITIQHEKGISLQIPVFILKGNALADKLATQGSYVVNAGKRTADGSEFEKRTADGSEFESPKKKAKVE

SEQ ID NO: 1360 - protein, 2176 aa, synthetic construct
MPAAKRVKLDGGDKKYSIGLDIGTNSVGWAVITDEYKVPSKKFKVLGNTDRHSIKKNLIGALLFDSGETAEATRLKRTARRRYTRRKNRICYLQEIFSNEMAKVDDSFFHRLEESFLVEEDKKHERHPIFGNIVDEVAYHEKYPTIYHLRKKLVDSTDKADLRLIYLALAHMIKFRGHFLIEGDLNPDNSDVDKLFIQLVQTYNQLFEENPINASGVDAKAILSARLSKSRRLENLIAQLPGEKKNGLFGNLIALSLGLTPNFKSNFDLAEDAKLQLSKDTYDDDLDNLLAQIGDQYADLFLAAKNLSDAILLSDILRVNTEITKAPLSASMIKRYDEHHQDLTLLKALVRQQLPEKYKEIFFDQSKNGYAGYIDGGASQEEFYKFIKPILEKMDGTEELLVKLNREDLLRKQRTFDNGSIPHQIHLGELHAILRRQEDFYPFLKDNREKIEKILTFRIPYYVGPLARGNSRFAWMTRKSEETITPWNFEEVVDKGASAQSFIERMTNFDKNLPNEKVLPKHSLLYEYFTVYNELTKVKYVTEGMRKPAFLSGEQKKAIVDLLFKTNRKVTVKQLKEDYFKKIECFDSVEISGVEDRFNASLGTYHDLLKIIKDKDFLDNEENEDILEDIVLTLTLFEDREMIEERLKTYAHLFDDKVMKQLKRRRYTGWGRLSRKLINGIRDKQSGKTILDFLKSDGFANRNFMQLIHDDSLTFKEDIQKAQVSGQGDSLHEHIANLAGSPAIKKGILQTVKVVDELVKVMGRHKPENIVIEMARENQTTQKGQKNSRERMKRIEEGIKELGSQILKEHPVENTQLQNEKLYLYYLQNGRDMYVDQELDINRLSDYDVDHIVPQSFLKDDSIDNKVLTRSDKARGKSDNVPSEEVVKKMKNYWRQLLNAKLITQRKFDNLTKAERGGLSELDKAGFIKRQLVETRQITKHVAQILDSRMNTKYDENDKLIREVKVITLKSKLVSDFRKDFQFYKVREINNYHHAHDAYLNAVVGTALIKKYPKLESEFVYGDYKVYDVRKMIAKSEQEIGKATAKYFFYSNIMNFFKTEITLANGEIRKRPLIETNGETGEIVWDKGRDFATVRKVLSMPQVNIVKKTEVQTGGFSKESILPKRNSDKLIARKKDWDPKKYGGFDSPTVAYSVLVVAKVEKGKSKKLKSVKELLGITIMERSSFEKNPIDFLEAKGYKEVKKDLIIKLPKYSLFELENGRKRMLASAGELQKGNELALPSKYVNFLYLASHYEKLKGSPEDNEQKQLFVEQHKHYLDEIIEQISEFSKRVILADANLDKVLSAYNKHRDKPIREQAENIIHLFTLTNLGAPAAFKYFDTTIDRKRYTSTKEVLDATLIHQSITGLYETRIDLSQLGGDGGEAAAKGGGPAPGGMNPLQLLQPLPAEIKGTKLLAHWNSGATITCIPESFLEDEQPIKKTLIKTIHGEKQQNVYYVTFKVKGRKVEAEVIASPYEYILLSPTDVPWLTQQPLQLTILVPLQEYQEKILSKTALPEDQKQQLKTLFVKYDNLWQHWENQVGHRKIRPHNIATGDYPPRPQKQYPINPKAKPSIQIVIDDLLKQGVLTPQNSTMNTPVYPVPKPDGRWRMVLDYREVNKTIPLTAAQNQHSAGILATIVRQKYKTTLDLANGFWAHPITPESYWLTAFTWQGKQYCWTRLPQGFLNSPALFNADVVDLLKEIPNVQVYVDDIYLSHDDPKEHVQQLEKVFQILLQAGYVVSLKKSEIGQKTVEFLGFNITKEGRGLTDTFKTKLLNITPPKDLKQLQSILGKLNFARNFIPNFAELVQPLYNLIAPAKGKYIEWSEENTKQLNMVIEALNTASNLEERLPEQRLVIKVNTSPSAGYVRYYNETGKKPIMYLNYVFSKAELKFSMLEKLLTTMHKALIKAMDLAMGQEILVYSPIVSMTKIQKTPLPERKALPIRWITWMTYLEDPRIQFHYDKTLPELKHIPDVYTSSQSPVKHPSQYEGVFYTDGSAIKSPDPTKSNNAGMGIVHATYKPEYQVLNQWSIPLGNHTAQMAEIAAVEFACKKALKIPGPVLVITDSFYVAESANKELPYWKSNGFVNNKKKPLKHISKWKSIAECLSMKPDITIQHEKGISLQIPVFILKGNALADKLATQGSYVVNAGKRTADGSEFEKRTADGSEFESPKKKAKVE

SEQ ID NO: 1361 - protein, 2176 aa, synthetic construct
MPAAKRVKLDGGDKKYSIGLDIGTNSVGWAVITDEYKVPSKKFKVLGNTDRHSIKKNLIGALLFDSGETAEATRLKRTARRRYTRRKNRICYLQEIFSNEMAKVDDSFFHRLEESFLVEEDKKHERHPIFGNIVDEVAYHEKYPTIYHLRKKLVDSTDKADLRLIYLALAHMIKFRGHFLIEGDLNPDNSDVDKLFIQLVQTYNQLFEENPINASGVDAKAILSARLSKSRRLENLIAQLPGEKKNGLFGNLIALSLGLTPNFKSNFDLAEDAKLQLSKDTYDDDLDNLLAQIGDQYADLFLAAKNLSDAILLSDILRVNTEITKAPLSASMIKRYDEHHQDLTLLKALVRQQLPEKYKEIFFDQSKNGYAGYIDGGASQEEFYKFIKPILEKMDGTEELLVKLNREDLLRKQRTFDNGSIPHQIHLGELHAILRRQEDFYPFLKDNREKIEKILTFRIPYYVGPLARGNSRFAWMTRKSEETITPWNFEEVVDKGASAQSFIERMTNFDKNLPNEKVLPKHSLLYEYFTVYNELTKVKYVTEGMRKPAFLSGEQKKAIVDLLFKTNRKVTVKQLKEDYFKKIECFDSVEISGVEDRFNASLGTYHDLLKIIKDKDFLDNEENEDILEDIVLTLTLFEDREMIEERLKTYAHLFDDKVMKQLKRRRYTGWGRLSRKLINGIRDKQSGKTILDFLKSDGFANRNFMQLIHDDSLTFKEDIQKAQVSGQGDSLHEHIANLAGSPAIKKGILQTVKVVDELVKVMGRHKPENIVIEMARENQTTQKGQKNSRERMKRIEEGIKELGSQILKEHPVENTQLQNEKLYLYYLQNGRDMYVDQELDINRLSDYDVDHIVPQSFLKDDSIDNKVLTRSDKARGKSDNVPSEEVVKKMKNYWRQLLNAKLITQRKFDNLTKAERGGLSELDKAGFIKRQLVETRQITKHVAQILDSRMNTKYDENDKLIREVKVITLKSKLVSDFRKDFQFYKVREINNYHHAHDAYLNAVVGTALIKKYPKLESEFVYGDYKVYDVRKMIAKSEQEIGKATAKYFFYSNIMNFFKTEITLANGEIRKRPLIETNGETGEIVWDKGRDFATVRKVLSMPQVNIVKKTEVQTGGFSKESILPKRNSDKLIARKKDWDPKKYGGFDSPTVAYSVLVVAKVEKGKSKKLKSVKELLGITIMERSSFEKNPIDFLEAKGYKEVKKDLIIKLPKYSLFELENGRKRMLASAGELQKGNELALPSKYVNFLYLASHYEKLKGSPEDNEQKQLFVEQHKHYLDEIIEQISEFSKRVILADANLDKVLSAYNKHRDKPIREQAENIIHLFTLTNLGAPAAFKYFDTTIDRKRYTSTKEVLDATLIHQSITGLYETRIDLSQLGGDGGGSSEAAAKGGGGGMNPLQLLQPLPAEIKGTKLLAHWNSGATITCIPESFLEDEQPIKKTLIKTIHGEKQQNVYYVTFKVKGRKVEAEVIASPYEYILLSPTDVPWLTQQPLQLTILVPLQEYQEKILSKTALPEDQKQQLKTLFVKYDNLWQHWENQVGHRKIRPHNIATGDYPPRPQKQYPINPKAKPSIQIVIDDLLKQGVLTPQNSTMNTPVYPVPKPDGRWRMVLDYREVNKTIPLTAAQNQHSAGILATIVRQKYKTTLDLANGFWAHPITPESYWLTAFTWQGKQYCWTRLPQGFLNSPALFNADVVDLLKEIPNVQVYVDDIYLSHDDPKEHVQQLEKVFQILLQAGYVVSLKKSEIGQKTVEFLGFNITKEGRGLTDTFKTKLLNITPPKDLKQLQSILGKLNFARNFIPNFAELVQPLYNLIAPAKGKYIEWSEENTKQLNMVIEALNTASNLEERLPEQRLVIKVNTSPSAGYVRYYNETGKKPIMYLNYVFSKAELKFSMLEKLLTTMHKALIKAMDLAMGQEILVYSPIVSMTKIQKTPLPERKALPIRWITWMTYLEDPRIQFHYDKTLPELKHIPDVYTSSQSPVKHPSQYEGVFYTDGSAIKSPDPTKSNNAGMGIVHATYKPEYQVLNQWSIPLGNHTAQMAEIAAVEFACKKALKIPGPVLVITDSFYVAESANKELPYWKSNGFVNNKKKPLKHISKWKSIAECLSMKPDITIQHEKGISLQIPVFILKGNALADKLATQGSYVVNAGKRTADGSEFEKRTADGSEFESPKKKAKVE

SEQ ID NO: 1362 - protein, 2176 aa, synthetic construct
MPAAKRVKLDGGDKKYSIGLDIGTNSVGWAVITDEYKVPSKKFKVLGNTDRHSIKKNLIGALLFDSGETAEATRLKRTARRRYTRRKNRICYLQEIFSNEMAKVDDSFFHRLEESFLVEEDKKHERHPIFGNIVDEVAYHEKYPTIYHLRKKLVDSTDKADLRLIYLALAHMIKFRGHFLIEGDLNPDNSDVDKLFIQLVQTYNQLFEENPINASGVDAKAILSARLSKSRRLENLIAQLPGEKKNGLFGNLIALSLGLTPNFKSNFDLAEDAKLQLSKDTYDDDLDNLLAQIGDQYADLFLAAKNLSDAILLSDILRVNTEITKAPLSASMIKRYDEHHQDLTLLKALVRQQLPEKYKEIFFDQSKNGYAGYIDGGASQEEFYKFIKPILEKMDGTEELLVKLNREDLLRKQRTFDNGSIPHQIHLGELHAILRRQEDFYPFLKDNREKIEKILTFRIPYYVGPLARGNSRFAWMTRKSEETITPWNFEEVVDKGASAQSFIERMTNFDKNLPNEKVLPKHSLLYEYFTVYNELTKVKYVTEGMRKPAFLSGEQKKAIVDLLFKTNRKVTVKQLKEDYFKKIECFDSVEISGVEDRFNASLGTYHDLLKIIKDKDFLDNEENEDILEDIVLTLTLFEDREMIEERLKTYAHLFDDKVMKQLKRRRYTGWGRLSRKLINGIRDKQSGKTILDFLKSDGFANRNFMQLIHDDSLTFKEDIQKAQVSGQGDSLHEHIANLAGSPAIKKGILQTVKVVDELVKVMGRHKPENIVIEMARENQTTQKGQKNSRERMKRIEEGIKELGSQILKEHPVENTQLQNEKLYLYYLQNGRDMYVDQELDINRLSDYDVDHIVPQSFLKDDSIDNKVLTRSDKARGKSDNVPSEEVVKKMKNYWRQLLNAKLITQRKFDNLTKAERGGLSELDKAGFIKRQLVETRQITKHVAQILDSRMNTKYDENDKLIREVKVITLKSKLVSDFRKDFQFYKVREINNYHHAHDAYLNAVVGTALIKKYPKLESEFVYGDYKVYDVRKMIAKSEQEIGKATAKYFFYSNIMNFFKTEITLANGEIRKRPLIETNGETGEIVWDKGRDFATVRKVLSMPQVNIVKKTEVQTGGFSKESILPKRNSDKLIARKKDWDPKKYGGFDSPTVAYSVLVVAKVEKGKSKKLKSVKELLGITIMERSSFEKNPIDFLEAKGYKEVKKDLIIKLPKYSLFELENGRKRMLASAGELQKGNELALPSKYVNFLYLASHYEKLKGSPEDNEQKQLFVEQHKHYLDEIIEQISEFSKRVILADANLDKVLSAYNKHRDKPIREQAENIIHLFTLTNLGAPAAFKYFDTTIDRKRYTSTKEVLDATLIHQSITGLYETRIDLSQLGGDGGEAAAKGGGGSSGGMNPLQLLQPLPAEIKGTKLLAHWNSGATITCIPESFLEDEQPIKKTLIKTIHGEKQQNVYYVTFKVKGRKVEAEVIASPYEYILLSPTDVPWLTQQPLQLTILVPLQEYQEKILSKTALPEDQKQQLKTLFVKYDNLWQHWENQVGHRKIRPHNIATGDYPPRPQKQYPINPKAKPSIQIVIDDLLKQGVLTPQNSTMNTPVYPVPKPDGRWRMVLDYREVNKTIPLTAAQNQHSAGILATIVRQKYKTTLDLANGFWAHPITPESYWLTAFTWQGKQYCWTRLPQGFLNSPALFNADVVDLLKEIPNVQVYVDDIYLSHDDPKEHVQQLEKVFQILLQAGYVVSLKKSEIGQKTVEFLGFNITKEGRGLTDTFKTKLLNITPPKDLKQLQSILGKLNFARNFIPNFAELVQPLYNLIAPAKGKYIEWSEENTKQLNMVIEALNTASNLEERLPEQRLVIKVNTSPSAGYVRYYNETGKKPIMYLNYVFSKAELKFSMLEKLLTTMHKALIKAMDLAMGQEILVYSPIVSMTKIQKTPLPERKALPIRWITWMTYLEDPRIQFHYDKTLPELKHIPDVYTSSQSPVKHPSQYEGVFYTDGSAIKSPDPTKSNNAGMGIVHATYKPEYQVLNQWSIPLGNHTAQMAEIAAVEFACKKALKIPGPVLVITDSFYVAESANKELPYWKSNGFVNNKKKPLKHISKWKSIAECLSMKPDITIQHEKGISLQIPVFILKGNALADKLATQGSYVVNAGKRTADGSEFEKRTADGSEFESPKKKAKVE

SEQ ID NO: 1363 - protein, 2172 aa, synthetic construct
MPAAKRVKLDGGDKKYSIGLDIGTNSVGWAVITDEYKVPSKKFKVLGNTDRHSIKKNLIGALLFDSGETAEATRLKRTARRRYTRRKNRICYLQEIFSNEMAKVDDSFFHRLEESFLVEEDKKHERHPIFGNIVDEVAYHEKYPTIYHLRKKLVDSTDKADLRLIYLALAHMIKFRGHFLIEGDLNPDNSDVDKLFIQLVQTYNQLFEENPINASGVDAKAILSARLSKSRRLENLIAQLPGEKKNGLFGNLIALSLGLTPNFKSNFDLAEDAKLQLSKDTYDDDLDNLLAQIGDQYADLFLAAKNLSDAILLSDILRVNTEITKAPLSASMIKRYDEHHQDLTLLKALVRQQLPEKYKEIFFDQSKNGYAGYIDGGASQEEFYKFIKPILEKMDGTEELLVKLNREDLLRKQRTFDNGSIPHQIHLGELHAILRRQEDFYPFLKDNREKIEKILTFRIPYYVGPLARGNSRFAWMTRKSEETITPWNFEEVVDKGASAQSFIERMTNFDKNLPNEKVLPKHSLLYEYFTVYNELTKVKYVTEGMRKPAFLSGEQKKAIVDLLFKTNRKVTVKQLKEDYFKKIECFDSVEISGVEDRFNASLGTYHDLLKIIKDKDFLDNEENEDILEDIVLTLTLFEDREMIEERLKTYAHLFDDKVMKQLKRRRYTGWGRLSRKLINGIRDKQSGKTILDFLKSDGFANRNFMQLIHDDSLTFKEDIQKAQVSGQGDSLHEHIANLAGSPAIKKGILQTVKVVDELVKVMGRHKPENIVIEMARENQTTQKGQKNSRERMKRIEEGIKELGSQILKEHPVENTQLQNEKLYLYYLQNGRDMYVDQELDINRLSDYDVDHIVPQSFLKDDSIDNKVLTRSDKARGKSDNVPSEEVVKKMKNYWRQLLNAKLITQRKFDNLTKAERGGLSELDKAGFIKRQLVETRQITKHVAQILDSRMNTKYDENDKLIREVKVITLKSKLVSDFRKDFQFYKVREINNYHHAHDAYLNAVVGTALIKKYPKLESEFVYGDYKVYDVRKMIAKSEQEIGKATAKYFFYSNIMNFFKTEITLANGEIRKRPLIETNGETGEIVWDKGRDFATVRKVLSMPQVNIVKKTEVQTGGFSKESILPKRNSDKLIARKKDWDPKKYGGFDSPTVAYSVLVVAKVEKGKSKKLKSVKELLGITIMERSSFEKNPIDFLEAKGYKEVKKDLIIKLPKYSLFELENGRKRMLASAGELQKGNELALPSKYVNFLYLASHYEKLKGSPEDNEQKQLFVEQHKHYLDEIIEQISEFSKRVILADANLDKVLSAYNKHRDKPIREQAENIIHLFTLTNLGAPAAFKYFDTTIDRKRYTSTKEVLDATLIHQSITGLYETRIDLSQLGGDGGPAPAPAPGGMNPLQLLQPLPAEIKGTKLLAHWNSGATITCIPESFLEDEQPIKKTLIKTIHGEKQQNVYYVTFKVKGRKVEAEVIASPYEYILLSPTDVPWLTQQPLQLTILVPLQEYQEKILSKTALPEDQKQQLKTLFVKYDNLWQHWENQVGHRKIRPHNIATGDYPPRPQKQYPINPKAKPSIQIVIDDLLKQGVLTPQNSTMNTPVYPVPKPDGRWRMVLDYREVNKTIPLTAAQNQHSAGILATIVRQKYKTTLDLANGFWAHPITPESYWLTAFTWQGKQYCWTRLPQGFLNSPALFNADVVDLLKEIPNVQVYVDDIYLSHDDPKEHVQQLEKVFQILLQAGYVVSLKKSEIGQKTVEFLGFNITKEGRGLTDTFKTKLLNITPPKDLKQLQSILGKLNFARNFIPNFAELVQPLYNLIAPAKGKYIEWSEENTKQLNMVIEALNTASNLEERLPEQRLVIKVNTSPSAGYVRYYNETGKKPIMYLNYVFSKAELKFSMLEKLLTTMHKALIKAMDLAMGQEILVYSPIVSMTKIQKTPLPERKALPIRWITWMTYLEDPRIQFHYDKTLPELKHIPDVYTSSQSPVKHPSQYEGVFYTDGSAIKSPDPTKSNNAGMGIVHATYKPEYQVLNQWSIPLGNHTAQMAEIAAVEFACKKALKIPGPVLVITDSFYVAESANKELPYWKSNGFVNNKKKPLKHISKWKSIAECLSMKPDITIQHEKGISLQIPVFILKGNALADKLATQGSYVVNAGKRTADGSEFEKRTADGSEFESPKKKAKVE

SEQ ID NO: 1364 - protein, 2174 aa, synthetic construct
MPAAKRVKLDGGDKKYSIGLDIGTNSVGWAVITDEYKVPSKKFKVLGNTDRHSIKKNLIGALLFDSGETAEATRLKRTARRRYTRRKNRICYLQEIFSNEMAKVDDSFFHRLEESFLVEEDKKHERHPIFGNIVDEVAYHEKYPTIYHLRKKLVDSTDKADLRLIYLALAHMIKFRGHFLIEGDLNPDNSDVDKLFIQLVQTYNQLFEENPINASGVDAKAILSARLSKSRRLENLIAQLPGEKKNGLFGNLIALSLGLTPNFKSNFDLAEDAKLQLSKDTYDDDLDNLLAQIGDQYADLFLAAKNLSDAILLSDILRVNTEITKAPLSASMIKRYDEHHQDLTLLKALVRQQLPEKYKEIFFDQSKNGYAGYIDGGASQEEFYKFIKPILEKMDGTEELLVKLNREDLLRKQRTFDNGSIPHQIHLGELHAILRRQEDFYPFLKDNREKIEKILTFRIPYYVGPLARGNSRFAWMTRKSEETITPWNFEEVVDKGASAQSFIERMTNFDKNLPNEKVLPKHSLLYEYFTVYNELTKVKYVTEGMRKPAFLSGEQKKAIVDLLFKTNRKVTVKQLKEDYFKKIECFDSVEISGVEDRFNASLGTYHDLLKIIKDKDFLDNEENEDILEDIVLTLTLFEDREMIEERLKTYAHLFDDKVMKQLKRRRYTGWGRLSRKLINGIRDKQSGKTILDFLKSDGFANRNFMQLIHDDSLTFKEDIQKAQVSGQGDSLHEHIANLAGSPAIKKGILQTVKVVDELVKVMGRHKPENIVIEMARENQTTQKGQKNSRERMKRIEEGIKELGSQILKEHPVENTQLQNEKLYLYYLQNGRDMYVDQELDINRLSDYDVDHIVPQSFLKDDSIDNKVLTRSDKARGKSDNVPSEEVVKKMKNYWRQLLNAKLITQRKFDNLTKAERGGLSELDKAGFIKRQLVETRQITKHVAQILDSRMNTKYDENDKLIREVKVITLKSKLVSDFRKDFQFYKVREINNYHHAHDAYLNAVVGTALIKKYPKLESEFVYGDYKVYDVRKMIAKSEQEIGKATAKYFFYSNIMNFFKTEITLANGEIRKRPLIETNGETGEIVWDKGRDFATVRKVLSMPQVNIVKKTEVQTGGFSKESILPKRNSDKLIARKKDWDPKKYGGFDSPTVAYSVLVVAKVEKGKSKKLKSVKELLGITIMERSSFEKNPIDFLEAKGYKEVKKDLIIKLPKYSLFELENGRKRMLASAGELQKGNELALPSKYVNFLYLASHYEKLKGSPEDNEQKQLFVEQHKHYLDEIIEQISEFSKRVILADANLDKVLSAYNKHRDKPIREQAENIIHLFTLTNLGAPAAFKYFDTTIDRKRYTSTKEVLDATLIHQSITGLYETRIDLSQLGGDGGPAPAPAPAPGGMNPLQLLQPLPAEIKGTKLLAHWNSGATITCIPESFLEDEQPIKKTLIKTIHGEKQQNVYYVTFKVKGRKVEAEVIASPYEYILLSPTDVPWLTQQPLQLTILVPLQEYQEKILSKTALPEDQKQQLKTLFVKYDNLWQHWENQVGHRKIRPHNIATGDYPPRPQKQYPINPKAKPSIQIVIDDLLKQGVLTPQNSTMNTPVYPVPKPDGRWRMVLDYREVNKTIPLTAAQNQHSAGILATIVRQKYKTTLDLANGFWAHPITPESYWLTAFTWQGKQYCWTRLPQGFLNSPALFNADVVDLLKEIPNVQVYVDDIYLSHDDPKEHVQQLEKVFQILLQAGYVVSLKKSEIGQKTVEFLGFNITKEGRGLTDTFKTKLLNITPPKDLKQLQSILGKLNFARNFIPNFAELVQPLYNLIAPAKGKYIEWSEENTKQLNMVIEALNTASNLEERLPEQRLVIKVNTSPSAGYVRYYNETGKKPIMYLNYVFSKAELKFSMLEKLLTTMHKALIKAMDLAMGQEILVYSPIVSMTKIQKTPLPERKALPIRWITWMTYLEDPRIQFHYDKTLPELKHIPDVYTSSQSPVKHPSQYEGVFYTDGSAIKSPDPTKSNNAGMGIVHATYKPEYQVLNQWSIPLGNHTAQMAEIAAVEFACKKALKIPGPVLVITDSFYVAESANKELPYWKSNGFVNNKKKPLKHISKWKSIAECLSMKPDITIQHEKGISLQIPVFILKGNALADKLATQGSYVVNAGKRTADGSEFEKRTADGSEFESPKKKAKVE

SEQ ID NO: 1365 - protein, 2094 aa, synthetic construct
MPAAKRVKLDGGDKKYSIGLDIGTNSVGWAVITDEYKVPSKKFKVLGNTDRHSIKKNLIGALLFDSGETAEATRLKRTARRRYTRRKNRICYLQEIFSNEMAKVDDSFFHRLEESFLVEEDKKHERHPIFGNIVDEVAYHEKYPTIYHLRKKLVDSTDKADLRLIYLALAHMIKFRGHFLIEGDLNPDNSDVDKLFIQLVQTYNQLFEENPINASGVDAKAILSARLSKSRRLENLIAQLPGEKKNGLFGNLIALSLGLTPNFKSNFDLAEDAKLQLSKDTYDDDLDNLLAQIGDQYADLFLAAKNLSDAILLSDILRVNTEITKAPLSASMIKRYDEHHQDLTLLKALVRQQLPEKYKEIFFDQSKNGYAGYIDGGASQEEFYKFIKPILEKMDGTEELLVKLNREDLLRKQRTFDNGSIPHQIHLGELHAILRRQEDFYPFLKDNREKIEKILTFRIPYYVGPLARGNSRFAWMTRKSEETITPWNFEEVVDKGASAQSFIERMTNFDKNLPNEKVLPKHSLLYEYFTVYNELTKVKYVTEGMRKPAFLSGEQKKAIVDLLFKTNRKVTVKQLKEDYFKKIECFDSVEISGVEDRFNASLGTYHDLLKIIKDKDFLDNEENEDILEDIVLTLTLFEDREMIEERLKTYAHLFDDKVMKQLKRRRYTGWGRLSRKLINGIRDKQSGKTILDFLKSDGFANRNFMQLIHDDSLTFKEDIQKAQVSGQGDSLHEHIANLAGSPAIKKGILQTVKVVDELVKVMGRHKPENIVIEMARENQTTQKGQKNSRERMKRIEEGIKELGSQILKEHPVENTQLQNEKLYLYYLQNGRDMYVDQELDINRLSDYDVDHIVPQSFLKDDSIDNKVLTRSDKARGKSDNVPSEEVVKKMKNYWRQLLNAKLITQRKFDNLTKAERGGLSELDKAGFIKRQLVETRQITKHVAQILDSRMNTKYDENDKLIREVKVITLKSKLVSDFRKDFQFYKVREINNYHHAHDAYLNAVVGTALIKKYPKLESEFVYGDYKVYDVRKMIAKSEQEIGKATAKYFFYSNIMNFFKTEITLANGEIRKRPLIETNGETGEIVWDKGRDFATVRKVLSMPQVNIVKKTEVQTGGFSKESILPKRNSDKLIARKKDWDPKKYGGFDSPTVAYSVLVVAKVEKGKSKKLKSVKELLGITIMERSSFEKNPIDFLEAKGYKEVKKDLIIKLPKYSLFELENGRKRMLASAGELQKGNELALPSKYVNFLYLASHYEKLKGSPEDNEQKQLFVEQHKHYLDEIIEQISEFSKRVILADANLDKVLSAYNKHRDKPIREQAENIIHLFTLTNLGAPAAFKYFDTTIDRKRYTSTKEVLDATLIHQSITGLYETRIDLSQLGGDGGEAAAKGGSPAPGGVLNLEEEYRLHEKPVPSSIDPSWLQLFPTVWAERAGMGLANQVPPVVVELRSGASPVAVRQYPMSKEAREGIRPHIQKFLDLGVLVPCRSPWNTPLLPVKKPGTNDYRPVQDLREINKRVQDIHPTVPNPYNLLSSLPPSYTWYSVLDLKDAFFCLRLHPNSQPLFAFEWKDPEKGNTGQLTWTRLPQGFKNSPTLFDEALHRDLAPFRALNPQVVLLQYVDDLLVAAPTYEDCKKGTQKLLQELSKLGYRVSAKKAQLCQREVTYLGYLLKEGKRWLTPARKATVMKIPVPTTPRQVREFLGTAGFCRLWIPGFASLAAPLYPLTKESIPFIWTEEHQQAFDHIKKALLSAPALALPDLTKPFTLYIDERAGVARGVLTQTLGPWRRPVAYLSKKLDPVASGWPTCLKAVAAVALLLKDADKLTLGQNVTVIASHSLESIVRQPPDRWMTNARMTHYQSLLLNERVSFAPPAVLNPATLLPVESEATPVHRCSEILAEETGTRRDLEDQPLPGVPTWYTDGSSFITEGKRRAGAPIVDGKRTVWASSLPEGTSAQKAELVALTQALRLAEGKNINIYTDSRYAFATAHIHGAIYKQRGLLTSAGKDIKNKEEILALLEAIHLPRRVAIIHCPGHQRGSNPVATGNRRADEAAKQAALSTRVLAGTTKPAGKRTADGSEFEKRTADGSEFESPKKKAKVE

SEQ ID NO: 1366 - protein, 2101 aa, synthetic construct
MPAAKRVKLDGGDKKYSIGLDIGTNSVGWAVITDEYKVPSKKFKVLGNTDRHSIKKNLIGALLFDSGETAEATRLKRTARRRYTRRKNRICYLQEIFSNEMAKVDDSFFHRLEESFLVEEDKKHERHPIFGNIVDEVAYHEKYPTIYHLRKKLVDSTDKADLRLIYLALAHMIKFRGHFLIEGDLNPDNSDVDKLFIQLVQTYNQLFEENPINASGVDAKAILSARLSKSRRLENLIAQLPGEKKNGLFGNLIALSLGLTPNFKSNFDLAEDAKLQLSKDTYDDDLDNLLAQIGDQYADLFLAAKNLSDAILLSDILRVNTEITKAPLSASMIKRYDEHHQDLTLLKALVRQQLPEKYKEIFFDQSKNGYAGYIDGGASQEEFYKFIKPILEKMDGTEELLVKLNREDLLRKQRTFDNGSIPHQIHLGELHAILRRQEDFYPFLKDNREKIEKILTFRIPYYVGPLARGNSRFAWMTRKSEETITPWNFEEVVDKGASAQSFIERMTNFDKNLPNEKVLPKHSLLYEYFTVYNELTKVKYVTEGMRKPAFLSGEQKKAIVDLLFKTNRKVTVKQLKEDYFKKIECFDSVEISGVEDRFNASLGTYHDLLKIIKDKDFLDNEENEDILEDIVLTLTLFEDREMIEERLKTYAHLFDDKVMKQLKRRRYTGWGRLSRKLINGIRDKQSGKTILDFLKSDGFANRNFMQLIHDDSLTFKEDIQKAQVSGQGDSLHEHIANLAGSPAIKKGILQTVKVVDELVKVMGRHKPENIVIEMARENQTTQKGQKNSRERMKRIEEGIKELGSQILKEHPVENTQLQNEKLYLYYLQNGRDMYVDQELDINRLSDYDVDHIVPQSFLKDDSIDNKVLTRSDKARGKSDNVPSEEVVKKMKNYWRQLLNAKLITQRKFDNLTKAERGGLSELDKAGFIKRQLVETRQITKHVAQILDSRMNTKYDENDKLIREVKVITLKSKLVSDFRKDFQFYKVREINNYHHAHDAYLNAVVGTALIKKYPKLESEFVYGDYKVYDVRKMIAKSEQEIGKATAKYFFYSNIMNFFKTEITLANGEIRKRPLIETNGETGEIVWDKGRDFATVRKVLSMPQVNIVKKTEVQTGGFSKESILPKRNSDKLIARKKDWDPKKYGGFDSPTVAYSVLVVAKVEKGKSKKLKSVKELLGITIMERSSFEKNPIDFLEAKGYKEVKKDLIIKLPKYSLFELENGRKRMLASAGELQKGNELALPSKYVNFLYLASHYEKLKGSPEDNEQKQLFVEQHKHYLDEIIEQISEFSKRVILADANLDKVLSAYNKHRDKPIREQAENIIHLFTLTNLGAPAAFKYFDTTIDRKRYTSTKEVLDATLIHQSITGLYETRIDLSQLGGDGGGSSGSSGSSGSSGSSGSSGGVLNLEEEYRLHEKPVPSSIDPSWLQLFPTVWAERAGMGLANQVPPVVVELRSGASPVAVRQYPMSKEAREGIRPHIQKFLDLGVLVPCRSPWNTPLLPVKKPGTNDYRPVQDLREINKRVQDIHPTVPNPYNLLSSLPPSYTWYSVLDLKDAFFCLRLHPNSQPLFAFEWKDPEKGNTGQLTWTRLPQGFKNSPTLFDEALHRDLAPFRALNPQVVLLQYVDDLLVAAPTYEDCKKGTQKLLQELSKLGYRVSAKKAQLCQREVTYLGYLLKEGKRWLTPARKATVMKIPVPTTPRQVREFLGTAGFCRLWIPGFASLAAPLYPLTKESIPFIWTEEHQQAFDHIKKALLSAPALALPDLTKPFTLYIDERAGVARGVLTQTLGPWRRPVAYLSKKLDPVASGWPTCLKAVAAVALLLKDADKLTLGQNVTVIASHSLESIVRQPPDRWMTNARMTHYQSLLLNERVSFAPPAVLNPATLLPVESEATPVHRCSEILAEETGTRRDLEDQPLPGVPTWYTDGSSFITEGKRRAGAPIVDGKRTVWASSLPEGTSAQKAELVALTQALRLAEGKNINIYTDSRYAFATAHIHGAIYKQRGLLTSAGKDIKNKEEILALLEAIHLPRRVAIIHCPGHQRGSNPVATGNRRADEAAKQAALSTRVLAGTTKPAGKRTADGSEFEKRTADGSEFESPKKKAKVE

SEQ ID NO: 1367 - protein, 2103 aa, synthetic construct
MPAAKRVKLDGGDKKYSIGLDIGTNSVGWAVITDEYKVPSKKFKVLGNTDRHSIKKNLIGALLFDSGETAEATRLKRTARRRYTRRKNRICYLQEIFSNEMAKVDDSFFHRLEESFLVEEDKKHERHPIFGNIVDEVAYHEKYPTIYHLRKKLVDSTDKADLRLIYLALAHMIKFRGHFLIEGDLNPDNSDVDKLFIQLVQTYNQLFEENPINASGVDAKAILSARLSKSRRLENLIAQLPGEKKNGLFGNLIALSLGLTPNFKSNFDLAEDAKLQLSKDTYDDDLDNLLAQIGDQYADLFLAAKNLSDAILLSDILRVNTEITKAPLSASMIKRYDEHHQDLTLLKALVRQQLPEKYKEIFFDQSKNGYAGYIDGGASQEEFYKFIKPILEKMDGTEELLVKLNREDLLRKQRTFDNGSIPHQIHLGELHAILRRQEDFYPFLKDNREKIEKILTFRIPYYVGPLARGNSRFAWMTRKSEETITPWNFEEVVDKGASAQSFIERMTNFDKNLPNEKVLPKHSLLYEYFTVYNELTKVKYVTEGMRKPAFLSGEQKKAIVDLLFKTNRKVTVKQLKEDYFKKIECFDSVEISGVEDRFNASLGTYHDLLKIIKDKDFLDNEENEDILEDIVLTLTLFEDREMIEERLKTYAHLFDDKVMKQLKRRRYTGWGRLSRKLINGIRDKQSGKTILDFLKSDGFANRNFMQLIHDDSLTFKEDIQKAQVSGQGDSLHEHIANLAGSPAIKKGILQTVKVVDELVKVMGRHKPENIVIEMARENQTTQKGQKNSRERMKRIEEGIKELGSQILKEHPVENTQLQNEKLYLYYLQNGRDMYVDQELDINRLSDYDVDHIVPQSFLKDDSIDNKVLTRSDKARGKSDNVPSEEVVKKMKNYWRQLLNAKLITQRKFDNLTKAERGGLSELDKAGFIKRQLVETRQITKHVAQILDSRMNTKYDENDKLIREVKVITLKSKLVSDFRKDFQFYKVREINNYHHAHDAYLNAVVGTALIKKYPKLESEFVYGDYKVYDVRKMIAKSEQEIGKATAKYFFYSNIMNFFKTEITLANGEIRKRPLIETNGETGEIVWDKGRDFATVRKVLSMPQVNIVKKTEVQTGGFSKESILPKRNSDKLIARKKDWDPKKYGGFDSPTVAYSVLVVAKVEKGKSKKLKSVKELLGITIMERSSFEKNPIDFLEAKGYKEVKKDLIIKLPKYSLFELENGRKRMLASAGELQKGNELALPSKYVNFLYLASHYEKLKGSPEDNEQKQLFVEQHKHYLDEIIEQISEFSKRVILADANLDKVLSAYNKHRDKPIREQAENIIHLFTLTNLGAPAAFKYFDTTIDRKRYTSTKEVLDATLIHQSITGLYETRIDLSQLGGDGGEAAAKEAAAKEAAAKEAAAKGGVLNLEEEYRLHEKPVPSSIDPSWLQLFPTVWAERAGMGLANQVPPVVVELRSGASPVAVRQYPMSKEAREGIRPHIQKFLDLGVLVPCRSPWNTPLLPVKKPGTNDYRPVQDLREINKRVQDIHPTVPNPYNLLSSLPPSYTWYSVLDLKDAFFCLRLHPNSQPLFAFEWKDPEKGNTGQLTWTRLPQGFKNSPTLFDEALHRDLAPFRALNPQVVLLQYVDDLLVAAPTYEDCKKGTQKLLQELSKLGYRVSAKKAQLCQREVTYLGYLLKEGKRWLTPARKATVMKIPVPTTPRQVREFLGTAGFCRLWIPGFASLAAPLYPLTKESIPFIWTEEHQQAFDHIKKALLSAPALALPDLTKPFTLYIDERAGVARGVLTQTLGPWRRPVAYLSKKLDPVASGWPTCLKAVAAVALLLKDADKLTLGQNVTVIASHSLESIVRQPPDRWMTNARMTHYQSLLLNERVSFAPPAVLNPATLLPVESEATPVHRCSEILAEETGTRRDLEDQPLPGVPTWYTDGSSFITEGKRRAGAPIVDGKRTVWASSLPEGTSAQKAELVALTQALRLAEGKNINIYTDSRYAFATAHIHGAIYKQRGLLTSAGKDIKNKEEILALLEAIHLPRRVAIIHCPGHQRGSNPVATGNRRADEAAKQAALSTRVLAGTTKPAGKRTADGSEFEKRTADGSEFESPKKKAKVE

SEQ ID NO: 1368 - protein, 2098 aa, synthetic construct
MPAAKRVKLDGGDKKYSIGLDIGTNSVGWAVITDEYKVPSKKFKVLGNTDRHSIKKNLIGALLFDSGETAEATRLKRTARRRYTRRKNRICYLQEIFSNEMAKVDDSFFHRLEESFLVEEDKKHERHPIFGNIVDEVAYHEKYPTIYHLRKKLVDSTDKADLRLIYLALAHMIKFRGHFLIEGDLNPDNSDVDKLFIQLVQTYNQLFEENPINASGVDAKAILSARLSKSRRLENLIAQLPGEKKNGLFGNLIALSLGLTPNFKSNFDLAEDAKLQLSKDTYDDDLDNLLAQIGDQYADLFLAAKNLSDAILLSDILRVNTEITKAPLSASMIKRYDEHHQDLTLLKALVRQQLPEKYKEIFFDQSKNGYAGYIDGGASQEEFYKFIKPILEKMDGTEELLVKLNREDLLRKQRTFDNGSIPHQIHLGELHAILRRQEDFYPFLKDNREKIEKILTFRIPYYVGPLARGNSRFAWMTRKSEETITPWNFEEVVDKGASAQSFIERMTNFDKNLPNEKVLPKHSLLYEYFTVYNELTKVKYVTEGMRKPAFLSGEQKKAIVDLLFKTNRKVTVKQLKEDYFKKIECFDSVEISGVEDRFNASLGTYHDLLKIIKDKDFLDNEENEDILEDIVLTLTLFEDREMIEERLKTYAHLFDDKVMKQLKRRRYTGWGRLSRKLINGIRDKQSGKTILDFLKSDGFANRNFMQLIHDDSLTFKEDIQKAQVSGQGDSLHEHIANLAGSPAIKKGILQTVKVVDELVKVMGRHKPENIVIEMARENQTTQKGQKNSRERMKRIEEGIKELGSQILKEHPVENTQLQNEKLYLYYLQNGRDMYVDQELDINRLSDYDVDHIVPQSFLKDDSIDNKVLTRSDKARGKSDNVPSEEVVKKMKNYWRQLLNAKLITQRKFDNLTKAERGGLSELDKAGFIKRQLVETRQITKHVAQILDSRMNTKYDENDKLIREVKVITLKSKLVSDFRKDFQFYKVREINNYHHAHDAYLNAVVGTALIKKYPKLESEFVYGDYKVYDVRKMIAKSEQEIGKATAKYFFYSNIMNFFKTEITLANGEIRKRPLIETNGETGEIVWDKGRDFATVRKVLSMPQVNIVKKTEVQTGGFSKESILPKRNSDKLIARKKDWDPKKYGGFDSPTVAYSVLVVAKVEKGKSKKLKSVKELLGITIMERSSFEKNPIDFLEAKGYKEVKKDLIIKLPKYSLFELENGRKRMLASAGELQKGNELALPSKYVNFLYLASHYEKLKGSPEDNEQKQLFVEQHKHYLDEIIEQISEFSKRVILADANLDKVLSAYNKHRDKPIREQAENIIHLFTLTNLGAPAAFKYFDTTIDRKRYTSTKEVLDATLIHQSITGLYETRIDLSQLGGDGGGSSGSSGSSGSSGSSGGVLNLEEEYRLHEKPVPSSIDPSWLQLFPTVWAERAGMGLANQVPPVVVELRSGASPVAVRQYPMSKEAREGIRPHIQKFLDLGVLVPCRSPWNTPLLPVKKPGTNDYRPVQDLREINKRVQDIHPTVPNPYNLLSSLPPSYTWYSVLDLKDAFFCLRLHPNSQPLFAFEWKDPEKGNTGQLTWTRLPQGFKNSPTLFDEALHRDLAPFRALNPQVVLLQYVDDLLVAAPTYEDCKKGTQKLLQELSKLGYRVSAKKAQLCQREVTYLGYLLKEGKRWLTPARKATVMKIPVPTTPRQVREFLGTAGFCRLWIPGFASLAAPLYPLTKESIPFIWTEEHQQAFDHIKKALLSAPALALPDLTKPFTLYIDERAGVARGVLTQTLGPWRRPVAYLSKKLDPVASGWPTCLKAVAAVALLLKDADKLTLGQNVTVIASHSLESIVRQPPDRWMTNARMTHYQSLLLNERVSFAPPAVLNPATLLPVESEATPVHRCSEILAEETGTRRDLEDQPLPGVPTWYTDGSSFITEGKRRAGAPIVDGKRTVWASSLPEGTSAQKAELVALTQALRLAEGKNINIYTDSRYAFATAHIHGAIYKQRGLLTSAGKDIKNKEEILALLEAIHLPRRVAIIHCPGHQRGSNPVATGNRRADEAAKQAALSTRVLAGTTKPAGKRTADGSEFEKRTADGSEFESPKKKAKVE

SEQ ID NO: 1369 - protein, 2094 aa, synthetic construct
MPAAKRVKLDGGDKKYSIGLDIGTNSVGWAVITDEYKVPSKKFKVLGNTDRHSIKKNLIGALLFDSGETAEATRLKRTARRRYTRRKNRICYLQEIFSNEMAKVDDSFFHRLEESFLVEEDKKHERHPIFGNIVDEVAYHEKYPTIYHLRKKLVDSTDKADLRLIYLALAHMIKFRGHFLIEGDLNPDNSDVDKLFIQLVQTYNQLFEENPINASGVDAKAILSARLSKSRRLENLIAQLPGEKKNGLFGNLIALSLGLTPNFKSNFDLAEDAKLQLSKDTYDDDLDNLLAQIGDQYADLFLAAKNLSDAILLSDILRVNTEITKAPLSASMIKRYDEHHQDLTLLKALVRQQLPEKYKEIFFDQSKNGYAGYIDGGASQEEFYKFIKPILEKMDGTEELLVKLNREDLLRKQRTFDNGSIPHQIHLGELHAILRRQEDFYPFLKDNREKIEKILTFRIPYYVGPLARGNSRFAWMTRKSEETITPWNFEEVVDKGASAQSFIERMTNFDKNLPNEKVLPKHSLLYEYFTVYNELTKVKYVTEGMRKPAFLSGEQKKAIVDLLFKTNRKVTVKQLKEDYFKKIECFDSVEISGVEDRFNASLGTYHDLLKIIKDKDFLDNEENEDILEDIVLTLTLFEDREMIEERLKTYAHLFDDKVMKQLKRRRYTGWGRLSRKLINGIRDKQSGKTILDFLKSDGFANRNFMQLIHDDSLTFKEDIQKAQVSGQGDSLHEHIANLAGSPAIKKGILQTVKVVDELVKVMGRHKPENIVIEMARENQTTQKGQKNSRERMKRIEEGIKELGSQILKEHPVENTQLQNEKLYLYYLQNGRDMYVDQELDINRLSDYDVDHIVPQSFLKDDSIDNKVLTRSDKARGKSDNVPSEEVVKKMKNYWRQLLNAKLITQRKFDNLTKAERGGLSELDKAGFIKRQLVETRQITKHVAQILDSRMNTKYDENDKLIREVKVITLKSKLVSDFRKDFQFYKVREINNYHHAHDAYLNAVVGTALIKKYPKLESEFVYGDYKVYDVRKMIAKSEQEIGKATAKYFFYSNIMNFFKTEITLANGEIRKRPLIETNGETGEIVWDKGRDFATVRKVLSMPQVNIVKKTEVQTGGFSKESILPKRNSDKLIARKKDWDPKKYGGFDSPTVAYSVLVVAKVEKGKSKKLKSVKELLGITIMERSSFEKNPIDFLEAKGYKEVKKDLIIKLPKYSLFELENGRKRMLASAGELQKGNELALPSKYVNFLYLASHYEKLKGSPEDNEQKQLFVEQHKHYLDEIIEQISEFSKRVILADANLDKVLSAYNKHRDKPIREQAENIIHLFTLTNLGAPAAFKYFDTTIDRKRYTSTKEVLDATLIHQSITGLYETRIDLSQLGGDGGEAAAKGSSGGSGGVLNLEEEYRLHEKPVPSSIDPSWLQLFPTVWAERAGMGLANQVPPVVVELRSGASPVAVRQYPMSKEAREGIRPHIQKFLDLGVLVPCRSPWNTPLLPVKKPGTNDYRPVQDLREINKRVQDIHPTVPNPYNLLSSLPPSYTWYSVLDLKDAFFCLRLHPNSQPLFAFEWKDPEKGNTGQLTWTRLPQGFKNSPTLFDEALHRDLAPFRALNPQVVLLQYVDDLLVAAPTYEDCKKGTQKLLQELSKLGYRVSAKKAQLCQREVTYLGYLLKEGKRWLTPARKATVMKIPVPTTPRQVREFLGTAGFCRLWIPGFASLAAPLYPLTKESIPFIWTEEHQQAFDHIKKALLSAPALALPDLTKPFTLYIDERAGVARGVLTQTLGPWRRPVAYLSKKLDPVASGWPTCLKAVAAVALLLKDADKLTLGQNVTVIASHSLESIVRQPPDRWMTNARMTHYQSLLLNERVSFAPPAVLNPATLLPVESEATPVHRCSEILAEETGTRRDLEDQPLPGVPTWYTDGSSFITEGKRRAGAPIVDGKRTVWASSLPEGTSAQKAELVALTQALRLAEGKNINIYTDSRYAFATAHIHGAIYKQRGLLTSAGKDIKNKEEILALLEAIHLPRRVAIIHCPGHQRGSNPVATGNRRADEAAKQAALSTRVLAGTTKPAGKRTADGSEFEKRTADGSEFESPKKKAKVE

SEQ ID NO: 1370 - protein, 2129 aa, synthetic construct
MPAAKRVKLDGGDKKYSIGLDIGTNSVGWAVITDEYKVPSKKFKVLGNTDRHSIKKNLIGALLFDSGETAEATRLKRTARRRYTRRKNRICYLQEIFSNEMAKVDDSFFHRLEESFLVEEDKKHERHPIFGNIVDEVAYHEKYPTIYHLRKKLVDSTDKADLRLIYLALAHMIKFRGHFLIEGDLNPDNSDVDKLFIQLVQTYNQLFEENPINASGVDAKAILSARLSKSRRLENLIAQLPGEKKNGLFGNLIALSLGLTPNFKSNFDLAEDAKLQLSKDTYDDDLDNLLAQIGDQYADLFLAAKNLSDAILLSDILRVNTEITKAPLSASMIKRYDEHHQDLTLLKALVRQQLPEKYKEIFFDQSKNGYAGYIDGGASQEEFYKFIKPILEKMDGTEELLVKLNREDLLRKQRTFDNGSIPHQIHLGELHAILRRQEDFYPFLKDNREKIEKILTFRIPYYVGPLARGNSRFAWMTRKSEETITPWNFEEVVDKGASAQSFIERMTNFDKNLPNEKVLPKHSLLYEYFTVYNELTKVKYVTEGMRKPAFLSGEQKKAIVDLLFKTNRKVTVKQLKEDYFKKIECFDSVEISGVEDRFNASLGTYHDLLKIIKDKDFLDNEENEDILEDIVLTLTLFEDREMIEERLKTYAHLFDDKVMKQLKRRRYTGWGRLSRKLINGIRDKQSGKTILDFLKSDGFANRNFMQLIHDDSLTFKEDIQKAQVSGQGDSLHEHIANLAGSPAIKKGILQTVKVVDELVKVMGRHKPENIVIEMARENQTTQKGQKNSRERMKRIEEGIKELGSQILKEHPVENTQLQNEKLYLYYLQNGRDMYVDQELDINRLSDYDVDHIVPQSFLKDDSIDNKVLTRSDKARGKSDNVPSEEVVKKMKNYWRQLLNAKLITQRKFDNLTKAERGGLSELDKAGFIKRQLVETRQITKHVAQILDSRMNTKYDENDKLIREVKVITLKSKLVSDFRKDFQFYKVREINNYHHAHDAYLNAVVGTALIKKYPKLESEFVYGDYKVYDVRKMIAKSEQEIGKATAKYFFYSNIMNFFKTEITLANGEIRKRPLIETNGETGEIVWDKGRDFATVRKVLSMPQVNIVKKTEVQTGGFSKESILPKRNSDKLIARKKDWDPKKYGGFDSPTVAYSVLVVAKVEKGKSKKLKSVKELLGITIMERSSFEKNPIDFLEAKGYKEVKKDLIIKLPKYSLFELENGRKRMLASAGELQKGNELALPSKYVNFLYLASHYEKLKGSPEDNEQKQLFVEQHKHYLDEIIEQISEFSKRVILADANLDKVLSAYNKHRDKPIREQAENIIHLFTLTNLGAPAAFKYFDTTIDRKRYTSTKEVLDATLIHQSITGLYETRIDLSQLGGDGGAEAAAKEAAAKEAAAKEAAAKALEAEAAAKEAAAKEAAAKEAAAKAGGVLNLEEEYRLHEKPVPSSIDPSWLQLFPTVWAERAGMGLANQVPPVVVELRSGASPVAVRQYPMSKEAREGIRPHIQKFLDLGVLVPCRSPWNTPLLPVKKPGTNDYRPVQDLREINKRVQDIHPTVPNPYNLLSSLPPSYTWYSVLDLKDAFFCLRLHPNSQPLFAFEWKDPEKGNTGQLTWTRLPQGFKNSPTLFNEALHRDLAPFRALNPQVVLLQYVDDLLVAAPTYEDCKKGTQKLLQELSKLGYRVSAKKAQLCQREVTYLGYLLKEGKRWLTPARKATVMKIPVPTTPRQVREFLGTAGFCRLWIPGFASLAAPLYPLTKPSIPFIWTEEHQQAFDHIKKALLSAPALALPDLTKPFTLYIDERAGVARGVLTQTLGPWRRPVAYLSKKLDPVASGWPTCLKAVAAVALLLKDADKLTLGQNVTVIASHSLESIVRQPPDRWMTNARMTHYQSLLLNERVSFAPPAVLNPATLLPVESEATPVHRCSEILAEETGTRRDLEDQPLPGVPTWYTDGSSFITEGKRRAGAPIVDGKRTVWASSLPEGTSAQKAELVALTQALRLAEGKNINIYTDSRYAFATAHIHGAIYKQRGWLTSAGKDIKNKEEILALLEAIHLPRRVAIIHCPGHQRGSNPVATGNRRADEAAKQAALSTRVLAGTTKPAGKRTADGSEFEKRTADGSEFESPKKKAKVE

SEQ ID NO: 1371 - protein, 2098 aa, synthetic construct
MPAAKRVKLDGGDKKYSIGLDIGTNSVGWAVITDEYKVPSKKFKVLGNTDRHSIKKNLIGALLFDSGETAEATRLKRTARRRYTRRKNRICYLQEIFSNEMAKVDDSFFHRLEESFLVEEDKKHERHPIFGNIVDEVAYHEKYPTIYHLRKKLVDSTDKADLRLIYLALAHMIKFRGHFLIEGDLNPDNSDVDKLFIQLVQTYNQLFEENPINASGVDAKAILSARLSKSRRLENLIAQLPGEKKNGLFGNLIALSLGLTPNFKSNFDLAEDAKLQLSKDTYDDDLDNLLAQIGDQYADLFLAAKNLSDAILLSDILRVNTEITKAPLSASMIKRYDEHHQDLTLLKALVRQQLPEKYKEIFFDQSKNGYAGYIDGGASQEEFYKFIKPILEKMDGTEELLVKLNREDLLRKQRTFDNGSIPHQIHLGELHAILRRQEDFYPFLKDNREKIEKILTFRIPYYVGPLARGNSRFAWMTRKSEETITPWNFEEVVDKGASAQSFIERMTNFDKNLPNEKVLPKHSLLYEYFTVYNELTKVKYVTEGMRKPAFLSGEQKKAIVDLLFKTNRKVTVKQLKEDYFKKIECFDSVEISGVEDRFNASLGTYHDLLKIIKDKDFLDNEENEDILEDIVLTLTLFEDREMIEERLKTYAHLFDDKVMKQLKRRRYTGWGRLSRKLINGIRDKQSGKTILDFLKSDGFANRNFMQLIHDDSLTFKEDIQKAQVSGQGDSLHEHIANLAGSPAIKKGILQTVKVVDELVKVMGRHKPENIVIEMARENQTTQKGQKNSRERMKRIEEGIKELGSQILKEHPVENTQLQNEKLYLYYLQNGRDMYVDQELDINRLSDYDVDHIVPQSFLKDDSIDNKVLTRSDKARGKSDNVPSEEVVKKMKNYWRQLLNAKLITQRKFDNLTKAERGGLSELDKAGFIKRQLVETRQITKHVAQILDSRMNTKYDENDKLIREVKVITLKSKLVSDFRKDFQFYKVREINNYHHAHDAYLNAVVGTALIKKYPKLESEFVYGDYKVYDVRKMIAKSEQEIGKATAKYFFYSNIMNFFKTEITLANGEIRKRPLIETNGETGEIVWDKGRDFATVRKVLSMPQVNIVKKTEVQTGGFSKESILPKRNSDKLIARKKDWDPKKYGGFDSPTVAYSVLVVAKVEKGKSKKLKSVKELLGITIMERSSFEKNPIDFLEAKGYKEVKKDLIIKLPKYSLFELENGRKRMLASAGELQKGNELALPSKYVNFLYLASHYEKLKGSPEDNEQKQLFVEQHKHYLDEIIEQISEFSKRVILADANLDKVLSAYNKHRDKPIREQAENIIHLFTLTNLGAPAAFKYFDTTIDRKRYTSTKEVLDATLIHQSITGLYETRIDLSQLGGDGGPAPGGSEAAAKGGTAPLEEEYRLFLEAPIQNVTLLEQWKREIPKVWAEINPPGLASTQAPIHVQLLSTALPVRVRQYPITLEAKRSLRETIRKFRAAGILRPVHSPWNTPLLPVRKSGTSEYRMVQDLREVNKRVETIHPTVPNPYTLLSLLPPDRIWYSVLDLKDAFFCIPLAPESQLIFAFEWADAEEGESGQLTWTRLPQGFKNSPTLFNEALNRDLQGFRLDHPSVSLLQYVDDLLIAADTQAACLSATRDLLMTLAELGYRVSGKKAQLCQEEVTYLGFKIHKGSRSLSNSRTQAILQIPVPKTKRQVREFLGKIGYCRLFIPGFAELAQPLYAATRPGNDPLVWGEKEEEAFQSLKLALTQPPALALPSLDKPFQLFVEETSGAAKGVLTQALGPWKRPVAYLSKRLDPVAAGWPRCLRAIAAAALLTREASKLTFGQDIEITSSHNLESLLRSPPDKWLTNARITQYQVLLLDPPRVRFKQTAALNPATLLPETDDTLPIHHCLDTLDSLTSTRPDLTDQPLAQAEATLFTDGSSYIRDGKRYAGAAVVTLDSVIWAEPLPIGTSAQKAELIALTKALEWSKDKSVNIYTDSRYAFATLHVHGMIYRERGWLTAGGKAIKNAPEILALLTAVWLPKRVAVMHCKGHQKDDAPTSTGNRRADEVAREVAIRPLSTQATISAGKRTADGSEFEKRTADGSEFESPKKKAKVE

SEQ ID NO: 1372 - protein, 2133 aa, synthetic construct
MPAAKRVKLDGGDKKYSIGLDIGTNSVGWAVITDEYKVPSKKFKVLGNTDRHSIKKNLIGALLFDSGETAEATRLKRTARRRYTRRKNRICYLQEIFSNEMAKVDDSFFHRLEESFLVEEDKKHERHPIFGNIVDEVAYHEKYPTIYHLRKKLVDSTDKADLRLIYLALAHMIKFRGHFLIEGDLNPDNSDVDKLFIQLVQTYNQLFEENPINASGVDAKAILSARLSKSRRLENLIAQLPGEKKNGLFGNLIALSLGLTPNFKSNFDLAEDAKLQLSKDTYDDDLDNLLAQIGDQYADLFLAAKNLSDAILLSDILRVNTEITKAPLSASMIKRYDEHHQDLTLLKALVRQQLPEKYKEIFFDQSKNGYAGYIDGGASQEEFYKFIKPILEKMDGTEELLVKLNREDLLRKQRTFDNGSIPHQIHLGELHAILRRQEDFYPFLKDNREKIEKILTFRIPYYVGPLARGNSRFAWMTRKSEETITPWNFEEVVDKGASAQSFIERMTNFDKNLPNEKVLPKHSLLYEYFTVYNELTKVKYVTEGMRKPAFLSGEQKKAIVDLLFKTNRKVTVKQLKEDYFKKIECFDSVEISGVEDRFNASLGTYHDLLKIIKDKDFLDNEENEDILEDIVLTLTLFEDREMIEERLKTYAHLFDDKVMKQLKRRRYTGWGRLSRKLINGIRDKQSGKTILDFLKSDGFANRNFMQLIHDDSLTFKEDIQKAQVSGQGDSLHEHIANLAGSPAIKKGILQTVKVVDELVKVMGRHKPENIVIEMARENQTTQKGQKNSRERMKRIEEGIKELGSQILKEHPVENTQLQNEKLYLYYLQNGRDMYVDQELDINRLSDYDVDHIVPQSFLKDDSIDNKVLTRSDKARGKSDNVPSEEVVKKMKNYWRQLLNAKLITQRKFDNLTKAERGGLSELDKAGFIKRQLVETRQITKHVAQILDSRMNTKYDENDKLIREVKVITLKSKLVSDFRKDFQFYKVREINNYHHAHDAYLNAVVGTALIKKYPKLESEFVYGDYKVYDVRKMIAKSEQEIGKATAKYFFYSNIMNFFKTEITLANGEIRKRPLIETNGETGEIVWDKGRDFATVRKVLSMPQVNIVKKTEVQTGGFSKESILPKRNSDKLIARKKDWDPKKYGGFDSPTVAYSVLVVAKVEKGKSKKLKSVKELLGITIMERSSFEKNPIDFLEAKGYKEVKKDLIIKLPKYSLFELENGRKRMLASAGELQKGNELALPSKYVNFLYLASHYEKLKGSPEDNEQKQLFVEQHKHYLDEIIEQISEFSKRVILADANLDKVLSAYNKHRDKPIREQAENIIHLFTLTNLGAPAAFKYFDTTIDRKRYTSTKEVLDATLIHQSITGLYETRIDLSQLGGDGGAEAAAKEAAAKEAAAKEAAAKALEAEAAAKEAAAKEAAAKEAAAKAGGTAPLEEEYRLFLEAPIQNVTLLEQWKREIPKVWAEINPPGLASTQAPIHVQLLSTALPVRVRQYPITLEAKRSLRETIRKFRAAGILRPVHSPWNTPLLPVRKSGTSEYRMVQDLREVNKRVETIHPTVPNPYTLLSLLPPDRIWYSVLDLKDAFFCIPLAPESQLIFAFEWADAEEGESGQLTWTRLPQGFKNSPTLFNEALNRDLQGFRLDHPSVSLLQYVDDLLIAADTQAACLSATRDLLMTLAELGYRVSGKKAQLCQEEVTYLGFKIHKGSRSLSNSRTQAILQIPVPKTKRQVREFLGKIGYCRLFIPGFAELAQPLYAATRPGNDPLVWGEKEEEAFQSLKLALTQPPALALPSLDKPFQLFVEETSGAAKGVLTQALGPWKRPVAYLSKRLDPVAAGWPRCLRAIAAAALLTREASKLTFGQDIEITSSHNLESLLRSPPDKWLTNARITQYQVLLLDPPRVRFKQTAALNPATLLPETDDTLPIHHCLDTLDSLTSTRPDLTDQPLAQAEATLFTDGSSYIRDGKRYAGAAVVTLDSVIWAEPLPIGTSAQKAELIALTKALEWSKDKSVNIYTDSRYAFATLHVHGMIYRERGWLTAGGKAIKNAPEILALLTAVWLPKRVAVMHCKGHQKDDAPTSTGNRRADEVAREVAIRPLSTQATISAGKRTADGSEFEKRTADGSEFESPKKKAKVE

SEQ ID NO: 1373 - protein, 2117 aa, synthetic construct
MPAAKRVKLDGGDKKYSIGLDIGTNSVGWAVITDEYKVPSKKFKVLGNTDRHSIKKNLIGALLFDSGETAEATRLKRTARRRYTRRKNRICYLQEIFSNEMAKVDDSFFHRLEESFLVEEDKKHERHPIFGNIVDEVAYHEKYPTIYHLRKKLVDSTDKADLRLIYLALAHMIKFRGHFLIEGDLNPDNSDVDKLFIQLVQTYNQLFEENPINASGVDAKAILSARLSKSRRLENLIAQLPGEKKNGLFGNLIALSLGLTPNFKSNFDLAEDAKLQLSKDTYDDDLDNLLAQIGDQYADLFLAAKNLSDAILLSDILRVNTEITKAPLSASMIKRYDEHHQDLTLLKALVRQQLPEKYKEIFFDQSKNGYAGYIDGGASQEEFYKFIKPILEKMDGTEELLVKLNREDLLRKQRTFDNGSIPHQIHLGELHAILRRQEDFYPFLKDNREKIEKILTFRIPYYVGPLARGNSRFAWMTRKSEETITPWNFEEVVDKGASAQSFIERMTNFDKNLPNEKVLPKHSLLYEYFTVYNELTKVKYVTEGMRKPAFLSGEQKKAIVDLLFKTNRKVTVKQLKEDYFKKIECFDSVEISGVEDRFNASLGTYHDLLKIIKDKDFLDNEENEDILEDIVLTLTLFEDREMIEERLKTYAHLFDDKVMKQLKRRRYTGWGRLSRKLINGIRDKQSGKTILDFLKSDGFANRNFMQLIHDDSLTFKEDIQKAQVSGQGDSLHEHIANLAGSPAIKKGILQTVKVVDELVKVMGRHKPENIVIEMARENQTTQKGQKNSRERMKRIEEGIKELGSQILKEHPVENTQLQNEKLYLYYLQNGRDMYVDQELDINRLSDYDVDHIVPQSFLKDDSIDNKVLTRSDKARGKSDNVPSEEVVKKMKNYWRQLLNAKLITQRKFDNLTKAERGGLSELDKAGFIKRQLVETRQITKHVAQILDSRMNTKYDENDKLIREVKVITLKSKLVSDFRKDFQFYKVREINNYHHAHDAYLNAVVGTALIKKYPKLESEFVYGDYKVYDVRKMIAKSEQEIGKATAKYFFYSNIMNFFKTEITLANGEIRKRPLIETNGETGEIVWDKGRDFATVRKVLSMPQVNIVKKTEVQTGGFSKESILPKRNSDKLIARKKDWDPKKYGGFDSPTVAYSVLVVAKVEKGKSKKLKSVKELLGITIMERSSFEKNPIDFLEAKGYKEVKKDLIIKLPKYSLFELENGRKRMLASAGELQKGNELALPSKYVNFLYLASHYEKLKGSPEDNEQKQLFVEQHKHYLDEIIEQISEFSKRVILADANLDKVLSAYNKHRDKPIREQAENIIHLFTLTNLGAPAAFKYFDTTIDRKRYTSTKEVLDATLIHQSITGLYETRIDLSQLGGDGGGGGGSGGGGSGGGGSGGGGSGGGGSGGGGSGGTAPLEEEYRLFLEAPIQNVTLLEQWKREIPKVWAEINPPGLASTQAPIHVQLLSTALPVRVRQYPITLEAKRSLRETIRKFRAAGILRPVHSPWNTPLLPVRKSGTSEYRMVQDLREVNKRVETIHPTVPNPYTLLSLLPPDRIWYSVLDLKDAFFCIPLAPESQLIFAFEWADAEEGESGQLTWTRLPQGFKNSPTLFNEALNRDLQGFRLDHPSVSLLQYVDDLLIAADTQAACLSATRDLLMTLAELGYRVSGKKAQLCQEEVTYLGFKIHKGSRSLSNSRTQAILQIPVPKTKRQVREFLGKIGYCRLFIPGFAELAQPLYAATRPGNDPLVWGEKEEEAFQSLKLALTQPPALALPSLDKPFQLFVEETSGAAKGVLTQALGPWKRPVAYLSKRLDPVAAGWPRCLRAIAAAALLTREASKLTFGQDIEITSSHNLESLLRSPPDKWLTNARITQYQVLLLDPPRVRFKQTAALNPATLLPETDDTLPIHHCLDTLDSLTSTRPDLTDQPLAQAEATLFTDGSSYIRDGKRYAGAAVVTLDSVIWAEPLPIGTSAQKAELIALTKALEWSKDKSVNIYTDSRYAFATLHVHGMIYRERGWLTAGGKAIKNAPEILALLTAVWLPKRVAVMHCKGHQKDDAPTSTGNRRADEVAREVAIRPLSTQATISAGKRTADGSEFEKRTADGSEFESPKKKAKVE

SEQ ID NO: 1374 - protein, 2107 aa, synthetic construct
MPAAKRVKLDGGDKKYSIGLDIGTNSVGWAVITDEYKVPSKKFKVLGNTDRHSIKKNLIGALLFDSGETAEATRLKRTARRRYTRRKNRICYLQEIFSNEMAKVDDSFFHRLEESFLVEEDKKHERHPIFGNIVDEVAYHEKYPTIYHLRKKLVDSTDKADLRLIYLALAHMIKFRGHFLIEGDLNPDNSDVDKLFIQLVQTYNQLFEENPINASGVDAKAILSARLSKSRRLENLIAQLPGEKKNGLFGNLIALSLGLTPNFKSNFDLAEDAKLQLSKDTYDDDLDNLLAQIGDQYADLFLAAKNLSDAILLSDILRVNTEITKAPLSASMIKRYDEHHQDLTLLKALVRQQLPEKYKEIFFDQSKNGYAGYIDGGASQEEFYKFIKPILEKMDGTEELLVKLNREDLLRKQRTFDNGSIPHQIHLGELHAILRRQEDFYPFLKDNREKIEKILTFRIPYYVGPLARGNSRFAWMTRKSEETITPWNFEEVVDKGASAQSFIERMTNFDKNLPNEKVLPKHSLLYEYFTVYNELTKVKYVTEGMRKPAFLSGEQKKAIVDLLFKTNRKVTVKQLKEDYFKKIECFDSVEISGVEDRFNASLGTYHDLLKIIKDKDFLDNEENEDILEDIVLTLTLFEDREMIEERLKTYAHLFDDKVMKQLKRRRYTGWGRLSRKLINGIRDKQSGKTILDFLKSDGFANRNFMQLIHDDSLTFKEDIQKAQVSGQGDSLHEHIANLAGSPAIKKGILQTVKVVDELVKVMGRHKPENIVIEMARENQTTQKGQKNSRERMKRIEEGIKELGSQILKEHPVENTQLQNEKLYLYYLQNGRDMYVDQELDINRLSDYDVDHIVPQSFLKDDSIDNKVLTRSDKARGKSDNVPSEEVVKKMKNYWRQLLNAKLITQRKFDNLTKAERGGLSELDKAGFIKRQLVETRQITKHVAQILDSRMNTKYDENDKLIREVKVITLKSKLVSDFRKDFQFYKVREINNYHHAHDAYLNAVVGTALIKKYPKLESEFVYGDYKVYDVRKMIAKSEQEIGKATAKYFFYSNIMNFFKTEITLANGEIRKRPLIETNGETGEIVWDKGRDFATVRKVLSMPQVNIVKKTEVQTGGFSKESILPKRNSDKLIARKKDWDPKKYGGFDSPTVAYSVLVVAKVEKGKSKKLKSVKELLGITIMERSSFEKNPIDFLEAKGYKEVKKDLIIKLPKYSLFELENGRKRMLASAGELQKGNELALPSKYVNFLYLASHYEKLKGSPEDNEQKQLFVEQHKHYLDEIIEQISEFSKRVILADANLDKVLSAYNKHRDKPIREQAENIIHLFTLTNLGAPAAFKYFDTTIDRKRYTSTKEVLDATLIHQSITGLYETRIDLSQLGGDGGGGGGSGGGGSGGGGSGGGGSGGTAPLEEEYRLFLEAPIQNVTLLEQWKREIPKVWAEINPPGLASTQAPIHVQLLSTALPVRVRQYPITLEAKRSLRETIRKFRAAGILRPVHSPWNTPLLPVRKSGTSEYRMVQDLREVNKRVETIHPTVPNPYTLLSLLPPDRIWYSVLDLKDAFFCIPLAPESQLIFAFEWADAEEGESGQLTWTRLPQGFKNSPTLFNEALNRDLQGFRLDHPSVSLLQYVDDLLIAADTQAACLSATRDLLMTLAELGYRVSGKKAQLCQEEVTYLGFKIHKGSRSLSNSRTQAILQIPVPKTKRQVREFLGKIGYCRLFIPGFAELAQPLYAATRPGNDPLVWGEKEEEAFQSLKLALTQPPALALPSLDKPFQLFVEETSGAAKGVLTQALGPWKRPVAYLSKRLDPVAAGWPRCLRAIAAAALLTREASKLTFGQDIEITSSHNLESLLRSPPDKWLTNARITQYQVLLLDPPRVRFKQTAALNPATLLPETDDTLPIHHCLDTLDSLTSTRPDLTDQPLAQAEATLFTDGSSYIRDGKRYAGAAVVTLDSVIWAEPLPIGTSAQKAELIALTKALEWSKDKSVNIYTDSRYAFATLHVHGMIYRERGWLTAGGKAIKNAPEILALLTAVWLPKRVAVMHCKGHQKDDAPTSTGNRRADEVAREVAIRPLSTQATISAGKRTADGSEFEKRTADGSEFESPKKKAKVE

SEQ ID NO: 1375 - protein, 2093 aa, synthetic construct
MPAAKRVKLDGGDKKYSIGLDIGTNSVGWAVITDEYKVPSKKFKVLGNTDRHSIKKNLIGALLFDSGETAEATRLKRTARRRYTRRKNRICYLQEIFSNEMAKVDDSFFHRLEESFLVEEDKKHERHPIFGNIVDEVAYHEKYPTIYHLRKKLVDSTDKADLRLIYLALAHMIKFRGHFLIEGDLNPDNSDVDKLFIQLVQTYNQLFEENPINASGVDAKAILSARLSKSRRLENLIAQLPGEKKNGLFGNLIALSLGLTPNFKSNFDLAEDAKLQLSKDTYDDDLDNLLAQIGDQYADLFLAAKNLSDAILLSDILRVNTEITKAPLSASMIKRYDEHHQDLTLLKALVRQQLPEKYKEIFFDQSKNGYAGYIDGGASQEEFYKFIKPILEKMDGTEELLVKLNREDLLRKQRTFDNGSIPHQIHLGELHAILRRQEDFYPFLKDNREKIEKILTFRIPYYVGPLARGNSRFAWMTRKSEETITPWNFEEVVDKGASAQSFIERMTNFDKNLPNEKVLPKHSLLYEYFTVYNELTKVKYVTEGMRKPAFLSGEQKKAIVDLLFKTNRKVTVKQLKEDYFKKIECFDSVEISGVEDRFNASLGTYHDLLKIIKDKDFLDNEENEDILEDIVLTLTLFEDREMIEERLKTYAHLFDDKVMKQLKRRRYTGWGRLSRKLINGIRDKQSGKTILDFLKSDGFANRNFMQLIHDDSLTFKEDIQKAQVSGQGDSLHEHIANLAGSPAIKKGILQTVKVVDELVKVMGRHKPENIVIEMARENQTTQKGQKNSRERMKRIEEGIKELGSQILKEHPVENTQLQNEKLYLYYLQNGRDMYVDQELDINRLSDYDVDHIVPQSFLKDDSIDNKVLTRSDKARGKSDNVPSEEVVKKMKNYWRQLLNAKLITQRKFDNLTKAERGGLSELDKAGFIKRQLVETRQITKHVAQILDSRMNTKYDENDKLIREVKVITLKSKLVSDFRKDFQFYKVREINNYHHAHDAYLNAVVGTALIKKYPKLESEFVYGDYKVYDVRKMIAKSEQEIGKATAKYFFYSNIMNFFKTEITLANGEIRKRPLIETNGETGEIVWDKGRDFATVRKVLSMPQVNIVKKTEVQTGGFSKESILPKRNSDKLIARKKDWDPKKYGGFDSPTVAYSVLVVAKVEKGKSKKLKSVKELLGITIMERSSFEKNPIDFLEAKGYKEVKKDLIIKLPKYSLFELENGRKRMLASAGELQKGNELALPSKYVNFLYLASHYEKLKGSPEDNEQKQLFVEQHKHYLDEIIEQISEFSKRVILADANLDKVLSAYNKHRDKPIREQAENIIHLFTLTNLGAPAAFKYFDTTIDRKRYTSTKEVLDATLIHQSITGLYETRIDLSQLGGDGGGSSPAPGGTAPLEEEYRLFLEAPIQNVTLLEQWKREIPKVWAEINPPGLASTQAPIHVQLLSTALPVRVRQYPITLEAKRSLRETIRKFRAAGILRPVHSPWNTPLLPVRKSGTSEYRMVQDLREVNKRVETIHPTVPNPYTLLSLLPPDRIWYSVLDLKDAFFCIPLAPESQLIFAFEWADAEEGESGQLTWTRLPQGFKNSPTLFNEALNRDLQGFRLDHPSVSLLQYVDDLLIAADTQAACLSATRDLLMTLAELGYRVSGKKAQLCQEEVTYLGFKIHKGSRSLSNSRTQAILQIPVPKTKRQVREFLGKIGYCRLFIPGFAELAQPLYAATRPGNDPLVWGEKEEEAFQSLKLALTQPPALALPSLDKPFQLFVEETSGAAKGVLTQALGPWKRPVAYLSKRLDPVAAGWPRCLRAIAAAALLTREASKLTFGQDIEITSSHNLESLLRSPPDKWLTNARITQYQVLLLDPPRVRFKQTAALNPATLLPETDDTLPIHHCLDTLDSLTSTRPDLTDQPLAQAEATLFTDGSSYIRDGKRYAGAAVVTLDSVIWAEPLPIGTSAQKAELIALTKALEWSKDKSVNIYTDSRYAFATLHVHGMIYRERGWLTAGGKAIKNAPEILALLTAVWLPKRVAVMHCKGHQKDDAPTSTGNRRADEVAREVAIRPLSTQATISAGKRTADGSEFEKRTADGSEFESPKKKAKVE

SEQ ID NO: 1376 - protein, 2103 aa, synthetic construct
MPAAKRVKLDGGDKKYSIGLDIGTNSVGWAVITDEYKVPSKKFKVLGNTDRHSIKKNLIGALLFDSGETAEATRLKRTARRRYTRRKNRICYLQEIFSNEMAKVDDSFFHRLEESFLVEEDKKHERHPIFGNIVDEVAYHEKYPTIYHLRKKLVDSTDKADLRLIYLALAHMIKFRGHFLIEGDLNPDNSDVDKLFIQLVQTYNQLFEENPINASGVDAKAILSARLSKSRRLENLIAQLPGEKKNGLFGNLIALSLGLTPNFKSNFDLAEDAKLQLSKDTYDDDLDNLLAQIGDQYADLFLAAKNLSDAILLSDILRVNTEITKAPLSASMIKRYDEHHQDLTLLKALVRQQLPEKYKEIFFDQSKNGYAGYIDGGASQEEFYKFIKPILEKMDGTEELLVKLNREDLLRKQRTFDNGSIPHQIHLGELHAILRRQEDFYPFLKDNREKIEKILTFRIPYYVGPLARGNSRFAWMTRKSEETITPWNFEEVVDKGASAQSFIERMTNFDKNLPNEKVLPKHSLLYEYFTVYNELTKVKYVTEGMRKPAFLSGEQKKAIVDLLFKTNRKVTVKQLKEDYFKKIECFDSVEISGVEDRFNASLGTYHDLLKIIKDKDFLDNEENEDILEDIVLTLTLFEDREMIEERLKTYAHLFDDKVMKQLKRRRYTGWGRLSRKLINGIRDKQSGKTILDFLKSDGFANRNFMQLIHDDSLTFKEDIQKAQVSGQGDSLHEHIANLAGSPAIKKGILQTVKVVDELVKVMGRHKPENIVIEMARENQTTQKGQKNSRERMKRIEEGIKELGSQILKEHPVENTQLQNEKLYLYYLQNGRDMYVDQELDINRLSDYDVDHIVPQSFLKDDSIDNKVLTRSDKARGKSDNVPSEEVVKKMKNYWRQLLNAKLITQRKFDNLTKAERGGLSELDKAGFIKRQLVETRQITKHVAQILDSRMNTKYDENDKLIREVKVITLKSKLVSDFRKDFQFYKVREINNYHHAHDAYLNAVVGTALIKKYPKLESEFVYGDYKVYDVRKMIAKSEQEIGKATAKYFFYSNIMNFFKTEITLANGEIRKRPLIETNGETGEIVWDKGRDFATVRKVLSMPQVNIVKKTEVQTGGFSKESILPKRNSDKLIARKKDWDPKKYGGFDSPTVAYSVLVVAKVEKGKSKKLKSVKELLGITIMERSSFEKNPIDFLEAKGYKEVKKDLIIKLPKYSLFELENGRKRMLASAGELQKGNELALPSKYVNFLYLASHYEKLKGSPEDNEQKQLFVEQHKHYLDEIIEQISEFSKRVILADANLDKVLSAYNKHRDKPIREQAENIIHLFTLTNLGAPAAFKYFDTTIDRKRYTSTKEVLDATLIHQSITGLYETRIDLSQLGGDGGSGSETPGTSESATPESGGTAPLEEEYRLFLEAPIQNVTLLEQWKREIPKVWAEINPPGLASTQAPIHVQLLSTALPVRVRQYPITLEAKRSLRETIRKFRAAGILRPVHSPWNTPLLPVRKSGTSEYRMVQDLREVNKRVETIHPTVPNPYTLLSLLPPDRIWYSVLDLKDAFFCIPLAPESQLIFAFEWADAEEGESGQLTWTRLPQGFKNSPTLFNEALNRDLQGFRLDHPSVSLLQYVDDLLIAADTQAACLSATRDLLMTLAELGYRVSGKKAQLCQEEVTYLGFKIHKGSRSLSNSRTQAILQIPVPKTKRQVREFLGKIGYCRLFIPGFAELAQPLYAATRPGNDPLVWGEKEEEAFQSLKLALTQPPALALPSLDKPFQLFVEETSGAAKGVLTQALGPWKRPVAYLSKRLDPVAAGWPRCLRAIAAAALLTREASKLTFGQDIEITSSHNLESLLRSPPDKWLTNARITQYQVLLLDPPRVRFKQTAALNPATLLPETDDTLPIHHCLDTLDSLTSTRPDLTDQPLAQAEATLFTDGSSYIRDGKRYAGAAVVTLDSVIWAEPLPIGTSAQKAELIALTKALEWSKDKSVNIYTDSRYAFATLHVHGMIYRERGWLTAGGKAIKNAPEILALLTAVWLPKRVAVMHCKGHQKDDAPTSTGNRRADEVAREVAIRPLSTQATISAGKRTADGSEFEKRTADGSEFESPKKKAKVE

SEQ ID NO: 1377 - protein, 2098 aa, synthetic construct
MPAAKRVKLDGGDKKYSIGLDIGTNSVGWAVITDEYKVPSKKFKVLGNTDRHSIKKNLIGALLFDSGETAEATRLKRTARRRYTRRKNRICYLQEIFSNEMAKVDDSFFHRLEESFLVEEDKKHERHPIFGNIVDEVAYHEKYPTIYHLRKKLVDSTDKADLRLIYLALAHMIKFRGHFLIEGDLNPDNSDVDKLFIQLVQTYNQLFEENPINASGVDAKAILSARLSKSRRLENLIAQLPGEKKNGLFGNLIALSLGLTPNFKSNFDLAEDAKLQLSKDTYDDDLDNLLAQIGDQYADLFLAAKNLSDAILLSDILRVNTEITKAPLSASMIKRYDEHHQDLTLLKALVRQQLPEKYKEIFFDQSKNGYAGYIDGGASQEEFYKFIKPILEKMDGTEELLVKLNREDLLRKQRTFDNGSIPHQIHLGELHAILRRQEDFYPFLKDNREKIEKILTFRIPYYVGPLARGNSRFAWMTRKSEETITPWNFEEVVDKGASAQSFIERMTNFDKNLPNEKVLPKHSLLYEYFTVYNELTKVKYVTEGMRKPAFLSGEQKKAIVDLLFKTNRKVTVKQLKEDYFKKIECFDSVEISGVEDRFNASLGTYHDLLKIIKDKDFLDNEENEDILEDIVLTLTLFEDREMIEERLKTYAHLFDDKVMKQLKRRRYTGWGRLSRKLINGIRDKQSGKTILDFLKSDGFANRNFMQLIHDDSLTFKEDIQKAQVSGQGDSLHEHIANLAGSPAIKKGILQTVKVVDELVKVMGRHKPENIVIEMARENQTTQKGQKNSRERMKRIEEGIKELGSQILKEHPVENTQLQNEKLYLYYLQNGRDMYVDQELDINRLSDYDVDHIVPQSFLKDDSIDNKVLTRSDKARGKSDNVPSEEVVKKMKNYWRQLLNAKLITQRKFDNLTKAERGGLSELDKAGFIKRQLVETRQITKHVAQILDSRMNTKYDENDKLIREVKVITLKSKLVSDFRKDFQFYKVREINNYHHAHDAYLNAVVGTALIKKYPKLESEFVYGDYKVYDVRKMIAKSEQEIGKATAKYFFYSNIMNFFKTEITLANGEIRKRPLIETNGETGEIVWDKGRDFATVRKVLSMPQVNIVKKTEVQTGGFSKESILPKRNSDKLIARKKDWDPKKYGGFDSPTVAYSVLVVAKVEKGKSKKLKSVKELLGITIMERSSFEKNPIDFLEAKGYKEVKKDLIIKLPKYSLFELENGRKRMLASAGELQKGNELALPSKYVNFLYLASHYEKLKGSPEDNEQKQLFVEQHKHYLDEIIEQISEFSKRVILADANLDKVLSAYNKHRDKPIREQAENIIHLFTLTNLGAPAAFKYFDTTIDRKRYTSTKEVLDATLIHQSITGLYETRIDLSQLGGDGGPAPEAAAKGGSGGTAPLEEEYRLFLEAPIQNVTLLEQWKREIPKVWAEINPPGLASTQAPIHVQLLSTALPVRVRQYPITLEAKRSLRETIRKFRAAGILRPVHSPWNTPLLPVRKSGTSEYRMVQDLREVNKRVETIHPTVPNPYTLLSLLPPDRIWYSVLDLKDAFFCIPLAPESQLIFAFEWADAEEGESGQLTWTRLPQGFKNSPTLFNEALNRDLQGFRLDHPSVSLLQYVDDLLIAADTQAACLSATRDLLMTLAELGYRVSGKKAQLCQEEVTYLGFKIHKGSRSLSNSRTQAILQIPVPKTKRQVREFLGKIGYCRLFIPGFAELAQPLYAATRPGNDPLVWGEKEEEAFQSLKLALTQPPALALPSLDKPFQLFVEETSGAAKGVLTQALGPWKRPVAYLSKRLDPVAAGWPRCLRAIAAAALLTREASKLTFGQDIEITSSHNLESLLRSPPDKWLTNARITQYQVLLLDPPRVRFKQTAALNPATLLPETDDTLPIHHCLDTLDSLTSTRPDLTDQPLAQAEATLFTDGSSYIRDGKRYAGAAVVTLDSVIWAEPLPIGTSAQKAELIALTKALEWSKDKSVNIYTDSRYAFATLHVHGMIYRERGWLTAGGKAIKNAPEILALLTAVWLPKRVAVMHCKGHQKDDAPTSTGNRRADEVAREVAIRPLSTQATISAGKRTADGSEFEKRTADGSEFESPKKKAKVE

SEQ ID NO: 1378 - protein, 2092 aa, synthetic construct
MPAAKRVKLDGGDKKYSIGLDIGTNSVGWAVITDEYKVPSKKFKVLGNTDRHSIKKNLIGALLFDSGETAEATRLKRTARRRYTRRKNRICYLQEIFSNEMAKVDDSFFHRLEESFLVEEDKKHERHPIFGNIVDEVAYHEKYPTIYHLRKKLVDSTDKADLRLIYLALAHMIKFRGHFLIEGDLNPDNSDVDKLFIQLVQTYNQLFEENPINASGVDAKAILSARLSKSRRLENLIAQLPGEKKNGLFGNLIALSLGLTPNFKSNFDLAEDAKLQLSKDTYDDDLDNLLAQIGDQYADLFLAAKNLSDAILLSDILRVNTEITKAPLSASMIKRYDEHHQDLTLLKALVRQQLPEKYKEIFFDQSKNGYAGYIDGGASQEEFYKFIKPILEKMDGTEELLVKLNREDLLRKQRTFDNGSIPHQIHLGELHAILRRQEDFYPFLKDNREKIEKILTFRIPYYVGPLARGNSRFAWMTRKSEETITPWNFEEVVDKGASAQSFIERMTNFDKNLPNEKVLPKHSLLYEYFTVYNELTKVKYVTEGMRKPAFLSGEQKKAIVDLLFKTNRKVTVKQLKEDYFKKIECFDSVEISGVEDRFNASLGTYHDLLKIIKDKDFLDNEENEDILEDIVLTLTLFEDREMIEERLKTYAHLFDDKVMKQLKRRRYTGWGRLSRKLINGIRDKQSGKTILDFLKSDGFANRNFMQLIHDDSLTFKEDIQKAQVSGQGDSLHEHIANLAGSPAIKKGILQTVKVVDELVKVMGRHKPENIVIEMARENQTTQKGQKNSRERMKRIEEGIKELGSQILKEHPVENTQLQNEKLYLYYLQNGRDMYVDQELDINRLSDYDVDHIVPQSFLKDDSIDNKVLTRSDKARGKSDNVPSEEVVKKMKNYWRQLLNAKLITQRKFDNLTKAERGGLSELDKAGFIKRQLVETRQITKHVAQILDSRMNTKYDENDKLIREVKVITLKSKLVSDFRKDFQFYKVREINNYHHAHDAYLNAVVGTALIKKYPKLESEFVYGDYKVYDVRKMIAKSEQEIGKATAKYFFYSNIMNFFKTEITLANGEIRKRPLIETNGETGEIVWDKGRDFATVRKVLSMPQVNIVKKTEVQTGGFSKESILPKRNSDKLIARKKDWDPKKYGGFDSPTVAYSVLVVAKVEKGKSKKLKSVKELLGITIMERSSFEKNPIDFLEAKGYKEVKKDLIIKLPKYSLFELENGRKRMLASAGELQKGNELALPSKYVNFLYLASHYEKLKGSPEDNEQKQLFVEQHKHYLDEIIEQISEFSKRVILADANLDKVLSAYNKHRDKPIREQAENIIHLFTLTNLGAPAAFKYFDTTIDRKRYTSTKEVLDATLIHQSITGLYETRIDLSQLGGDGGPAPAPGGTAPLEEEYRLFLEAPIQNVTLLEQWKREIPKVWAEINPPGLASTQAPIHVQLLSTALPVRVRQYPITLEAKRSLRETIRKFRAAGILRPVHSPWNTPLLPVRKSGTSEYRMVQDLREVNKRVETIHPTVPNPYTLLSLLPPDRIWYSVLDLKDAFFCIPLAPESQLIFAFEWADAEEGESGQLTWTRLPQGFKNSPTLFNEALNRDLQGFRLDHPSVSLLQYVDDLLIAADTQAACLSATRDLLMTLAELGYRVSGKKAQLCQEEVTYLGFKIHKGSRSLSNSRTQAILQIPVPKTKRQVREFLGKIGYCRLFIPGFAELAQPLYAATRPGNDPLVWGEKEEEAFQSLKLALTQPPALALPSLDKPFQLFVEETSGAAKGVLTQALGPWKRPVAYLSKRLDPVAAGWPRCLRAIAAAALLTREASKLTFGQDIEITSSHNLESLLRSPPDKWLTNARITQYQVLLLDPPRVRFKQTAALNPATLLPETDDTLPIHHCLDTLDSLTSTRPDLTDQPLAQAEATLFTDGSSYIRDGKRYAGAAVVTLDSVIWAEPLPIGTSAQKAELIALTKALEWSKDKSVNIYTDSRYAFATLHVHGMIYRERGWLTAGGKAIKNAPEILALLTAVWLPKRVAVMHCKGHQKDDAPTSTGNRRADEVAREVAIRPLSTQATISAGKRTADGSEFEKRTADGSEFESPKKKAKVE

SEQ ID NO: 1379 - protein, 2098 aa, synthetic construct
MPAAKRVKLDGGDKKYSIGLDIGTNSVGWAVITDEYKVPSKKFKVLGNTDRHSIKKNLIGALLFDSGETAEATRLKRTARRRYTRRKNRICYLQEIFSNEMAKVDDSFFHRLEESFLVEEDKKHERHPIFGNIVDEVAYHEKYPTIYHLRKKLVDSTDKADLRLIYLALAHMIKFRGHFLIEGDLNPDNSDVDKLFIQLVQTYNQLFEENPINASGVDAKAILSARLSKSRRLENLIAQLPGEKKNGLFGNLIALSLGLTPNFKSNFDLAEDAKLQLSKDTYDDDLDNLLAQIGDQYADLFLAAKNLSDAILLSDILRVNTEITKAPLSASMIKRYDEHHQDLTLLKALVRQQLPEKYKEIFFDQSKNGYAGYIDGGASQEEFYKFIKPILEKMDGTEELLVKLNREDLLRKQRTFDNGSIPHQIHLGELHAILRRQEDFYPFLKDNREKIEKILTFRIPYYVGPLARGNSRFAWMTRKSEETITPWNFEEVVDKGASAQSFIERMTNFDKNLPNEKVLPKHSLLYEYFTVYNELTKVKYVTEGMRKPAFLSGEQKKAIVDLLFKTNRKVTVKQLKEDYFKKIECFDSVEISGVEDRFNASLGTYHDLLKIIKDKDFLDNEENEDILEDIVLTLTLFEDREMIEERLKTYAHLFDDKVMKQLKRRRYTGWGRLSRKLINGIRDKQSGKTILDFLKSDGFANRNFMQLIHDDSLTFKEDIQKAQVSGQGDSLHEHIANLAGSPAIKKGILQTVKVVDELVKVMGRHKPENIVIEMARENQTTQKGQKNSRERMKRIEEGIKELGSQILKEHPVENTQLQNEKLYLYYLQNGRDMYVDQELDINRLSDYDVDHIVPQSFLKDDSIDNKVLTRSDKARGKSDNVPSEEVVKKMKNYWRQLLNAKLITQRKFDNLTKAERGGLSELDKAGFIKRQLVETRQITKHVAQILDSRMNTKYDENDKLIREVKVITLKSKLVSDFRKDFQFYKVREINNYHHAHDAYLNAVVGTALIKKYPKLESEFVYGDYKVYDVRKMIAKSEQEIGKATAKYFFYSNIMNFFKTEITLANGEIRKRPLIETNGETGEIVWDKGRDFATVRKVLSMPQVNIVKKTEVQTGGFSKESILPKRNSDKLIARKKDWDPKKYGGFDSPTVAYSVLVVAKVEKGKSKKLKSVKELLGITIMERSSFEKNPIDFLEAKGYKEVKKDLIIKLPKYSLFELENGRKRMLASAGELQKGNELALPSKYVNFLYLASHYEKLKGSPEDNEQKQLFVEQHKHYLDEIIEQISEFSKRVILADANLDKVLSAYNKHRDKPIREQAENIIHLFTLTNLGAPAAFKYFDTTIDRKRYTSTKEVLDATLIHQSITGLYETRIDLSQLGGDGGGGGEAAAKGGSGGTAPLEEEYRLFLEAPIQNVTLLEQWKREIPKVWAEINPPGLASTQAPIHVQLLSTALPVRVRQYPITLEAKRSLRETIRKFRAAGILRPVHSPWNTPLLPVRKSGTSEYRMVQDLREVNKRVETIHPTVPNPYTLLSLLPPDRIWYSVLDLKDAFFCIPLAPESQLIFAFEWADAEEGESGQLTWTRLPQGFKNSPTLFNEALNRDLQGFRLDHPSVSLLQYVDDLLIAADTQAACLSATRDLLMTLAELGYRVSGKKAQLCQEEVTYLGFKIHKGSRSLSNSRTQAILQIPVPKTKRQVREFLGKIGYCRLFIPGFAELAQPLYAATRPGNDPLVWGEKEEEAFQSLKLALTQPPALALPSLDKPFQLFVEETSGAAKGVLTQALGPWKRPVAYLSKRLDPVAAGWPRCLRAIAAAALLTREASKLTFGQDIEITSSHNLESLLRSPPDKWLTNARITQYQVLLLDPPRVRFKQTAALNPATLLPETDDTLPIHHCLDTLDSLTSTRPDLTDQPLAQAEATLFTDGSSYIRDGKRYAGAAVVTLDSVIWAEPLPIGTSAQKAELIALTKALEWSKDKSVNIYTDSRYAFATLHVHGMIYRERGWLTAGGKAIKNAPEILALLTAVWLPKRVAVMHCKGHQKDDAPTSTGNRRADEVAREVAIRPLSTQATISAGKRTADGSEFEKRTADGSEFESPKKKAKVE

SEQ ID NO: 1380 - protein, 2092 aa, synthetic construct
MPAAKRVKLDGGDKKYSIGLDIGTNSVGWAVITDEYKVPSKKFKVLGNTDRHSIKKNLIGALLFDSGETAEATRLKRTARRRYTRRKNRICYLQEIFSNEMAKVDDSFFHRLEESFLVEEDKKHERHPIFGNIVDEVAYHEKYPTIYHLRKKLVDSTDKADLRLIYLALAHMIKFRGHFLIEGDLNPDNSDVDKLFIQLVQTYNQLFEENPINASGVDAKAILSARLSKSRRLENLIAQLPGEKKNGLFGNLIALSLGLTPNFKSNFDLAEDAKLQLSKDTYDDDLDNLLAQIGDQYADLFLAAKNLSDAILLSDILRVNTEITKAPLSASMIKRYDEHHQDLTLLKALVRQQLPEKYKEIFFDQSKNGYAGYIDGGASQEEFYKFIKPILEKMDGTEELLVKLNREDLLRKQRTFDNGSIPHQIHLGELHAILRRQEDFYPFLKDNREKIEKILTFRIPYYVGPLARGNSRFAWMTRKSEETITPWNFEEVVDKGASAQSFIERMTNFDKNLPNEKVLPKHSLLYEYFTVYNELTKVKYVTEGMRKPAFLSGEQKKAIVDLLFKTNRKVTVKQLKEDYFKKIECFDSVEISGVEDRFNASLGTYHDLLKIIKDKDFLDNEENEDILEDIVLTLTLFEDREMIEERLKTYAHLFDDKVMKQLKRRRYTGWGRLSRKLINGIRDKQSGKTILDFLKSDGFANRNFMQLIHDDSLTFKEDIQKAQVSGQGDSLHEHIANLAGSPAIKKGILQTVKVVDELVKVMGRHKPENIVIEMARENQTTQKGQKNSRERMKRIEEGIKELGSQILKEHPVENTQLQNEKLYLYYLQNGRDMYVDQELDINRLSDYDVDHIVPQSFLKDDSIDNKVLTRSDKARGKSDNVPSEEVVKKMKNYWRQLLNAKLITQRKFDNLTKAERGGLSELDKAGFIKRQLVETRQITKHVAQILDSRMNTKYDENDKLIREVKVITLKSKLVSDFRKDFQFYKVREINNYHHAHDAYLNAVVGTALIKKYPKLESEFVYGDYKVYDVRKMIAKSEQEIGKATAKYFFYSNIMNFFKTEITLANGEIRKRPLIETNGETGEIVWDKGRDFATVRKVLSMPQVNIVKKTEVQTGGFSKESILPKRNSDKLIARKKDWDPKKYGGFDSPTVAYSVLVVAKVEKGKSKKLKSVKELLGITIMERSSFEKNPIDFLEAKGYKEVKKDLIIKLPKYSLFELENGRKRMLASAGELQKGNELALPSKYVNFLYLASHYEKLKGSPEDNEQKQLFVEQHKHYLDEIIEQISEFSKRVILADANLDKVLSAYNKHRDKPIREQAENIIHLFTLTNLGAPAAFKYFDTTIDRKRYTSTKEVLDATLIHQSITGLYETRIDLSQLGGDGGEAAAKGGTAPLEEEYRLFLEAPIQNVTLLEQWKREIPKVWAEINPPGLASTQAPIHVQLLSTALPVRVRQYPITLEAKRSLRETIRKFRAAGILRPVHSPWNTPLLPVRKSGTSEYRMVQDLREVNKRVETIHPTVPNPYTLLSLLPPDRIWYSVLDLKDAFFCIPLAPESQLIFAFEWADAEEGESGQLTWTRLPQGFKNSPTLFNEALNRDLQGFRLDHPSVSLLQYVDDLLIAADTQAACLSATRDLLMTLAELGYRVSGKKAQLCQEEVTYLGFKIHKGSRSLSNSRTQAILQIPVPKTKRQVREFLGKIGYCRLFIPGFAELAQPLYAATRPGNDPLVWGEKEEEAFQSLKLALTQPPALALPSLDKPFQLFVEETSGAAKGVLTQALGPWKRPVAYLSKRLDPVAAGWPRCLRAIAAAALLTREASKLTFGQDIEITSSHNLESLLRSPPDKWLTNARITQYQVLLLDPPRVRFKQTAALNPATLLPETDDTLPIHHCLDTLDSLTSTRPDLTDQPLAQAEATLFTDGSSYIRDGKRYAGAAVVTLDSVIWAEPLPIGTSAQKAELIALTKALEWSKDKSVNIYTDSRYAFATLHVHGMIYRERGWLTAGGKAIKNAPEILALLTAVWLPKRVAVMHCKGHQKDDAPTSTGNRRADEVAREVAIRPLSTQATISAGKRTADGSEFEKRTADGSEFESPKKKAKVE

SEQ ID NO: 1381 - protein, 2098 aa, synthetic construct
MPAAKRVKLDGGDKKYSIGLDIGTNSVGWAVITDEYKVPSKKFKVLGNTDRHSIKKNLIGALLFDSGETAEATRLKRTARRRYTRRKNRICYLQEIFSNEMAKVDDSFFHRLEESFLVEEDKKHERHPIFGNIVDEVAYHEKYPTIYHLRKKLVDSTDKADLRLIYLALAHMIKFRGHFLIEGDLNPDNSDVDKLFIQLVQTYNQLFEENPINASGVDAKAILSARLSKSRRLENLIAQLPGEKKNGLFGNLIALSLGLTPNFKSNFDLAEDAKLQLSKDTYDDDLDNLLAQIGDQYADLFLAAKNLSDAILLSDILRVNTEITKAPLSASMIKRYDEHHQDLTLLKALVRQQLPEKYKEIFFDQSKNGYAGYIDGGASQEEFYKFIKPILEKMDGTEELLVKLNREDLLRKQRTFDNGSIPHQIHLGELHAILRRQEDFYPFLKDNREKIEKILTFRIPYYVGPLARGNSRFAWMTRKSEETITPWNFEEVVDKGASAQSFIERMTNFDKNLPNEKVLPKHSLLYEYFTVYNELTKVKYVTEGMRKPAFLSGEQKKAIVDLLFKTNRKVTVKQLKEDYFKKIECFDSVEISGVEDRFNASLGTYHDLLKIIKDKDFLDNEENEDILEDIVLTLTLFEDREMIEERLKTYAHLFDDKVMKQLKRRRYTGWGRLSRKLINGIRDKQSGKTILDFLKSDGFANRNFMQLIHDDSLTFKEDIQKAQVSGQGDSLHEHIANLAGSPAIKKGILQTVKVVDELVKVMGRHKPENIVIEMARENQTTQKGQKNSRERMKRIEEGIKELGSQILKEHPVENTQLQNEKLYLYYLQNGRDMYVDQELDINRLSDYDVDHIVPQSFLKDDSIDNKVLTRSDKARGKSDNVPSEEVVKKMKNYWRQLLNAKLITQRKFDNLTKAERGGLSELDKAGFIKRQLVETRQITKHVAQILDSRMNTKYDENDKLIREVKVITLKSKLVSDFRKDFQFYKVREINNYHHAHDAYLNAVVGTALIKKYPKLESEFVYGDYKVYDVRKMIAKSEQEIGKATAKYFFYSNIMNFFKTEITLANGEIRKRPLIETNGETGEIVWDKGRDFATVRKVLSMPQVNIVKKTEVQTGGFSKESILPKRNSDKLIARKKDWDPKKYGGFDSPTVAYSVLVVAKVEKGKSKKLKSVKELLGITIMERSSFEKNPIDFLEAKGYKEVKKDLIIKLPKYSLFELENGRKRMLASAGELQKGNELALPSKYVNFLYLASHYEKLKGSPEDNEQKQLFVEQHKHYLDEIIEQISEFSKRVILADANLDKVLSAYNKHRDKPIREQAENIIHLFTLTNLGAPAAFKYFDTTIDRKRYTSTKEVLDATLIHQSITGLYETRIDLSQLGGDGGGSSEAAAKPAPGGTAPLEEEYRLFLEAPIQNVTLLEQWKREIPKVWAEINPPGLASTQAPIHVQLLSTALPVRVRQYPITLEAKRSLRETIRKFRAAGILRPVHSPWNTPLLPVRKSGTSEYRMVQDLREVNKRVETIHPTVPNPYTLLSLLPPDRIWYSVLDLKDAFFCIPLAPESQLIFAFEWADAEEGESGQLTWTRLPQGFKNSPTLFNEALNRDLQGFRLDHPSVSLLQYVDDLLIAADTQAACLSATRDLLMTLAELGYRVSGKKAQLCQEEVTYLGFKIHKGSRSLSNSRTQAILQIPVPKTKRQVREFLGKIGYCRLFIPGFAELAQPLYAATRPGNDPLVWGEKEEEAFQSLKLALTQPPALALPSLDKPFQLFVEETSGAAKGVLTQALGPWKRPVAYLSKRLDPVAAGWPRCLRAIAAAALLTREASKLTFGQDIEITSSHNLESLLRSPPDKWLTNARITQYQVLLLDPPRVRFKQTAALNPATLLPETDDTLPIHHCLDTLDSLTSTRPDLTDQPLAQAEATLFTDGSSYIRDGKRYAGAAVVTLDSVIWAEPLPIGTSAQKAELIALTKALEWSKDKSVNIYTDSRYAFATLHVHGMIYRERGWLTAGGKAIKNAPEILALLTAVWLPKRVAVMHCKGHQKDDAPTSTGNRRADEVAREVAIRPLSTQATISAGKRTADGSEFEKRTADGSEFESPKKKAKVE

SEQ ID NO: 1382 - protein, 2105 aa, synthetic construct
MPAAKRVKLDGGDKKYSIGLDIGTNSVGWAVITDEYKVPSKKFKVLGNTDRHSIKKNLIGALLFDSGETAEATRLKRTARRRYTRRKNRICYLQEIFSNEMAKVDDSFFHRLEESFLVEEDKKHERHPIFGNIVDEVAYHEKYPTIYHLRKKLVDSTDKADLRLIYLALAHMIKFRGHFLIEGDLNPDNSDVDKLFIQLVQTYNQLFEENPINASGVDAKAILSARLSKSRRLENLIAQLPGEKKNGLFGNLIALSLGLTPNFKSNFDLAEDAKLQLSKDTYDDDLDNLLAQIGDQYADLFLAAKNLSDAILLSDILRVNTEITKAPLSASMIKRYDEHHQDLTLLKALVRQQLPEKYKEIFFDQSKNGYAGYIDGGASQEEFYKFIKPILEKMDGTEELLVKLNREDLLRKQRTFDNGSIPHQIHLGELHAILRRQEDFYPFLKDNREKIEKILTFRIPYYVGPLARGNSRFAWMTRKSEETITPWNFEEVVDKGASAQSFIERMTNFDKNLPNEKVLPKHSLLYEYFTVYNELTKVKYVTEGMRKPAFLSGEQKKAIVDLLFKTNRKVTVKQLKEDYFKKIECFDSVEISGVEDRFNASLGTYHDLLKIIKDKDFLDNEENEDILEDIVLTLTLFEDREMIEERLKTYAHLFDDKVMKQLKRRRYTGWGRLSRKLINGIRDKQSGKTILDFLKSDGFANRNFMQLIHDDSLTFKEDIQKAQVSGQGDSLHEHIANLAGSPAIKKGILQTVKVVDELVKVMGRHKPENIVIEMARENQTTQKGQKNSRERMKRIEEGIKELGSQILKEHPVENTQLQNEKLYLYYLQNGRDMYVDQELDINRLSDYDVDHIVPQSFLKDDSIDNKVLTRSDKARGKSDNVPSEEVVKKMKNYWRQLLNAKLITQRKFDNLTKAERGGLSELDKAGFIKRQLVETRQITKHVAQILDSRMNTKYDENDKLIREVKVITLKSKLVSDFRKDFQFYKVREINNYHHAHDAYLNAVVGTALIKKYPKLESEFVYGDYKVYDVRKMIAKSEQEIGKATAKYFFYSNIMNFFKTEITLANGEIRKRPLIETNGETGEIVWDKGRDFATVRKVLSMPQVNIVKKTEVQTGGFSKESILPKRNSDKLIARKKDWDPKKYGGFDSPTVAYSVLVVAKVEKGKSKKLKSVKELLGITIMERSSFEKNPIDFLEAKGYKEVKKDLIIKLPKYSLFELENGRKRMLASAGELQKGNELALPSKYVNFLYLASHYEKLKGSPEDNEQKQLFVEQHKHYLDEIIEQISEFSKRVILADANLDKVLSAYNKHRDKPIREQAENIIHLFTLTNLGAPAAFKYFDTTIDRKRYTSTKEVLDATLIHQSITGLYETRIDLSQLGGDGGGSSGSSGSSGSSGSSGSSGGTAPLEEEYRLFLEAPIQNVTLLEQWKREIPKVWAEINPPGLASTQAPIHVQLLSTALPVRVRQYPITLEAKRSLRETIRKFRAAGILRPVHSPWNTPLLPVRKSGTSEYRMVQDLREVNKRVETIHPTVPNPYTLLSLLPPDRIWYSVLDLKDAFFCIPLAPESQLIFAFEWADAEEGESGQLTWTRLPQGFKNSPTLFNEALNRDLQGFRLDHPSVSLLQYVDDLLIAADTQAACLSATRDLLMTLAELGYRVSGKKAQLCQEEVTYLGFKIHKGSRSLSNSRTQAILQIPVPKTKRQVREFLGKIGYCRLFIPGFAELAQPLYAATRPGNDPLVWGEKEEEAFQSLKLALTQPPALALPSLDKPFQLFVEETSGAAKGVLTQALGPWKRPVAYLSKRLDPVAAGWPRCLRAIAAAALLTREASKLTFGQDIEITSSHNLESLLRSPPDKWLTNARITQYQVLLLDPPRVRFKQTAALNPATLLPETDDTLPIHHCLDTLDSLTSTRPDLTDQPLAQAEATLFTDGSSYIRDGKRYAGAAVVTLDSVIWAEPLPIGTSAQKAELIALTKALEWSKDKSVNIYTDSRYAFATLHVHGMIYRERGWLTAGGKAIKNAPEILALLTAVWLPKRVAVMHCKGHQKDDAPTSTGNRRADEVAREVAIRPLSTQATISAGKRTADGSEFEKRTADGSEFESPKKKAKVE

SEQ ID NO: 1383 - protein, 2096 aa, synthetic construct
MPAAKRVKLDGGDKKYSIGLDIGTNSVGWAVITDEYKVPSKKFKVLGNTDRHSIKKNLIGALLFDSGETAEATRLKRTARRRYTRRKNRICYLQEIFSNEMAKVDDSFFHRLEESFLVEEDKKHERHPIFGNIVDEVAYHEKYPTIYHLRKKLVDSTDKADLRLIYLALAHMIKFRGHFLIEGDLNPDNSDVDKLFIQLVQTYNQLFEENPINASGVDAKAILSARLSKSRRLENLIAQLPGEKKNGLFGNLIALSLGLTPNFKSNFDLAEDAKLQLSKDTYDDDLDNLLAQIGDQYADLFLAAKNLSDAILLSDILRVNTEITKAPLSASMIKRYDEHHQDLTLLKALVRQQLPEKYKEIFFDQSKNGYAGYIDGGASQEEFYKFIKPILEKMDGTEELLVKLNREDLLRKQRTFDNGSIPHQIHLGELHAILRRQEDFYPFLKDNREKIEKILTFRIPYYVGPLARGNSRFAWMTRKSEETITPWNFEEVVDKGASAQSFIERMTNFDKNLPNEKVLPKHSLLYEYFTVYNELTKVKYVTEGMRKPAFLSGEQKKAIVDLLFKTNRKVTVKQLKEDYFKKIECFDSVEISGVEDRFNASLGTYHDLLKIIKDKDFLDNEENEDILEDIVLTLTLFEDREMIEERLKTYAHLFDDKVMKQLKRRRYTGWGRLSRKLINGIRDKQSGKTILDFLKSDGFANRNFMQLIHDDSLTFKEDIQKAQVSGQGDSLHEHIANLAGSPAIKKGILQTVKVVDELVKVMGRHKPENIVIEMARENQTTQKGQKNSRERMKRIEEGIKELGSQILKEHPVENTQLQNEKLYLYYLQNGRDMYVDQELDINRLSDYDVDHIVPQSFLKDDSIDNKVLTRSDKARGKSDNVPSEEVVKKMKNYWRQLLNAKLITQRKFDNLTKAERGGLSELDKAGFIKRQLVETRQITKHVAQILDSRMNTKYDENDKLIREVKVITLKSKLVSDFRKDFQFYKVREINNYHHAHDAYLNAVVGTALIKKYPKLESEFVYGDYKVYDVRKMIAKSEQEIGKATAKYFFYSNIMNFFKTEITLANGEIRKRPLIETNGETGEIVWDKGRDFATVRKVLSMPQVNIVKKTEVQTGGFSKESILPKRNSDKLIARKKDWDPKKYGGFDSPTVAYSVLVVAKVEKGKSKKLKSVKELLGITIMERSSFEKNPIDFLEAKGYKEVKKDLIIKLPKYSLFELENGRKRMLASAGELQKGNELALPSKYVNFLYLASHYEKLKGSPEDNEQKQLFVEQHKHYLDEIIEQISEFSKRVILADANLDKVLSAYNKHRDKPIREQAENIIHLFTLTNLGAPAAFKYFDTTIDRKRYTSTKEVLDATLIHQSITGLYETRIDLSQLGGDGGGGSPAPGGGGGTAPLEEEYRLFLEAPIQNVTLLEQWKREIPKVWAEINPPGLASTQAPIHVQLLSTALPVRVRQYPITLEAKRSLRETIRKFRAAGILRPVHSPWNTPLLPVRKSGTSEYRMVQDLREVNKRVETIHPTVPNPYTLLSLLPPDRIWYSVLDLKDAFFCIPLAPESQLIFAFEWADAEEGESGQLTWTRLPQGFKNSPTLFNEALNRDLQGFRLDHPSVSLLQYVDDLLIAADTQAACLSATRDLLMTLAELGYRVSGKKAQLCQEEVTYLGFKIHKGSRSLSNSRTQAILQIPVPKTKRQVREFLGKIGYCRLFIPGFAELAQPLYAATRPGNDPLVWGEKEEEAFQSLKLALTQPPALALPSLDKPFQLFVEETSGAAKGVLTQALGPWKRPVAYLSKRLDPVAAGWPRCLRAIAAAALLTREASKLTFGQDIEITSSHNLESLLRSPPDKWLTNARITQYQVLLLDPPRVRFKQTAALNPATLLPETDDTLPIHHCLDTLDSLTSTRPDLTDQPLAQAEATLFTDGSSYIRDGKRYAGAAVVTLDSVIWAEPLPIGTSAQKAELIALTKALEWSKDKSVNIYTDSRYAFATLHVHGMIYRERGWLTAGGKAIKNAPEILALLTAVWLPKRVAVMHCKGHQKDDAPTSTGNRRADEVAREVAIRPLSTQATISAGKRTADGSEFEKRTADGSEFESPKKKAKVE

SEQ ID NO: 1384 - protein, 2098 aa, synthetic construct
MPAAKRVKLDGGDKKYSIGLDIGTNSVGWAVITDEYKVPSKKFKVLGNTDRHSIKKNLIGALLFDSGETAEATRLKRTARRRYTRRKNRICYLQEIFSNEMAKVDDSFFHRLEESFLVEEDKKHERHPIFGNIVDEVAYHEKYPTIYHLRKKLVDSTDKADLRLIYLALAHMIKFRGHFLIEGDLNPDNSDVDKLFIQLVQTYNQLFEENPINASGVDAKAILSARLSKSRRLENLIAQLPGEKKNGLFGNLIALSLGLTPNFKSNFDLAEDAKLQLSKDTYDDDLDNLLAQIGDQYADLFLAAKNLSDAILLSDILRVNTEITKAPLSASMIKRYDEHHQDLTLLKALVRQQLPEKYKEIFFDQSKNGYAGYIDGGASQEEFYKFIKPILEKMDGTEELLVKLNREDLLRKQRTFDNGSIPHQIHLGELHAILRRQEDFYPFLKDNREKIEKILTFRIPYYVGPLARGNSRFAWMTRKSEETITPWNFEEVVDKGASAQSFIERMTNFDKNLPNEKVLPKHSLLYEYFTVYNELTKVKYVTEGMRKPAFLSGEQKKAIVDLLFKTNRKVTVKQLKEDYFKKIECFDSVEISGVEDRFNASLGTYHDLLKIIKDKDFLDNEENEDILEDIVLTLTLFEDREMIEERLKTYAHLFDDKVMKQLKRRRYTGWGRLSRKLINGIRDKQSGKTILDFLKSDGFANRNFMQLIHDDSLTFKEDIQKAQVSGQGDSLHEHIANLAGSPAIKKGILQTVKVVDELVKVMGRHKPENIVIEMARENQTTQKGQKNSRERMKRIEEGIKELGSQILKEHPVENTQLQNEKLYLYYLQNGRDMYVDQELDINRLSDYDVDHIVPQSFLKDDSIDNKVLTRSDKARGKSDNVPSEEVVKKMKNYWRQLLNAKLITQRKFDNLTKAERGGLSELDKAGFIKRQLVETRQITKHVAQILDSRMNTKYDENDKLIREVKVITLKSKLVSDFRKDFQFYKVREINNYHHAHDAYLNAVVGTALIKKYPKLESEFVYGDYKVYDVRKMIAKSEQEIGKATAKYFFYSNIMNFFKTEITLANGEIRKRPLIETNGETGEIVWDKGRDFATVRKVLSMPQVNIVKKTEVQTGGFSKESILPKRNSDKLIARKKDWDPKKYGGFDSPTVAYSVLVVAKVEKGKSKKLKSVKELLGITIMERSSFEKNPIDFLEAKGYKEVKKDLIIKLPKYSLFELENGRKRMLASAGELQKGNELALPSKYVNFLYLASHYEKLKGSPEDNEQKQLFVEQHKHYLDEIIEQISEFSKRVILADANLDKVLSAYNKHRDKPIREQAENIIHLFTLTNLGAPAAFKYFDTTIDRKRYTSTKEVLDATLIHQSITGLYETRIDLSQLGGDGGGGGEAAAKPAPGGTAPLEEEYRLFLEAPIQNVTLLEQWKREIPKVWAEINPPGLASTQAPIHVQLLSTALPVRVRQYPITLEAKRSLRETIRKFRAAGILRPVHSPWNTPLLPVRKSGTSEYRMVQDLREVNKRVETIHPTVPNPYTLLSLLPPDRIWYSVLDLKDAFFCIPLAPESQLIFAFEWADAEEGESGQLTWTRLPQGFKNSPTLFNEALNRDLQGFRLDHPSVSLLQYVDDLLIAADTQAACLSATRDLLMTLAELGYRVSGKKAQLCQEEVTYLGFKIHKGSRSLSNSRTQAILQIPVPKTKRQVREFLGKIGYCRLFIPGFAELAQPLYAATRPGNDPLVWGEKEEEAFQSLKLALTQPPALALPSLDKPFQLFVEETSGAAKGVLTQALGPWKRPVAYLSKRLDPVAAGWPRCLRAIAAAALLTREASKLTFGQDIEITSSHNLESLLRSPPDKWLTNARITQYQVLLLDPPRVRFKQTAALNPATLLPETDDTLPIHHCLDTLDSLTSTRPDLTDQPLAQAEATLFTDGSSYIRDGKRYAGAAVVTLDSVIWAEPLPIGTSAQKAELIALTKALEWSKDKSVNIYTDSRYAFATLHVHGMIYRERGWLTAGGKAIKNAPEILALLTAVWLPKRVAVMHCKGHQKDDAPTSTGNRRADEVAREVAIRPLSTQATISAGKRTADGSEFEKRTADGSEFESPKKKAKVE

SEQ ID NO: 1385 - protein, 2096 aa, synthetic construct
MPAAKRVKLDGGDKKYSIGLDIGTNSVGWAVITDEYKVPSKKFKVLGNTDRHSIKKNLIGALLFDSGETAEATRLKRTARRRYTRRKNRICYLQEIFSNEMAKVDDSFFHRLEESFLVEEDKKHERHPIFGNIVDEVAYHEKYPTIYHLRKKLVDSTDKADLRLIYLALAHMIKFRGHFLIEGDLNPDNSDVDKLFIQLVQTYNQLFEENPINASGVDAKAILSARLSKSRRLENLIAQLPGEKKNGLFGNLIALSLGLTPNFKSNFDLAEDAKLQLSKDTYDDDLDNLLAQIGDQYADLFLAAKNLSDAILLSDILRVNTEITKAPLSASMIKRYDEHHQDLTLLKALVRQQLPEKYKEIFFDQSKNGYAGYIDGGASQEEFYKFIKPILEKMDGTEELLVKLNREDLLRKQRTFDNGSIPHQIHLGELHAILRRQEDFYPFLKDNREKIEKILTFRIPYYVGPLARGNSRFAWMTRKSEETITPWNFEEVVDKGASAQSFIERMTNFDKNLPNEKVLPKHSLLYEYFTVYNELTKVKYVTEGMRKPAFLSGEQKKAIVDLLFKTNRKVTVKQLKEDYFKKIECFDSVEISGVEDRFNASLGTYHDLLKIIKDKDFLDNEENEDILEDIVLTLTLFEDREMIEERLKTYAHLFDDKVMKQLKRRRYTGWGRLSRKLINGIRDKQSGKTILDFLKSDGFANRNFMQLIHDDSLTFKEDIQKAQVSGQGDSLHEHIANLAGSPAIKKGILQTVKVVDELVKVMGRHKPENIVIEMARENQTTQKGQKNSRERMKRIEEGIKELGSQILKEHPVENTQLQNEKLYLYYLQNGRDMYVDQELDINRLSDYDVDHIVPQSFLKDDSIDNKVLTRSDKARGKSDNVPSEEVVKKMKNYWRQLLNAKLITQRKFDNLTKAERGGLSELDKAGFIKRQLVETRQITKHVAQILDSRMNTKYDENDKLIREVKVITLKSKLVSDFRKDFQFYKVREINNYHHAHDAYLNAVVGTALIKKYPKLESEFVYGDYKVYDVRKMIAKSEQEIGKATAKYFFYSNIMNFFKTEITLANGEIRKRPLIETNGETGEIVWDKGRDFATVRKVLSMPQVNIVKKTEVQTGGFSKESILPKRNSDKLIARKKDWDPKKYGGFDSPTVAYSVLVVAKVEKGKSKKLKSVKELLGITIMERSSFEKNPIDFLEAKGYKEVKKDLIIKLPKYSLFELENGRKRMLASAGELQKGNELALPSKYVNFLYLASHYEKLKGSPEDNEQKQLFVEQHKHYLDEIIEQISEFSKRVILADANLDKVLSAYNKHRDKPIREQAENIIHLFTLTNLGAPAAFKYFDTTIDRKRYTSTKEVLDATLIHQSITGLYETRIDLSQLGGDGGPAPGGSGSSGGTAPLEEEYRLFLEAPIQNVTLLEQWKREIPKVWAEINPPGLASTQAPIHVQLLSTALPVRVRQYPITLEAKRSLRETIRKFRAAGILRPVHSPWNTPLLPVRKSGTSEYRMVQDLREVNKRVETIHPTVPNPYTLLSLLPPDRIWYSVLDLKDAFFCIPLAPESQLIFAFEWADAEEGESGQLTWTRLPQGFKNSPTLFNEALNRDLQGFRLDHPSVSLLQYVDDLLIAADTQAACLSATRDLLMTLAELGYRVSGKKAQLCQEEVTYLGFKIHKGSRSLSNSRTQAILQIPVPKTKRQVREFLGKIGYCRLFIPGFAELAQPLYAATRPGNDPLVWGEKEEEAFQSLKLALTQPPALALPSLDKPFQLFVEETSGAAKGVLTQALGPWKRPVAYLSKRLDPVAAGWPRCLRAIAAAALLTREASKLTFGQDIEITSSHNLESLLRSPPDKWLTNARITQYQVLLLDPPRVRFKQTAALNPATLLPETDDTLPIHHCLDTLDSLTSTRPDLTDQPLAQAEATLFTDGSSYIRDGKRYAGAAVVTLDSVIWAEPLPIGTSAQKAELIALTKALEWSKDKSVNIYTDSRYAFATLHVHGMIYRERGWLTAGGKAIKNAPEILALLTAVWLPKRVAVMHCKGHQKDDAPTSTGNRRADEVAREVAIRPLSTQATISAGKRTADGSEFEKRTADGSEFESPKKKAKVE

SEQ ID NO: 1386 - protein, 2099 aa, synthetic construct
MPAAKRVKLDGGDKKYSIGLDIGTNSVGWAVITDEYKVPSKKFKVLGNTDRHSIKKNLIGALLFDSGETAEATRLKRTARRRYTRRKNRICYLQEIFSNEMAKVDDSFFHRLEESFLVEEDKKHERHPIFGNIVDEVAYHEKYPTIYHLRKKLVDSTDKADLRLIYLALAHMIKFRGHFLIEGDLNPDNSDVDKLFIQLVQTYNQLFEENPINASGVDAKAILSARLSKSRRLENLIAQLPGEKKNGLFGNLIALSLGLTPNFKSNFDLAEDAKLQLSKDTYDDDLDNLLAQIGDQYADLFLAAKNLSDAILLSDILRVNTEITKAPLSASMIKRYDEHHQDLTLLKALVRQQLPEKYKEIFFDQSKNGYAGYIDGGASQEEFYKFIKPILEKMDGTEELLVKLNREDLLRKQRTFDNGSIPHQIHLGELHAILRRQEDFYPFLKDNREKIEKILTFRIPYYVGPLARGNSRFAWMTRKSEETITPWNFEEVVDKGASAQSFIERMTNFDKNLPNEKVLPKHSLLYEYFTVYNELTKVKYVTEGMRKPAFLSGEQKKAIVDLLFKTNRKVTVKQLKEDYFKKIECFDSVEISGVEDRFNASLGTYHDLLKIIKDKDFLDNEENEDILEDIVLTLTLFEDREMIEERLKTYAHLFDDKVMKQLKRRRYTGWGRLSRKLINGIRDKQSGKTILDFLKSDGFANRNFMQLIHDDSLTFKEDIQKAQVSGQGDSLHEHIANLAGSPAIKKGILQTVKVVDELVKVMGRHKPENIVIEMARENQTTQKGQKNSRERMKRIEEGIKELGSQILKEHPVENTQLQNEKLYLYYLQNGRDMYVDQELDINRLSDYDVDHIVPQSFLKDDSIDNKVLTRSDKARGKSDNVPSEEVVKKMKNYWRQLLNAKLITQRKFDNLTKAERGGLSELDKAGFIKRQLVETRQITKHVAQILDSRMNTKYDENDKLIREVKVITLKSKLVSDFRKDFQFYKVREINNYHHAHDAYLNAVVGTALIKKYPKLESEFVYGDYKVYDVRKMIAKSEQEIGKATAKYFFYSNIMNFFKTEITLANGEIRKRPLIETNGETGEIVWDKGRDFATVRKVLSMPQVNIVKKTEVQTGGFSKESILPKRNSDKLIARKKDWDPKKYGGFDSPTVAYSVLVVAKVEKGKSKKLKSVKELLGITIMERSSFEKNPIDFLEAKGYKEVKKDLIIKLPKYSLFELENGRKRMLASAGELQKGNELALPSKYVNFLYLASHYEKLKGSPEDNEQKQLFVEQHKHYLDEIIEQISEFSKRVILADANLDKVLSAYNKHRDKPIREQAENIIHLFTLTNLGAPAAFKYFDTTIDRKRYTSTKEVLDATLIHQSITGLYETRIDLSQLGGDGGGSSGSSGSSGSSGGTAPLEEEYRLFLEAPIQNVTLLEQWKREIPKVWAEINPPGLASTQAPIHVQLLSTALPVRVRQYPITLEAKRSLRETIRKFRAAGILRPVHSPWNTPLLPVRKSGTSEYRMVQDLREVNKRVETIHPTVPNPYTLLSLLPPDRIWYSVLDLKDAFFCIPLAPESQLIFAFEWADAEEGESGQLTWTRLPQGFKNSPTLFNEALNRDLQGFRLDHPSVSLLQYVDDLLIAADTQAACLSATRDLLMTLAELGYRVSGKKAQLCQEEVTYLGFKIHKGSRSLSNSRTQAILQIPVPKTKRQVREFLGKIGYCRLFIPGFAELAQPLYAATRPGNDPLVWGEKEEEAFQSLKLALTQPPALALPSLDKPFQLFVEETSGAAKGVLTQALGPWKRPVAYLSKRLDPVAAGWPRCLRAIAAAALLTREASKLTFGQDIEITSSHNLESLLRSPPDKWLTNARITQYQVLLLDPPRVRFKQTAALNPATLLPETDDTLPIHHCLDTLDSLTSTRPDLTDQPLAQAEATLFTDGSSYIRDGKRYAGAAVVTLDSVIWAEPLPIGTSAQKAELIALTKALEWSKDKSVNIYTDSRYAFATLHVHGMIYRERGWLTAGGKAIKNAPEILALLTAVWLPKRVAVMHCKGHQKDDAPTSTGNRRADEVAREVAIRPLSTQATISAGKRTADGSEFEKRTADGSEFESPKKKAKVE

SEQ ID NO: 1387 - protein, 2098 aa, synthetic construct
MPAAKRVKLDGGDKKYSIGLDIGTNSVGWAVITDEYKVPSKKFKVLGNTDRHSIKKNLIGALLFDSGETAEATRLKRTARRRYTRRKNRICYLQEIFSNEMAKVDDSFFHRLEESFLVEEDKKHERHPIFGNIVDEVAYHEKYPTIYHLRKKLVDSTDKADLRLIYLALAHMIKFRGHFLIEGDLNPDNSDVDKLFIQLVQTYNQLFEENPINASGVDAKAILSARLSKSRRLENLIAQLPGEKKNGLFGNLIALSLGLTPNFKSNFDLAEDAKLQLSKDTYDDDLDNLLAQIGDQYADLFLAAKNLSDAILLSDILRVNTEITKAPLSASMIKRYDEHHQDLTLLKALVRQQLPEKYKEIFFDQSKNGYAGYIDGGASQEEFYKFIKPILEKMDGTEELLVKLNREDLLRKQRTFDNGSIPHQIHLGELHAILRRQEDFYPFLKDNREKIEKILTFRIPYYVGPLARGNSRFAWMTRKSEETITPWNFEEVVDKGASAQSFIERMTNFDKNLPNEKVLPKHSLLYEYFTVYNELTKVKYVTEGMRKPAFLSGEQKKAIVDLLFKTNRKVTVKQLKEDYFKKIECFDSVEISGVEDRFNASLGTYHDLLKIIKDKDFLDNEENEDILEDIVLTLTLFEDREMIEERLKTYAHLFDDKVMKQLKRRRYTGWGRLSRKLINGIRDKQSGKTILDFLKSDGFANRNFMQLIHDDSLTFKEDIQKAQVSGQGDSLHEHIANLAGSPAIKKGILQTVKVVDELVKVMGRHKPENIVIEMARENQTTQKGQKNSRERMKRIEEGIKELGSQILKEHPVENTQLQNEKLYLYYLQNGRDMYVDQELDINRLSDYDVDHIVPQSFLKDDSIDNKVLTRSDKARGKSDNVPSEEVVKKMKNYWRQLLNAKLITQRKFDNLTKAERGGLSELDKAGFIKRQLVETRQITKHVAQILDSRMNTKYDENDKLIREVKVITLKSKLVSDFRKDFQFYKVREINNYHHAHDAYLNAVVGTALIKKYPKLESEFVYGDYKVYDVRKMIAKSEQEIGKATAKYFFYSNIMNFFKTEITLANGEIRKRPLIETNGETGEIVWDKGRDFATVRKVLSMPQVNIVKKTEVQTGGFSKESILPKRNSDKLIARKKDWDPKKYGGFDSPTVAYSVLVVAKVEKGKSKKLKSVKELLGITIMERSSFEKNPIDFLEAKGYKEVKKDLIIKLPKYSLFELENGRKRMLASAGELQKGNELALPSKYVNFLYLASHYEKLKGSPEDNEQKQLFVEQHKHYLDEIIEQISEFSKRVILADANLDKVLSAYNKHRDKPIREQAENIIHLFTLTNLGAPAAFKYFDTTIDRKRYTSTKEVLDATLIHQSITGLYETRIDLSQLGGDGGPAPEAAAKGGGGGTAPLEEEYRLFLEAPIQNVTLLEQWKREIPKVWAEINPPGLASTQAPIHVQLLSTALPVRVRQYPITLEAKRSLRETIRKFRAAGILRPVHSPWNTPLLPVRKSGTSEYRMVQDLREVNKRVETIHPTVPNPYTLLSLLPPDRIWYSVLDLKDAFFCIPLAPESQLIFAFEWADAEEGESGQLTWTRLPQGFKNSPTLFNEALNRDLQGFRLDHPSVSLLQYVDDLLIAADTQAACLSATRDLLMTLAELGYRVSGKKAQLCQEEVTYLGFKIHKGSRSLSNSRTQAILQIPVPKTKRQVREFLGKIGYCRLFIPGFAELAQPLYAATRPGNDPLVWGEKEEEAFQSLKLALTQPPALALPSLDKPFQLFVEETSGAAKGVLTQALGPWKRPVAYLSKRLDPVAAGWPRCLRAIAAAALLTREASKLTFGQDIEITSSHNLESLLRSPPDKWLTNARITQYQVLLLDPPRVRFKQTAALNPATLLPETDDTLPIHHCLDTLDSLTSTRPDLTDQPLAQAEATLFTDGSSYIRDGKRYAGAAVVTLDSVIWAEPLPIGTSAQKAELIALTKALEWSKDKSVNIYTDSRYAFATLHVHGMIYRERGWLTAGGKAIKNAPEILALLTAVWLPKRVAVMHCKGHQKDDAPTSTGNRRADEVAREVAIRPLSTQATISAGKRTADGSEFEKRTADGSEFESPKKKAKVE

SEQ ID NO: 1388 - protein, 2098 aa, synthetic construct
MPAAKRVKLDGGDKKYSIGLDIGTNSVGWAVITDEYKVPSKKFKVLGNTDRHSIKKNLIGALLFDSGETAEATRLKRTARRRYTRRKNRICYLQEIFSNEMAKVDDSFFHRLEESFLVEEDKKHERHPIFGNIVDEVAYHEKYPTIYHLRKKLVDSTDKADLRLIYLALAHMIKFRGHFLIEGDLNPDNSDVDKLFIQLVQTYNQLFEENPINASGVDAKAILSARLSKSRRLENLIAQLPGEKKNGLFGNLIALSLGLTPNFKSNFDLAEDAKLQLSKDTYDDDLDNLLAQIGDQYADLFLAAKNLSDAILLSDILRVNTEITKAPLSASMIKRYDEHHQDLTLLKALVRQQLPEKYKEIFFDQSKNGYAGYIDGGASQEEFYKFIKPILEKMDGTEELLVKLNREDLLRKQRTFDNGSIPHQIHLGELHAILRRQEDFYPFLKDNREKIEKILTFRIPYYVGPLARGNSRFAWMTRKSEETITPWNFEEVVDKGASAQSFIERMTNFDKNLPNEKVLPKHSLLYEYFTVYNELTKVKYVTEGMRKPAFLSGEQKKAIVDLLFKTNRKVTVKQLKEDYFKKIECFDSVEISGVEDRFNASLGTYHDLLKIIKDKDFLDNEENEDILEDIVLTLTLFEDREMIEERLKTYAHLFDDKVMKQLKRRRYTGWGRLSRKLINGIRDKQSGKTILDFLKSDGFANRNFMQLIHDDSLTFKEDIQKAQVSGQGDSLHEHIANLAGSPAIKKGILQTVKVVDELVKVMGRHKPENIVIEMARENQTTQKGQKNSRERMKRIEEGIKELGSQILKEHPVENTQLQNEKLYLYYLQNGRDMYVDQELDINRLSDYDVDHIVPQSFLKDDSIDNKVLTRSDKARGKSDNVPSEEVVKKMKNYWRQLLNAKLITQRKFDNLTKAERGGLSELDKAGFIKRQLVETRQITKHVAQILDSRMNTKYDENDKLIREVKVITLKSKLVSDFRKDFQFYKVREINNYHHAHDAYLNAVVGTALIKKYPKLESEFVYGDYKVYDVRKMIAKSEQEIGKATAKYFFYSNIMNFFKTEITLANGEIRKRPLIETNGETGEIVWDKGRDFATVRKVLSMPQVNIVKKTEVQTGGFSKESILPKRNSDKLIARKKDWDPKKYGGFDSPTVAYSVLVVAKVEKGKSKKLKSVKELLGITIMERSSFEKNPIDFLEAKGYKEVKKDLIIKLPKYSLFELENGRKRMLASAGELQKGNELALPSKYVNFLYLASHYEKLKGSPEDNEQKQLFVEQHKHYLDEIIEQISEFSKRVILADANLDKVLSAYNKHRDKPIREQAENIIHLFTLTNLGAPAAFKYFDTTIDRKRYTSTKEVLDATLIHQSITGLYETRIDLSQLGGDGGPAPEAAAKGSSGGTAPLEEEYRLFLEAPIQNVTLLEQWKREIPKVWAEINPPGLASTQAPIHVQLLSTALPVRVRQYPITLEAKRSLRETIRKFRAAGILRPVHSPWNTPLLPVRKSGTSEYRMVQDLREVNKRVETIHPTVPNPYTLLSLLPPDRIWYSVLDLKDAFFCIPLAPESQLIFAFEWADAEEGESGQLTWTRLPQGFKNSPTLFNEALNRDLQGFRLDHPSVSLLQYVDDLLIAADTQAACLSATRDLLMTLAELGYRVSGKKAQLCQEEVTYLGFKIHKGSRSLSNSRTQAILQIPVPKTKRQVREFLGKIGYCRLFIPGFAELAQPLYAATRPGNDPLVWGEKEEEAFQSLKLALTQPPALALPSLDKPFQLFVEETSGAAKGVLTQALGPWKRPVAYLSKRLDPVAAGWPRCLRAIAAAALLTREASKLTFGQDIEITSSHNLESLLRSPPDKWLTNARITQYQVLLLDPPRVRFKQTAALNPATLLPETDDTLPIHHCLDTLDSLTSTRPDLTDQPLAQAEATLFTDGSSYIRDGKRYAGAAVVTLDSVIWAEPLPIGTSAQKAELIALTKALEWSKDKSVNIYTDSRYAFATLHVHGMIYRERGWLTAGGKAIKNAPEILALLTAVWLPKRVAVMHCKGHQKDDAPTSTGNRRADEVAREVAIRPLSTQATISAGKRTADGSEFEKRTADGSEFESPKKKAKVE

SEQ ID NO: 1389 - protein, 2090 aa, synthetic construct
MPAAKRVKLDGGDKKYSIGLDIGTNSVGWAVITDEYKVPSKKFKVLGNTDRHSIKKNLIGALLFDSGETAEATRLKRTARRRYTRRKNRICYLQEIFSNEMAKVDDSFFHRLEESFLVEEDKKHERHPIFGNIVDEVAYHEKYPTIYHLRKKLVDSTDKADLRLIYLALAHMIKFRGHFLIEGDLNPDNSDVDKLFIQLVQTYNQLFEENPINASGVDAKAILSARLSKSRRLENLIAQLPGEKKNGLFGNLIALSLGLTPNFKSNFDLAEDAKLQLSKDTYDDDLDNLLAQIGDQYADLFLAAKNLSDAILLSDILRVNTEITKAPLSASMIKRYDEHHQDLTLLKALVRQQLPEKYKEIFFDQSKNGYAGYIDGGASQEEFYKFIKPILEKMDGTEELLVKLNREDLLRKQRTFDNGSIPHQIHLGELHAILRRQEDFYPFLKDNREKIEKILTFRIPYYVGPLARGNSRFAWMTRKSEETITPWNFEEVVDKGASAQSFIERMTNFDKNLPNEKVLPKHSLLYEYFTVYNELTKVKYVTEGMRKPAFLSGEQKKAIVDLLFKTNRKVTVKQLKEDYFKKIECFDSVEISGVEDRFNASLGTYHDLLKIIKDKDFLDNEENEDILEDIVLTLTLFEDREMIEERLKTYAHLFDDKVMKQLKRRRYTGWGRLSRKLINGIRDKQSGKTILDFLKSDGFANRNFMQLIHDDSLTFKEDIQKAQVSGQGDSLHEHIANLAGSPAIKKGILQTVKVVDELVKVMGRHKPENIVIEMARENQTTQKGQKNSRERMKRIEEGIKELGSQILKEHPVENTQLQNEKLYLYYLQNGRDMYVDQELDINRLSDYDVDHIVPQSFLKDDSIDNKVLTRSDKARGKSDNVPSEEVVKKMKNYWRQLLNAKLITQRKFDNLTKAERGGLSELDKAGFIKRQLVETRQITKHVAQILDSRMNTKYDENDKLIREVKVITLKSKLVSDFRKDFQFYKVREINNYHHAHDAYLNAVVGTALIKKYPKLESEFVYGDYKVYDVRKMIAKSEQEIGKATAKYFFYSNIMNFFKTEITLANGEIRKRPLIETNGETGEIVWDKGRDFATVRKVLSMPQVNIVKKTEVQTGGFSKESILPKRNSDKLIARKKDWDPKKYGGFDSPTVAYSVLVVAKVEKGKSKKLKSVKELLGITIMERSSFEKNPIDFLEAKGYKEVKKDLIIKLPKYSLFELENGRKRMLASAGELQKGNELALPSKYVNFLYLASHYEKLKGSPEDNEQKQLFVEQHKHYLDEIIEQISEFSKRVILADANLDKVLSAYNKHRDKPIREQAENIIHLFTLTNLGAPAAFKYFDTTIDRKRYTSTKEVLDATLIHQSITGLYETRIDLSQLGGDGGGGGGGTAPLEEEYRLFLEAPIQNVTLLEQWKREIPKVWAEINPPGLASTQAPIHVQLLSTALPVRVRQYPITLEAKRSLRETIRKFRAAGILRPVHSPWNTPLLPVRKSGTSEYRMVQDLREVNKRVETIHPTVPNPYTLLSLLPPDRIWYSVLDLKDAFFCIPLAPESQLIFAFEWADAEEGESGQLTWTRLPQGFKNSPTLFNEALNRDLQGFRLDHPSVSLLQYVDDLLIAADTQAACLSATRDLLMTLAELGYRVSGKKAQLCQEEVTYLGFKIHKGSRSLSNSRTQAILQIPVPKTKRQVREFLGKIGYCRLFIPGFAELAQPLYAATRPGNDPLVWGEKEEEAFQSLKLALTQPPALALPSLDKPFQLFVEETSGAAKGVLTQALGPWKRPVAYLSKRLDPVAAGWPRCLRAIAAAALLTREASKLTFGQDIEITSSHNLESLLRSPPDKWLTNARITQYQVLLLDPPRVRFKQTAALNPATLLPETDDTLPIHHCLDTLDSLTSTRPDLTDQPLAQAEATLFTDGSSYIRDGKRYAGAAVVTLDSVIWAEPLPIGTSAQKAELIALTKALEWSKDKSVNIYTDSRYAFATLHVHGMIYRERGWLTAGGKAIKNAPEILALLTAVWLPKRVAVMHCKGHQKDDAPTSTGNRRADEVAREVAIRPLSTQATISAGKRTADGSEFEKRTADGSEFESPKKKAKVE

SEQ ID NO: 1390 - protein, 2098 aa, synthetic construct
MPAAKRVKLDGGDKKYSIGLDIGTNSVGWAVITDEYKVPSKKFKVLGNTDRHSIKKNLIGALLFDSGETAEATRLKRTARRRYTRRKNRICYLQEIFSNEMAKVDDSFFHRLEESFLVEEDKKHERHPIFGNIVDEVAYHEKYPTIYHLRKKLVDSTDKADLRLIYLALAHMIKFRGHFLIEGDLNPDNSDVDKLFIQLVQTYNQLFEENPINASGVDAKAILSARLSKSRRLENLIAQLPGEKKNGLFGNLIALSLGLTPNFKSNFDLAEDAKLQLSKDTYDDDLDNLLAQIGDQYADLFLAAKNLSDAILLSDILRVNTEITKAPLSASMIKRYDEHHQDLTLLKALVRQQLPEKYKEIFFDQSKNGYAGYIDGGASQEEFYKFIKPILEKMDGTEELLVKLNREDLLRKQRTFDNGSIPHQIHLGELHAILRRQEDFYPFLKDNREKIEKILTFRIPYYVGPLARGNSRFAWMTRKSEETITPWNFEEVVDKGASAQSFIERMTNFDKNLPNEKVLPKHSLLYEYFTVYNELTKVKYVTEGMRKPAFLSGEQKKAIVDLLFKTNRKVTVKQLKEDYFKKIECFDSVEISGVEDRFNASLGTYHDLLKIIKDKDFLDNEENEDILEDIVLTLTLFEDREMIEERLKTYAHLFDDKVMKQLKRRRYTGWGRLSRKLINGIRDKQSGKTILDFLKSDGFANRNFMQLIHDDSLTFKEDIQKAQVSGQGDSLHEHIANLAGSPAIKKGILQTVKVVDELVKVMGRHKPENIVIEMARENQTTQKGQKNSRERMKRIEEGIKELGSQILKEHPVENTQLQNEKLYLYYLQNGRDMYVDQELDINRLSDYDVDHIVPQSFLKDDSIDNKVLTRSDKARGKSDNVPSEEVVKKMKNYWRQLLNAKLITQRKFDNLTKAERGGLSELDKAGFIKRQLVETRQITKHVAQILDSRMNTKYDENDKLIREVKVITLKSKLVSDFRKDFQFYKVREINNYHHAHDAYLNAVVGTALIKKYPKLESEFVYGDYKVYDVRKMIAKSEQEIGKATAKYFFYSNIMNFFKTEITLANGEIRKRPLIETNGETGEIVWDKGRDFATVRKVLSMPQVNIVKKTEVQTGGFSKESILPKRNSDKLIARKKDWDPKKYGGFDSPTVAYSVLVVAKVEKGKSKKLKSVKELLGITIMERSSFEKNPIDFLEAKGYKEVKKDLIIKLPKYSLFELENGRKRMLASAGELQKGNELALPSKYVNFLYLASHYEKLKGSPEDNEQKQLFVEQHKHYLDEIIEQISEFSKRVILADANLDKVLSAYNKHRDKPIREQAENIIHLFTLTNLGAPAAFKYFDTTIDRKRYTSTKEVLDATLIHQSITGLYETRIDLSQLGGDGGEAAAKGGGGGSGGTAPLEEEYRLFLEAPIQNVTLLEQWKREIPKVWAEINPPGLASTQAPIHVQLLSTALPVRVRQYPITLEAKRSLRETIRKFRAAGILRPVHSPWNTPLLPVRKSGTSEYRMVQDLREVNKRVETIHPTVPNPYTLLSLLPPDRIWYSVLDLKDAFFCIPLAPESQLIFAFEWADAEEGESGQLTWTRLPQGFKNSPTLFNEALNRDLQGFRLDHPSVSLLQYVDDLLIAADTQAACLSATRDLLMTLAELGYRVSGKKAQLCQEEVTYLGFKIHKGSRSLSNSRTQAILQIPVPKTKRQVREFLGKIGYCRLFIPGFAELAQPLYAATRPGNDPLVWGEKEEEAFQSLKLALTQPPALALPSLDKPFQLFVEETSGAAKGVLTQALGPWKRPVAYLSKRLDPVAAGWPRCLRAIAAAALLTREASKLTFGQDIEITSSHNLESLLRSPPDKWLTNARITQYQVLLLDPPRVRFKQTAALNPATLLPETDDTLPIHHCLDTLDSLTSTRPDLTDQPLAQAEATLFTDGSSYIRDGKRYAGAAVVTLDSVIWAEPLPIGTSAQKAELIALTKALEWSKDKSVNIYTDSRYAFATLHVHGMIYRERGWLTAGGKAIKNAPEILALLTAVWLPKRVAVMHCKGHQKDDAPTSTGNRRADEVAREVAIRPLSTQATISAGKRTADGSEFEKRTADGSEFESPKKKAKVE

SEQ ID NO: 1391 - protein, 2093 aa, synthetic construct
MPAAKRVKLDGGDKKYSIGLDIGTNSVGWAVITDEYKVPSKKFKVLGNTDRHSIKKNLIGALLFDSGETAEATRLKRTARRRYTRRKNRICYLQEIFSNEMAKVDDSFFHRLEESFLVEEDKKHERHPIFGNIVDEVAYHEKYPTIYHLRKKLVDSTDKADLRLIYLALAHMIKFRGHFLIEGDLNPDNSDVDKLFIQLVQTYNQLFEENPINASGVDAKAILSARLSKSRRLENLIAQLPGEKKNGLFGNLIALSLGLTPNFKSNFDLAEDAKLQLSKDTYDDDLDNLLAQIGDQYADLFLAAKNLSDAILLSDILRVNTEITKAPLSASMIKRYDEHHQDLTLLKALVRQQLPEKYKEIFFDQSKNGYAGYIDGGASQEEFYKFIKPILEKMDGTEELLVKLNREDLLRKQRTFDNGSIPHQIHLGELHAILRRQEDFYPFLKDNREKIEKILTFRIPYYVGPLARGNSRFAWMTRKSEETITPWNFEEVVDKGASAQSFIERMTNFDKNLPNEKVLPKHSLLYEYFTVYNELTKVKYVTEGMRKPAFLSGEQKKAIVDLLFKTNRKVTVKQLKEDYFKKIECFDSVEISGVEDRFNASLGTYHDLLKIIKDKDFLDNEENEDILEDIVLTLTLFEDREMIEERLKTYAHLFDDKVMKQLKRRRYTGWGRLSRKLINGIRDKQSGKTILDFLKSDGFANRNFMQLIHDDSLTFKEDIQKAQVSGQGDSLHEHIANLAGSPAIKKGILQTVKVVDELVKVMGRHKPENIVIEMARENQTTQKGQKNSRERMKRIEEGIKELGSQILKEHPVENTQLQNEKLYLYYLQNGRDMYVDQELDINRLSDYDVDHIVPQSFLKDDSIDNKVLTRSDKARGKSDNVPSEEVVKKMKNYWRQLLNAKLITQRKFDNLTKAERGGLSELDKAGFIKRQLVETRQITKHVAQILDSRMNTKYDENDKLIREVKVITLKSKLVSDFRKDFQFYKVREINNYHHAHDAYLNAVVGTALIKKYPKLESEFVYGDYKVYDVRKMIAKSEQEIGKATAKYFFYSNIMNFFKTEITLANGEIRKRPLIETNGETGEIVWDKGRDFATVRKVLSMPQVNIVKKTEVQTGGFSKESILPKRNSDKLIARKKDWDPKKYGGFDSPTVAYSVLVVAKVEKGKSKKLKSVKELLGITIMERSSFEKNPIDFLEAKGYKEVKKDLIIKLPKYSLFELENGRKRMLASAGELQKGNELALPSKYVNFLYLASHYEKLKGSPEDNEQKQLFVEQHKHYLDEIIEQISEFSKRVILADANLDKVLSAYNKHRDKPIREQAENIIHLFTLTNLGAPAAFKYFDTTIDRKRYTSTKEVLDATLIHQSITGLYETRIDLSQLGGDGGGGSGGGGGTAPLEEEYRLFLEAPIQNVTLLEQWKREIPKVWAEINPPGLASTQAPIHVQLLSTALPVRVRQYPITLEAKRSLRETIRKFRAAGILRPVHSPWNTPLLPVRKSGTSEYRMVQDLREVNKRVETIHPTVPNPYTLLSLLPPDRIWYSVLDLKDAFFCIPLAPESQLIFAFEWADAEEGESGQLTWTRLPQGFKNSPTLFNEALNRDLQGFRLDHPSVSLLQYVDDLLIAADTQAACLSATRDLLMTLAELGYRVSGKKAQLCQEEVTYLGFKIHKGSRSLSNSRTQAILQIPVPKTKRQVREFLGKIGYCRLFIPGFAELAQPLYAATRPGNDPLVWGEKEEEAFQSLKLALTQPPALALPSLDKPFQLFVEETSGAAKGVLTQALGPWKRPVAYLSKRLDPVAAGWPRCLRAIAAAALLTREASKLTFGQDIEITSSHNLESLLRSPPDKWLTNARITQYQVLLLDPPRVRFKQTAALNPATLLPETDDTLPIHHCLDTLDSLTSTRPDLTDQPLAQAEATLFTDGSSYIRDGKRYAGAAVVTLDSVIWAEPLPIGTSAQKAELIALTKALEWSKDKSVNIYTDSRYAFATLHVHGMIYRERGWLTAGGKAIKNAPEILALLTAVWLPKRVAVMHCKGHQKDDAPTSTGNRRADEVAREVAIRPLSTQATISAGKRTADGSEFEKRTADGSEFESPKKKAKVE

SEQ ID NO: 1392 - protein, 2093 aa, synthetic construct
MPAAKRVKLDGGDKKYSIGLDIGTNSVGWAVITDEYKVPSKKFKVLGNTDRHSIKKNLIGALLFDSGETAEATRLKRTARRRYTRRKNRICYLQEIFSNEMAKVDDSFFHRLEESFLVEEDKKHERHPIFGNIVDEVAYHEKYPTIYHLRKKLVDSTDKADLRLIYLALAHMIKFRGHFLIEGDLNPDNSDVDKLFIQLVQTYNQLFEENPINASGVDAKAILSARLSKSRRLENLIAQLPGEKKNGLFGNLIALSLGLTPNFKSNFDLAEDAKLQLSKDTYDDDLDNLLAQIGDQYADLFLAAKNLSDAILLSDILRVNTEITKAPLSASMIKRYDEHHQDLTLLKALVRQQLPEKYKEIFFDQSKNGYAGYIDGGASQEEFYKFIKPILEKMDGTEELLVKLNREDLLRKQRTFDNGSIPHQIHLGELHAILRRQEDFYPFLKDNREKIEKILTFRIPYYVGPLARGNSRFAWMTRKSEETITPWNFEEVVDKGASAQSFIERMTNFDKNLPNEKVLPKHSLLYEYFTVYNELTKVKYVTEGMRKPAFLSGEQKKAIVDLLFKTNRKVTVKQLKEDYFKKIECFDSVEISGVEDRFNASLGTYHDLLKIIKDKDFLDNEENEDILEDIVLTLTLFEDREMIEERLKTYAHLFDDKVMKQLKRRRYTGWGRLSRKLINGIRDKQSGKTILDFLKSDGFANRNFMQLIHDDSLTFKEDIQKAQVSGQGDSLHEHIANLAGSPAIKKGILQTVKVVDELVKVMGRHKPENIVIEMARENQTTQKGQKNSRERMKRIEEGIKELGSQILKEHPVENTQLQNEKLYLYYLQNGRDMYVDQELDINRLSDYDVDHIVPQSFLKDDSIDNKVLTRSDKARGKSDNVPSEEVVKKMKNYWRQLLNAKLITQRKFDNLTKAERGGLSELDKAGFIKRQLVETRQITKHVAQILDSRMNTKYDENDKLIREVKVITLKSKLVSDFRKDFQFYKVREINNYHHAHDAYLNAVVGTALIKKYPKLESEFVYGDYKVYDVRKMIAKSEQEIGKATAKYFFYSNIMNFFKTEITLANGEIRKRPLIETNGETGEIVWDKGRDFATVRKVLSMPQVNIVKKTEVQTGGFSKESILPKRNSDKLIARKKDWDPKKYGGFDSPTVAYSVLVVAKVEKGKSKKLKSVKELLGITIMERSSFEKNPIDFLEAKGYKEVKKDLIIKLPKYSLFELENGRKRMLASAGELQKGNELALPSKYVNFLYLASHYEKLKGSPEDNEQKQLFVEQHKHYLDEIIEQISEFSKRVILADANLDKVLSAYNKHRDKPIREQAENIIHLFTLTNLGAPAAFKYFDTTIDRKRYTSTKEVLDATLIHQSITGLYETRIDLSQLGGDGGGGSPAPGGTAPLEEEYRLFLEAPIQNVTLLEQWKREIPKVWAEINPPGLASTQAPIHVQLLSTALPVRVRQYPITLEAKRSLRETIRKFRAAGILRPVHSPWNTPLLPVRKSGTSEYRMVQDLREVNKRVETIHPTVPNPYTLLSLLPPDRIWYSVLDLKDAFFCIPLAPESQLIFAFEWADAEEGESGQLTWTRLPQGFKNSPTLFNEALNRDLQGFRLDHPSVSLLQYVDDLLIAADTQAACLSATRDLLMTLAELGYRVSGKKAQLCQEEVTYLGFKIHKGSRSLSNSRTQAILQIPVPKTKRQVREFLGKIGYCRLFIPGFAELAQPLYAATRPGNDPLVWGEKEEEAFQSLKLALTQPPALALPSLDKPFQLFVEETSGAAKGVLTQALGPWKRPVAYLSKRLDPVAAGWPRCLRAIAAAALLTREASKLTFGQDIEITSSHNLESLLRSPPDKWLTNARITQYQVLLLDPPRVRFKQTAALNPATLLPETDDTLPIHHCLDTLDSLTSTRPDLTDQPLAQAEATLFTDGSSYIRDGKRYAGAAVVTLDSVIWAEPLPIGTSAQKAELIALTKALEWSKDKSVNIYTDSRYAFATLHVHGMIYRERGWLTAGGKAIKNAPEILALLTAVWLPKRVAVMHCKGHQKDDAPTSTGNRRADEVAREVAIRPLSTQATISAGKRTADGSEFEKRTADGSEFESPKKKAKVE

SEQ ID NO: 1393 - protein, 2102 aa, synthetic construct
MPAAKRVKLDGGDKKYSIGLDIGTNSVGWAVITDEYKVPSKKFKVLGNTDRHSIKKNLIGALLFDSGETAEATRLKRTARRRYTRRKNRICYLQEIFSNEMAKVDDSFFHRLEESFLVEEDKKHERHPIFGNIVDEVAYHEKYPTIYHLRKKLVDSTDKADLRLIYLALAHMIKFRGHFLIEGDLNPDNSDVDKLFIQLVQTYNQLFEENPINASGVDAKAILSARLSKSRRLENLIAQLPGEKKNGLFGNLIALSLGLTPNFKSNFDLAEDAKLQLSKDTYDDDLDNLLAQIGDQYADLFLAAKNLSDAILLSDILRVNTEITKAPLSASMIKRYDEHHQDLTLLKALVRQQLPEKYKEIFFDQSKNGYAGYIDGGASQEEFYKFIKPILEKMDGTEELLVKLNREDLLRKQRTFDNGSIPHQIHLGELHAILRRQEDFYPFLKDNREKIEKILTFRIPYYVGPLARGNSRFAWMTRKSEETITPWNFEEVVDKGASAQSFIERMTNFDKNLPNEKVLPKHSLLYEYFTVYNELTKVKYVTEGMRKPAFLSGEQKKAIVDLLFKTNRKVTVKQLKEDYFKKIECFDSVEISGVEDRFNASLGTYHDLLKIIKDKDFLDNEENEDILEDIVLTLTLFEDREMIEERLKTYAHLFDDKVMKQLKRRRYTGWGRLSRKLINGIRDKQSGKTILDFLKSDGFANRNFMQLIHDDSLTFKEDIQKAQVSGQGDSLHEHIANLAGSPAIKKGILQTVKVVDELVKVMGRHKPENIVIEMARENQTTQKGQKNSRERMKRIEEGIKELGSQILKEHPVENTQLQNEKLYLYYLQNGRDMYVDQELDINRLSDYDVDHIVPQSFLKDDSIDNKVLTRSDKARGKSDNVPSEEVVKKMKNYWRQLLNAKLITQRKFDNLTKAERGGLSELDKAGFIKRQLVETRQITKHVAQILDSRMNTKYDENDKLIREVKVITLKSKLVSDFRKDFQFYKVREINNYHHAHDAYLNAVVGTALIKKYPKLESEFVYGDYKVYDVRKMIAKSEQEIGKATAKYFFYSNIMNFFKTEITLANGEIRKRPLIETNGETGEIVWDKGRDFATVRKVLSMPQVNIVKKTEVQTGGFSKESILPKRNSDKLIARKKDWDPKKYGGFDSPTVAYSVLVVAKVEKGKSKKLKSVKELLGITIMERSSFEKNPIDFLEAKGYKEVKKDLIIKLPKYSLFELENGRKRMLASAGELQKGNELALPSKYVNFLYLASHYEKLKGSPEDNEQKQLFVEQHKHYLDEIIEQISEFSKRVILADANLDKVLSAYNKHRDKPIREQAENIIHLFTLTNLGAPAAFKYFDTTIDRKRYTSTKEVLDATLIHQSITGLYETRIDLSQLGGDGGGGGGSEAAAKGGGGSGGTAPLEEEYRLFLEAPIQNVTLLEQWKREIPKVWAEINPPGLASTQAPIHVQLLSTALPVRVRQYPITLEAKRSLRETIRKFRAAGILRPVHSPWNTPLLPVRKSGTSEYRMVQDLREVNKRVETIHPTVPNPYTLLSLLPPDRIWYSVLDLKDAFFCIPLAPESQLIFAFEWADAEEGESGQLTWTRLPQGFKNSPTLFNEALNRDLQGFRLDHPSVSLLQYVDDLLIAADTQAACLSATRDLLMTLAELGYRVSGKKAQLCQEEVTYLGFKIHKGSRSLSNSRTQAILQIPVPKTKRQVREFLGKIGYCRLFIPGFAELAQPLYAATRPGNDPLVWGEKEEEAFQSLKLALTQPPALALPSLDKPFQLFVEETSGAAKGVLTQALGPWKRPVAYLSKRLDPVAAGWPRCLRAIAAAALLTREASKLTFGQDIEITSSHNLESLLRSPPDKWLTNARITQYQVLLLDPPRVRFKQTAALNPATLLPETDDTLPIHHCLDTLDSLTSTRPDLTDQPLAQAEATLFTDGSSYIRDGKRYAGAAVVTLDSVIWAEPLPIGTSAQKAELIALTKALEWSKDKSVNIYTDSRYAFATLHVHGMIYRERGWLTAGGKAIKNAPEILALLTAVWLPKRVAVMHCKGHQKDDAPTSTGNRRADEVAREVAIRPLSTQATISAGKRTADGSEFEKRTADGSEFESPKKKAKVE

SEQ ID NO: 1394 - protein, 2098 aa, synthetic construct
MPAAKRVKLDGGDKKYSIGLDIGTNSVGWAVITDEYKVPSKKFKVLGNTDRHSIKKNLIGALLFDSGETAEATRLKRTARRRYTRRKNRICYLQEIFSNEMAKVDDSFFHRLEESFLVEEDKKHERHPIFGNIVDEVAYHEKYPTIYHLRKKLVDSTDKADLRLIYLALAHMIKFRGHFLIEGDLNPDNSDVDKLFIQLVQTYNQLFEENPINASGVDAKAILSARLSKSRRLENLIAQLPGEKKNGLFGNLIALSLGLTPNFKSNFDLAEDAKLQLSKDTYDDDLDNLLAQIGDQYADLFLAAKNLSDAILLSDILRVNTEITKAPLSASMIKRYDEHHQDLTLLKALVRQQLPEKYKEIFFDQSKNGYAGYIDGGASQEEFYKFIKPILEKMDGTEELLVKLNREDLLRKQRTFDNGSIPHQIHLGELHAILRRQEDFYPFLKDNREKIEKILTFRIPYYVGPLARGNSRFAWMTRKSEETITPWNFEEVVDKGASAQSFIERMTNFDKNLPNEKVLPKHSLLYEYFTVYNELTKVKYVTEGMRKPAFLSGEQKKAIVDLLFKTNRKVTVKQLKEDYFKKIECFDSVEISGVEDRFNASLGTYHDLLKIIKDKDFLDNEENEDILEDIVLTLTLFEDREMIEERLKTYAHLFDDKVMKQLKRRRYTGWGRLSRKLINGIRDKQSGKTILDFLKSDGFANRNFMQLIHDDSLTFKEDIQKAQVSGQGDSLHEHIANLAGSPAIKKGILQTVKVVDELVKVMGRHKPENIVIEMARENQTTQKGQKNSRERMKRIEEGIKELGSQILKEHPVENTQLQNEKLYLYYLQNGRDMYVDQELDINRLSDYDVDHIVPQSFLKDDSIDNKVLTRSDKARGKSDNVPSEEVVKKMKNYWRQLLNAKLITQRKFDNLTKAERGGLSELDKAGFIKRQLVETRQITKHVAQILDSRMNTKYDENDKLIREVKVITLKSKLVSDFRKDFQFYKVREINNYHHAHDAYLNAVVGTALIKKYPKLESEFVYGDYKVYDVRKMIAKSEQEIGKATAKYFFYSNIMNFFKTEITLANGEIRKRPLIETNGETGEIVWDKGRDFATVRKVLSMPQVNIVKKTEVQTGGFSKESILPKRNSDKLIARKKDWDPKKYGGFDSPTVAYSVLVVAKVEKGKSKKLKSVKELLGITIMERSSFEKNPIDFLEAKGYKEVKKDLIIKLPKYSLFELENGRKRMLASAGELQKGNELALPSKYVNFLYLASHYEKLKGSPEDNEQKQLFVEQHKHYLDEIIEQISEFSKRVILADANLDKVLSAYNKHRDKPIREQAENIIHLFTLTNLGAPAAFKYFDTTIDRKRYTSTKEVLDATLIHQSITGLYETRIDLSQLGGDGGGSSEAAAKGGGGGTAPLEEEYRLFLEAPIQNVTLLEQWKREIPKVWAEINPPGLASTQAPIHVQLLSTALPVRVRQYPITLEAKRSLRETIRKFRAAGILRPVHSPWNTPLLPVRKSGTSEYRMVQDLREVNKRVETIHPTVPNPYTLLSLLPPDRIWYSVLDLKDAFFCIPLAPESQLIFAFEWADAEEGESGQLTWTRLPQGFKNSPTLFNEALNRDLQGFRLDHPSVSLLQYVDDLLIAADTQAACLSATRDLLMTLAELGYRVSGKKAQLCQEEVTYLGFKIHKGSRSLSNSRTQAILQIPVPKTKRQVREFLGKIGYCRLFIPGFAELAQPLYAATRPGNDPLVWGEKEEEAFQSLKLALTQPPALALPSLDKPFQLFVEETSGAAKGVLTQALGPWKRPVAYLSKRLDPVAAGWPRCLRAIAAAALLTREASKLTFGQDIEITSSHNLESLLRSPPDKWLTNARITQYQVLLLDPPRVRFKQTAALNPATLLPETDDTLPIHHCLDTLDSLTSTRPDLTDQPLAQAEATLFTDGSSYIRDGKRYAGAAVVTLDSVIWAEPLPIGTSAQKAELIALTKALEWSKDKSVNIYTDSRYAFATLHVHGMIYRERGWLTAGGKAIKNAPEILALLTAVWLPKRVAVMHCKGHQKDDAPTSTGNRRADEVAREVAIRPLSTQATISAGKRTADGSEFEKRTADGSEFESPKKKAKVE

SEQ ID NO: 1395 - protein, 2098 aa, synthetic construct
MPAAKRVKLDGGDKKYSIGLDIGTNSVGWAVITDEYKVPSKKFKVLGNTDRHSIKKNLIGALLFDSGETAEATRLKRTARRRYTRRKNRICYLQEIFSNEMAKVDDSFFHRLEESFLVEEDKKHERHPIFGNIVDEVAYHEKYPTIYHLRKKLVDSTDKADLRLIYLALAHMIKFRGHFLIEGDLNPDNSDVDKLFIQLVQTYNQLFEENPINASGVDAKAILSARLSKSRRLENLIAQLPGEKKNGLFGNLIALSLGLTPNFKSNFDLAEDAKLQLSKDTYDDDLDNLLAQIGDQYADLFLAAKNLSDAILLSDILRVNTEITKAPLSASMIKRYDEHHQDLTLLKALVRQQLPEKYKEIFFDQSKNGYAGYIDGGASQEEFYKFIKPILEKMDGTEELLVKLNREDLLRKQRTFDNGSIPHQIHLGELHAILRRQEDFYPFLKDNREKIEKILTFRIPYYVGPLARGNSRFAWMTRKSEETITPWNFEEVVDKGASAQSFIERMTNFDKNLPNEKVLPKHSLLYEYFTVYNELTKVKYVTEGMRKPAFLSGEQKKAIVDLLFKTNRKVTVKQLKEDYFKKIECFDSVEISGVEDRFNASLGTYHDLLKIIKDKDFLDNEENEDILEDIVLTLTLFEDREMIEERLKTYAHLFDDKVMKQLKRRRYTGWGRLSRKLINGIRDKQSGKTILDFLKSDGFANRNFMQLIHDDSLTFKEDIQKAQVSGQGDSLHEHIANLAGSPAIKKGILQTVKVVDELVKVMGRHKPENIVIEMARENQTTQKGQKNSRERMKRIEEGIKELGSQILKEHPVENTQLQNEKLYLYYLQNGRDMYVDQELDINRLSDYDVDHIVPQSFLKDDSIDNKVLTRSDKARGKSDNVPSEEVVKKMKNYWRQLLNAKLITQRKFDNLTKAERGGLSELDKAGFIKRQLVETRQITKHVAQILDSRMNTKYDENDKLIREVKVITLKSKLVSDFRKDFQFYKVREINNYHHAHDAYLNAVVGTALIKKYPKLESEFVYGDYKVYDVRKMIAKSEQEIGKATAKYFFYSNIMNFFKTEITLANGEIRKRPLIETNGETGEIVWDKGRDFATVRKVLSMPQVNIVKKTEVQTGGFSKESILPKRNSDKLIARKKDWDPKKYGGFDSPTVAYSVLVVAKVEKGKSKKLKSVKELLGITIMERSSFEKNPIDFLEAKGYKEVKKDLIIKLPKYSLFELENGRKRMLASAGELQKGNELALPSKYVNFLYLASHYEKLKGSPEDNEQKQLFVEQHKHYLDEIIEQISEFSKRVILADANLDKVLSAYNKHRDKPIREQAENIIHLFTLTNLGAPAAFKYFDTTIDRKRYTSTKEVLDATLIHQSITGLYETRIDLSQLGGDGGGGGEAAAKGSSGGTAPLEEEYRLFLEAPIQNVTLLEQWKREIPKVWAEINPPGLASTQAPIHVQLLSTALPVRVRQYPITLEAKRSLRETIRKFRAAGILRPVHSPWNTPLLPVRKSGTSEYRMVQDLREVNKRVETIHPTVPNPYTLLSLLPPDRIWYSVLDLKDAFFCIPLAPESQLIFAFEWADAEEGESGQLTWTRLPQGFKNSPTLFNEALNRDLQGFRLDHPSVSLLQYVDDLLIAADTQAACLSATRDLLMTLAELGYRVSGKKAQLCQEEVTYLGFKIHKGSRSLSNSRTQAILQIPVPKTKRQVREFLGKIGYCRLFIPGFAELAQPLYAATRPGNDPLVWGEKEEEAFQSLKLALTQPPALALPSLDKPFQLFVEETSGAAKGVLTQALGPWKRPVAYLSKRLDPVAAGWPRCLRAIAAAALLTREASKLTFGQDIEITSSHNLESLLRSPPDKWLTNARITQYQVLLLDPPRVRFKQTAALNPATLLPETDDTLPIHHCLDTLDSLTSTRPDLTDQPLAQAEATLFTDGSSYIRDGKRYAGAAVVTLDSVIWAEPLPIGTSAQKAELIALTKALEWSKDKSVNIYTDSRYAFATLHVHGMIYRERGWLTAGGKAIKNAPEILALLTAVWLPKRVAVMHCKGHQKDDAPTSTGNRRADEVAREVAIRPLSTQATISAGKRTADGSEFEKRTADGSEFESPKKKAKVE

SEQ ID NO: 1396 - protein, 2093 aa, synthetic construct
MPAAKRVKLDGGDKKYSIGLDIGTNSVGWAVITDEYKVPSKKFKVLGNTDRHSIKKNLIGALLFDSGETAEATRLKRTARRRYTRRKNRICYLQEIFSNEMAKVDDSFFHRLEESFLVEEDKKHERHPIFGNIVDEVAYHEKYPTIYHLRKKLVDSTDKADLRLIYLALAHMIKFRGHFLIEGDLNPDNSDVDKLFIQLVQTYNQLFEENPINASGVDAKAILSARLSKSRRLENLIAQLPGEKKNGLFGNLIALSLGLTPNFKSNFDLAEDAKLQLSKDTYDDDLDNLLAQIGDQYADLFLAAKNLSDAILLSDILRVNTEITKAPLSASMIKRYDEHHQDLTLLKALVRQQLPEKYKEIFFDQSKNGYAGYIDGGASQEEFYKFIKPILEKMDGTEELLVKLNREDLLRKQRTFDNGSIPHQIHLGELHAILRRQEDFYPFLKDNREKIEKILTFRIPYYVGPLARGNSRFAWMTRKSEETITPWNFEEVVDKGASAQSFIERMTNFDKNLPNEKVLPKHSLLYEYFTVYNELTKVKYVTEGMRKPAFLSGEQKKAIVDLLFKTNRKVTVKQLKEDYFKKIECFDSVEISGVEDRFNASLGTYHDLLKIIKDKDFLDNEENEDILEDIVLTLTLFEDREMIEERLKTYAHLFDDKVMKQLKRRRYTGWGRLSRKLINGIRDKQSGKTILDFLKSDGFANRNFMQLIHDDSLTFKEDIQKAQVSGQGDSLHEHIANLAGSPAIKKGILQTVKVVDELVKVMGRHKPENIVIEMARENQTTQKGQKNSRERMKRIEEGIKELGSQILKEHPVENTQLQNEKLYLYYLQNGRDMYVDQELDINRLSDYDVDHIVPQSFLKDDSIDNKVLTRSDKARGKSDNVPSEEVVKKMKNYWRQLLNAKLITQRKFDNLTKAERGGLSELDKAGFIKRQLVETRQITKHVAQILDSRMNTKYDENDKLIREVKVITLKSKLVSDFRKDFQFYKVREINNYHHAHDAYLNAVVGTALIKKYPKLESEFVYGDYKVYDVRKMIAKSEQEIGKATAKYFFYSNIMNFFKTEITLANGEIRKRPLIETNGETGEIVWDKGRDFATVRKVLSMPQVNIVKKTEVQTGGFSKESILPKRNSDKLIARKKDWDPKKYGGFDSPTVAYSVLVVAKVEKGKSKKLKSVKELLGITIMERSSFEKNPIDFLEAKGYKEVKKDLIIKLPKYSLFELENGRKRMLASAGELQKGNELALPSKYVNFLYLASHYEKLKGSPEDNEQKQLFVEQHKHYLDEIIEQISEFSKRVILADANLDKVLSAYNKHRDKPIREQAENIIHLFTLTNLGAPAAFKYFDTTIDRKRYTSTKEVLDATLIHQSITGLYETRIDLSQLGGDGGGGGGGGGGTAPLEEEYRLFLEAPIQNVTLLEQWKREIPKVWAEINPPGLASTQAPIHVQLLSTALPVRVRQYPITLEAKRSLRETIRKFRAAGILRPVHSPWNTPLLPVRKSGTSEYRMVQDLREVNKRVETIHPTVPNPYTLLSLLPPDRIWYSVLDLKDAFFCIPLAPESQLIFAFEWADAEEGESGQLTWTRLPQGFKNSPTLFNEALNRDLQGFRLDHPSVSLLQYVDDLLIAADTQAACLSATRDLLMTLAELGYRVSGKKAQLCQEEVTYLGFKIHKGSRSLSNSRTQAILQIPVPKTKRQVREFLGKIGYCRLFIPGFAELAQPLYAATRPGNDPLVWGEKEEEAFQSLKLALTQPPALALPSLDKPFQLFVEETSGAAKGVLTQALGPWKRPVAYLSKRLDPVAAGWPRCLRAIAAAALLTREASKLTFGQDIEITSSHNLESLLRSPPDKWLTNARITQYQVLLLDPPRVRFKQTAALNPATLLPETDDTLPIHHCLDTLDSLTSTRPDLTDQPLAQAEATLFTDGSSYIRDGKRYAGAAVVTLDSVIWAEPLPIGTSAQKAELIALTKALEWSKDKSVNIYTDSRYAFATLHVHGMIYRERGWLTAGGKAIKNAPEILALLTAVWLPKRVAVMHCKGHQKDDAPTSTGNRRADEVAREVAIRPLSTQATISAGKRTADGSEFEKRTADGSEFESPKKKAKVE

SEQ ID NO: 1397 - protein, 2093 aa, synthetic construct
MPAAKRVKLDGGDKKYSIGLDIGTNSVGWAVITDEYKVPSKKFKVLGNTDRHSIKKNLIGALLFDSGETAEATRLKRTARRRYTRRKNRICYLQEIFSNEMAKVDDSFFHRLEESFLVEEDKKHERHPIFGNIVDEVAYHEKYPTIYHLRKKLVDSTDKADLRLIYLALAHMIKFRGHFLIEGDLNPDNSDVDKLFIQLVQTYNQLFEENPINASGVDAKAILSARLSKSRRLENLIAQLPGEKKNGLFGNLIALSLGLTPNFKSNFDLAEDAKLQLSKDTYDDDLDNLLAQIGDQYADLFLAAKNLSDAILLSDILRVNTEITKAPLSASMIKRYDEHHQDLTLLKALVRQQLPEKYKEIFFDQSKNGYAGYIDGGASQEEFYKFIKPILEKMDGTEELLVKLNREDLLRKQRTFDNGSIPHQIHLGELHAILRRQEDFYPFLKDNREKIEKILTFRIPYYVGPLARGNSRFAWMTRKSEETITPWNFEEVVDKGASAQSFIERMTNFDKNLPNEKVLPKHSLLYEYFTVYNELTKVKYVTEGMRKPAFLSGEQKKAIVDLLFKTNRKVTVKQLKEDYFKKIECFDSVEISGVEDRFNASLGTYHDLLKIIKDKDFLDNEENEDILEDIVLTLTLFEDREMIEERLKTYAHLFDDKVMKQLKRRRYTGWGRLSRKLINGIRDKQSGKTILDFLKSDGFANRNFMQLIHDDSLTFKEDIQKAQVSGQGDSLHEHIANLAGSPAIKKGILQTVKVVDELVKVMGRHKPENIVIEMARENQTTQKGQKNSRERMKRIEEGIKELGSQILKEHPVENTQLQNEKLYLYYLQNGRDMYVDQELDINRLSDYDVDHIVPQSFLKDDSIDNKVLTRSDKARGKSDNVPSEEVVKKMKNYWRQLLNAKLITQRKFDNLTKAERGGLSELDKAGFIKRQLVETRQITKHVAQILDSRMNTKYDENDKLIREVKVITLKSKLVSDFRKDFQFYKVREINNYHHAHDAYLNAVVGTALIKKYPKLESEFVYGDYKVYDVRKMIAKSEQEIGKATAKYFFYSNIMNFFKTEITLANGEIRKRPLIETNGETGEIVWDKGRDFATVRKVLSMPQVNIVKKTEVQTGGFSKESILPKRNSDKLIARKKDWDPKKYGGFDSPTVAYSVLVVAKVEKGKSKKLKSVKELLGITIMERSSFEKNPIDFLEAKGYKEVKKDLIIKLPKYSLFELENGRKRMLASAGELQKGNELALPSKYVNFLYLASHYEKLKGSPEDNEQKQLFVEQHKHYLDEIIEQISEFSKRVILADANLDKVLSAYNKHRDKPIREQAENIIHLFTLTNLGAPAAFKYFDTTIDRKRYTSTKEVLDATLIHQSITGLYETRIDLSQLGGDGGGGGPAPGGTAPLEEEYRLFLEAPIQNVTLLEQWKREIPKVWAEINPPGLASTQAPIHVQLLSTALPVRVRQYPITLEAKRSLRETIRKFRAAGILRPVHSPWNTPLLPVRKSGTSEYRMVQDLREVNKRVETIHPTVPNPYTLLSLLPPDRIWYSVLDLKDAFFCIPLAPESQLIFAFEWADAEEGESGQLTWTRLPQGFKNSPTLFNEALNRDLQGFRLDHPSVSLLQYVDDLLIAADTQAACLSATRDLLMTLAELGYRVSGKKAQLCQEEVTYLGFKIHKGSRSLSNSRTQAILQIPVPKTKRQVREFLGKIGYCRLFIPGFAELAQPLYAATRPGNDPLVWGEKEEEAFQSLKLALTQPPALALPSLDKPFQLFVEETSGAAKGVLTQALGPWKRPVAYLSKRLDPVAAGWPRCLRAIAAAALLTREASKLTFGQDIEITSSHNLESLLRSPPDKWLTNARITQYQVLLLDPPRVRFKQTAALNPATLLPETDDTLPIHHCLDTLDSLTSTRPDLTDQPLAQAEATLFTDGSSYIRDGKRYAGAAVVTLDSVIWAEPLPIGTSAQKAELIALTKALEWSKDKSVNIYTDSRYAFATLHVHGMIYRERGWLTAGGKAIKNAPEILALLTAVWLPKRVAVMHCKGHQKDDAPTSTGNRRADEVAREVAIRPLSTQATISAGKRTADGSEFEKRTADGSEFESPKKKAKVE

SEQ ID NO: 1398 - protein, 2099 aa, synthetic construct
MPAAKRVKLDGGDKKYSIGLDIGTNSVGWAVITDEYKVPSKKFKVLGNTDRHSIKKNLIGALLFDSGETAEATRLKRTARRRYTRRKNRICYLQEIFSNEMAKVDDSFFHRLEESFLVEEDKKHERHPIFGNIVDEVAYHEKYPTIYHLRKKLVDSTDKADLRLIYLALAHMIKFRGHFLIEGDLNPDNSDVDKLFIQLVQTYNQLFEENPINASGVDAKAILSARLSKSRRLENLIAQLPGEKKNGLFGNLIALSLGLTPNFKSNFDLAEDAKLQLSKDTYDDDLDNLLAQIGDQYADLFLAAKNLSDAILLSDILRVNTEITKAPLSASMIKRYDEHHQDLTLLKALVRQQLPEKYKEIFFDQSKNGYAGYIDGGASQEEFYKFIKPILEKMDGTEELLVKLNREDLLRKQRTFDNGSIPHQIHLGELHAILRRQEDFYPFLKDNREKIEKILTFRIPYYVGPLARGNSRFAWMTRKSEETITPWNFEEVVDKGASAQSFIERMTNFDKNLPNEKVLPKHSLLYEYFTVYNELTKVKYVTEGMRKPAFLSGEQKKAIVDLLFKTNRKVTVKQLKEDYFKKIECFDSVEISGVEDRFNASLGTYHDLLKIIKDKDFLDNEENEDILEDIVLTLTLFEDREMIEERLKTYAHLFDDKVMKQLKRRRYTGWGRLSRKLINGIRDKQSGKTILDFLKSDGFANRNFMQLIHDDSLTFKEDIQKAQVSGQGDSLHEHIANLAGSPAIKKGILQTVKVVDELVKVMGRHKPENIVIEMARENQTTQKGQKNSRERMKRIEEGIKELGSQILKEHPVENTQLQNEKLYLYYLQNGRDMYVDQELDINRLSDYDVDHIVPQSFLKDDSIDNKVLTRSDKARGKSDNVPSEEVVKKMKNYWRQLLNAKLITQRKFDNLTKAERGGLSELDKAGFIKRQLVETRQITKHVAQILDSRMNTKYDENDKLIREVKVITLKSKLVSDFRKDFQFYKVREINNYHHAHDAYLNAVVGTALIKKYPKLESEFVYGDYKVYDVRKMIAKSEQEIGKATAKYFFYSNIMNFFKTEITLANGEIRKRPLIETNGETGEIVWDKGRDFATVRKVLSMPQVNIVKKTEVQTGGFSKESILPKRNSDKLIARKKDWDPKKYGGFDSPTVAYSVLVVAKVEKGKSKKLKSVKELLGITIMERSSFEKNPIDFLEAKGYKEVKKDLIIKLPKYSLFELENGRKRMLASAGELQKGNELALPSKYVNFLYLASHYEKLKGSPEDNEQKQLFVEQHKHYLDEIIEQISEFSKRVILADANLDKVLSAYNKHRDKPIREQAENIIHLFTLTNLGAPAAFKYFDTTIDRKRYTSTKEVLDATLIHQSITGLYETRIDLSQLGGDGGGGSGGSGGSGGSGGTAPLEEEYRLFLEAPIQNVTLLEQWKREIPKVWAEINPPGLASTQAPIHVQLLSTALPVRVRQYPITLEAKRSLRETIRKFRAAGILRPVHSPWNTPLLPVRKSGTSEYRMVQDLREVNKRVETIHPTVPNPYTLLSLLPPDRIWYSVLDLKDAFFCIPLAPESQLIFAFEWADAEEGESGQLTWTRLPQGFKNSPTLFNEALNRDLQGFRLDHPSVSLLQYVDDLLIAADTQAACLSATRDLLMTLAELGYRVSGKKAQLCQEEVTYLGFKIHKGSRSLSNSRTQAILQIPVPKTKRQVREFLGKIGYCRLFIPGFAELAQPLYAATRPGNDPLVWGEKEEEAFQSLKLALTQPPALALPSLDKPFQLFVEETSGAAKGVLTQALGPWKRPVAYLSKRLDPVAAGWPRCLRAIAAAALLTREASKLTFGQDIEITSSHNLESLLRSPPDKWLTNARITQYQVLLLDPPRVRFKQTAALNPATLLPETDDTLPIHHCLDTLDSLTSTRPDLTDQPLAQAEATLFTDGSSYIRDGKRYAGAAVVTLDSVIWAEPLPIGTSAQKAELIALTKALEWSKDKSVNIYTDSRYAFATLHVHGMIYRERGWLTAGGKAIKNAPEILALLTAVWLPKRVAVMHCKGHQKDDAPTSTGNRRADEVAREVAIRPLSTQATISAGKRTADGSEFEKRTADGSEFESPKKKAKVE

SEQ ID NO: 1399 - protein, 2102 aa, synthetic construct
MPAAKRVKLDGGDKKYSIGLDIGTNSVGWAVITDEYKVPSKKFKVLGNTDRHSIKKNLIGALLFDSGETAEATRLKRTARRRYTRRKNRICYLQEIFSNEMAKVDDSFFHRLEESFLVEEDKKHERHPIFGNIVDEVAYHEKYPTIYHLRKKLVDSTDKADLRLIYLALAHMIKFRGHFLIEGDLNPDNSDVDKLFIQLVQTYNQLFEENPINASGVDAKAILSARLSKSRRLENLIAQLPGEKKNGLFGNLIALSLGLTPNFKSNFDLAEDAKLQLSKDTYDDDLDNLLAQIGDQYADLFLAAKNLSDAILLSDILRVNTEITKAPLSASMIKRYDEHHQDLTLLKALVRQQLPEKYKEIFFDQSKNGYAGYIDGGASQEEFYKFIKPILEKMDGTEELLVKLNREDLLRKQRTFDNGSIPHQIHLGELHAILRRQEDFYPFLKDNREKIEKILTFRIPYYVGPLARGNSRFAWMTRKSEETITPWNFEEVVDKGASAQSFIERMTNFDKNLPNEKVLPKHSLLYEYFTVYNELTKVKYVTEGMRKPAFLSGEQKKAIVDLLFKTNRKVTVKQLKEDYFKKIECFDSVEISGVEDRFNASLGTYHDLLKIIKDKDFLDNEENEDILEDIVLTLTLFEDREMIEERLKTYAHLFDDKVMKQLKRRRYTGWGRLSRKLINGIRDKQSGKTILDFLKSDGFANRNFMQLIHDDSLTFKEDIQKAQVSGQGDSLHEHIANLAGSPAIKKGILQTVKVVDELVKVMGRHKPENIVIEMARENQTTQKGQKNSRERMKRIEEGIKELGSQILKEHPVENTQLQNEKLYLYYLQNGRDMYVDQELDINRLSDYDVDHIVPQSFLKDDSIDNKVLTRSDKARGKSDNVPSEEVVKKMKNYWRQLLNAKLITQRKFDNLTKAERGGLSELDKAGFIKRQLVETRQITKHVAQILDSRMNTKYDENDKLIREVKVITLKSKLVSDFRKDFQFYKVREINNYHHAHDAYLNAVVGTALIKKYPKLESEFVYGDYKVYDVRKMIAKSEQEIGKATAKYFFYSNIMNFFKTEITLANGEIRKRPLIETNGETGEIVWDKGRDFATVRKVLSMPQVNIVKKTEVQTGGFSKESILPKRNSDKLIARKKDWDPKKYGGFDSPTVAYSVLVVAKVEKGKSKKLKSVKELLGITIMERSSFEKNPIDFLEAKGYKEVKKDLIIKLPKYSLFELENGRKRMLASAGELQKGNELALPSKYVNFLYLASHYEKLKGSPEDNEQKQLFVEQHKHYLDEIIEQISEFSKRVILADANLDKVLSAYNKHRDKPIREQAENIIHLFTLTNLGAPAAFKYFDTTIDRKRYTSTKEVLDATLIHQSITGLYETRIDLSQLGGDGGEAAAKGGGGSEAAAKGGTAPLEEEYRLFLEAPIQNVTLLEQWKREIPKVWAEINPPGLASTQAPIHVQLLSTALPVRVRQYPITLEAKRSLRETIRKFRAAGILRPVHSPWNTPLLPVRKSGTSEYRMVQDLREVNKRVETIHPTVPNPYTLLSLLPPDRIWYSVLDLKDAFFCIPLAPESQLIFAFEWADAEEGESGQLTWTRLPQGFKNSPTLFNEALNRDLQGFRLDHPSVSLLQYVDDLLIAADTQAACLSATRDLLMTLAELGYRVSGKKAQLCQEEVTYLGFKIHKGSRSLSNSRTQAILQIPVPKTKRQVREFLGKIGYCRLFIPGFAELAQPLYAATRPGNDPLVWGEKEEEAFQSLKLALTQPPALALPSLDKPFQLFVEETSGAAKGVLTQALGPWKRPVAYLSKRLDPVAAGWPRCLRAIAAAALLTREASKLTFGQDIEITSSHNLESLLRSPPDKWLTNARITQYQVLLLDPPRVRFKQTAALNPATLLPETDDTLPIHHCLDTLDSLTSTRPDLTDQPLAQAEATLFTDGSSYIRDGKRYAGAAVVTLDSVIWAEPLPIGTSAQKAELIALTKALEWSKDKSVNIYTDSRYAFATLHVHGMIYRERGWLTAGGKAIKNAPEILALLTAVWLPKRVAVMHCKGHQKDDAPTSTGNRRADEVAREVAIRPLSTQATISAGKRTADGSEFEKRTADGSEFESPKKKAKVE

SEQ ID NO: 1400 - protein, 2112 aa, synthetic construct
MPAAKRVKLDGGDKKYSIGLDIGTNSVGWAVITDEYKVPSKKFKVLGNTDRHSIKKNLIGALLFDSGETAEATRLKRTARRRYTRRKNRICYLQEIFSNEMAKVDDSFFHRLEESFLVEEDKKHERHPIFGNIVDEVAYHEKYPTIYHLRKKLVDSTDKADLRLIYLALAHMIKFRGHFLIEGDLNPDNSDVDKLFIQLVQTYNQLFEENPINASGVDAKAILSARLSKSRRLENLIAQLPGEKKNGLFGNLIALSLGLTPNFKSNFDLAEDAKLQLSKDTYDDDLDNLLAQIGDQYADLFLAAKNLSDAILLSDILRVNTEITKAPLSASMIKRYDEHHQDLTLLKALVRQQLPEKYKEIFFDQSKNGYAGYIDGGASQEEFYKFIKPILEKMDGTEELLVKLNREDLLRKQRTFDNGSIPHQIHLGELHAILRRQEDFYPFLKDNREKIEKILTFRIPYYVGPLARGNSRFAWMTRKSEETITPWNFEEVVDKGASAQSFIERMTNFDKNLPNEKVLPKHSLLYEYFTVYNELTKVKYVTEGMRKPAFLSGEQKKAIVDLLFKTNRKVTVKQLKEDYFKKIECFDSVEISGVEDRFNASLGTYHDLLKIIKDKDFLDNEENEDILEDIVLTLTLFEDREMIEERLKTYAHLFDDKVMKQLKRRRYTGWGRLSRKLINGIRDKQSGKTILDFLKSDGFANRNFMQLIHDDSLTFKEDIQKAQVSGQGDSLHEHIANLAGSPAIKKGILQTVKVVDELVKVMGRHKPENIVIEMARENQTTQKGQKNSRERMKRIEEGIKELGSQILKEHPVENTQLQNEKLYLYYLQNGRDMYVDQELDINRLSDYDVDHIVPQSFLKDDSIDNKVLTRSDKARGKSDNVPSEEVVKKMKNYWRQLLNAKLITQRKFDNLTKAERGGLSELDKAGFIKRQLVETRQITKHVAQILDSRMNTKYDENDKLIREVKVITLKSKLVSDFRKDFQFYKVREINNYHHAHDAYLNAVVGTALIKKYPKLESEFVYGDYKVYDVRKMIAKSEQEIGKATAKYFFYSNIMNFFKTEITLANGEIRKRPLIETNGETGEIVWDKGRDFATVRKVLSMPQVNIVKKTEVQTGGFSKESILPKRNSDKLIARKKDWDPKKYGGFDSPTVAYSVLVVAKVEKGKSKKLKSVKELLGITIMERSSFEKNPIDFLEAKGYKEVKKDLIIKLPKYSLFELENGRKRMLASAGELQKGNELALPSKYVNFLYLASHYEKLKGSPEDNEQKQLFVEQHKHYLDEIIEQISEFSKRVILADANLDKVLSAYNKHRDKPIREQAENIIHLFTLTNLGAPAAFKYFDTTIDRKRYTSTKEVLDATLIHQSITGLYETRIDLSQLGGDGGEAAAKEAAAKEAAAKEAAAKEAAAKGGTAPLEEEYRLFLEAPIQNVTLLEQWKREIPKVWAEINPPGLASTQAPIHVQLLSTALPVRVRQYPITLEAKRSLRETIRKFRAAGILRPVHSPWNTPLLPVRKSGTSEYRMVQDLREVNKRVETIHPTVPNPYTLLSLLPPDRIWYSVLDLKDAFFCIPLAPESQLIFAFEWADAEEGESGQLTWTRLPQGFKNSPTLFNEALNRDLQGFRLDHPSVSLLQYVDDLLIAADTQAACLSATRDLLMTLAELGYRVSGKKAQLCQEEVTYLGFKIHKGSRSLSNSRTQAILQIPVPKTKRQVREFLGKIGYCRLFIPGFAELAQPLYAATRPGNDPLVWGEKEEEAFQSLKLALTQPPALALPSLDKPFQLFVEETSGAAKGVLTQALGPWKRPVAYLSKRLDPVAAGWPRCLRAIAAAALLTREASKLTFGQDIEITSSHNLESLLRSPPDKWLTNARITQYQVLLLDPPRVRFKQTAALNPATLLPETDDTLPIHHCLDTLDSLTSTRPDLTDQPLAQAEATLFTDGSSYIRDGKRYAGAAVVTLDSVIWAEPLPIGTSAQKAELIALTKALEWSKDKSVNIYTDSRYAFATLHVHGMIYRERGWLTAGGKAIKNAPEILALLTAVWLPKRVAVMHCKGHQKDDAPTSTGNRRADEVAREVAIRPLSTQATISAGKRTADGSEFEKRTADGSEFESPKKKAKVE

SEQ ID NO: 1401 - protein, 2096 aa, synthetic construct
MPAAKRVKLDGGDKKYSIGLDIGTNSVGWAVITDEYKVPSKKFKVLGNTDRHSIKKNLIGALLFDSGETAEATRLKRTARRRYTRRKNRICYLQEIFSNEMAKVDDSFFHRLEESFLVEEDKKHERHPIFGNIVDEVAYHEKYPTIYHLRKKLVDSTDKADLRLIYLALAHMIKFRGHFLIEGDLNPDNSDVDKLFIQLVQTYNQLFEENPINASGVDAKAILSARLSKSRRLENLIAQLPGEKKNGLFGNLIALSLGLTPNFKSNFDLAEDAKLQLSKDTYDDDLDNLLAQIGDQYADLFLAAKNLSDAILLSDILRVNTEITKAPLSASMIKRYDEHHQDLTLLKALVRQQLPEKYKEIFFDQSKNGYAGYIDGGASQEEFYKFIKPILEKMDGTEELLVKLNREDLLRKQRTFDNGSIPHQIHLGELHAILRRQEDFYPFLKDNREKIEKILTFRIPYYVGPLARGNSRFAWMTRKSEETITPWNFEEVVDKGASAQSFIERMTNFDKNLPNEKVLPKHSLLYEYFTVYNELTKVKYVTEGMRKPAFLSGEQKKAIVDLLFKTNRKVTVKQLKEDYFKKIECFDSVEISGVEDRFNASLGTYHDLLKIIKDKDFLDNEENEDILEDIVLTLTLFEDREMIEERLKTYAHLFDDKVMKQLKRRRYTGWGRLSRKLINGIRDKQSGKTILDFLKSDGFANRNFMQLIHDDSLTFKEDIQKAQVSGQGDSLHEHIANLAGSPAIKKGILQTVKVVDELVKVMGRHKPENIVIEMARENQTTQKGQKNSRERMKRIEEGIKELGSQILKEHPVENTQLQNEKLYLYYLQNGRDMYVDQELDINRLSDYDVDHIVPQSFLKDDSIDNKVLTRSDKARGKSDNVPSEEVVKKMKNYWRQLLNAKLITQRKFDNLTKAERGGLSELDKAGFIKRQLVETRQITKHVAQILDSRMNTKYDENDKLIREVKVITLKSKLVSDFRKDFQFYKVREINNYHHAHDAYLNAVVGTALIKKYPKLESEFVYGDYKVYDVRKMIAKSEQEIGKATAKYFFYSNIMNFFKTEITLANGEIRKRPLIETNGETGEIVWDKGRDFATVRKVLSMPQVNIVKKTEVQTGGFSKESILPKRNSDKLIARKKDWDPKKYGGFDSPTVAYSVLVVAKVEKGKSKKLKSVKELLGITIMERSSFEKNPIDFLEAKGYKEVKKDLIIKLPKYSLFELENGRKRMLASAGELQKGNELALPSKYVNFLYLASHYEKLKGSPEDNEQKQLFVEQHKHYLDEIIEQISEFSKRVILADANLDKVLSAYNKHRDKPIREQAENIIHLFTLTNLGAPAAFKYFDTTIDRKRYTSTKEVLDATLIHQSITGLYETRIDLSQLGGDGGPAPGSSGGSGGTAPLEEEYRLFLEAPIQNVTLLEQWKREIPKVWAEINPPGLASTQAPIHVQLLSTALPVRVRQYPITLEAKRSLRETIRKFRAAGILRPVHSPWNTPLLPVRKSGTSEYRMVQDLREVNKRVETIHPTVPNPYTLLSLLPPDRIWYSVLDLKDAFFCIPLAPESQLIFAFEWADAEEGESGQLTWTRLPQGFKNSPTLFNEALNRDLQGFRLDHPSVSLLQYVDDLLIAADTQAACLSATRDLLMTLAELGYRVSGKKAQLCQEEVTYLGFKIHKGSRSLSNSRTQAILQIPVPKTKRQVREFLGKIGYCRLFIPGFAELAQPLYAATRPGNDPLVWGEKEEEAFQSLKLALTQPPALALPSLDKPFQLFVEETSGAAKGVLTQALGPWKRPVAYLSKRLDPVAAGWPRCLRAIAAAALLTREASKLTFGQDIEITSSHNLESLLRSPPDKWLTNARITQYQVLLLDPPRVRFKQTAALNPATLLPETDDTLPIHHCLDTLDSLTSTRPDLTDQPLAQAEATLFTDGSSYIRDGKRYAGAAVVTLDSVIWAEPLPIGTSAQKAELIALTKALEWSKDKSVNIYTDSRYAFATLHVHGMIYRERGWLTAGGKAIKNAPEILALLTAVWLPKRVAVMHCKGHQKDDAPTSTGNRRADEVAREVAIRPLSTQATISAGKRTADGSEFEKRTADGSEFESPKKKAKVE

SEQ ID NO: 1402 - protein, 2096 aa, synthetic construct
MPAAKRVKLDGGDKKYSIGLDIGTNSVGWAVITDEYKVPSKKFKVLGNTDRHSIKKNLIGALLFDSGETAEATRLKRTARRRYTRRKNRICYLQEIFSNEMAKVDDSFFHRLEESFLVEEDKKHERHPIFGNIVDEVAYHEKYPTIYHLRKKLVDSTDKADLRLIYLALAHMIKFRGHFLIEGDLNPDNSDVDKLFIQLVQTYNQLFEENPINASGVDAKAILSARLSKSRRLENLIAQLPGEKKNGLFGNLIALSLGLTPNFKSNFDLAEDAKLQLSKDTYDDDLDNLLAQIGDQYADLFLAAKNLSDAILLSDILRVNTEITKAPLSASMIKRYDEHHQDLTLLKALVRQQLPEKYKEIFFDQSKNGYAGYIDGGASQEEFYKFIKPILEKMDGTEELLVKLNREDLLRKQRTFDNGSIPHQIHLGELHAILRRQEDFYPFLKDNREKIEKILTFRIPYYVGPLARGNSRFAWMTRKSEETITPWNFEEVVDKGASAQSFIERMTNFDKNLPNEKVLPKHSLLYEYFTVYNELTKVKYVTEGMRKPAFLSGEQKKAIVDLLFKTNRKVTVKQLKEDYFKKIECFDSVEISGVEDRFNASLGTYHDLLKIIKDKDFLDNEENEDILEDIVLTLTLFEDREMIEERLKTYAHLFDDKVMKQLKRRRYTGWGRLSRKLINGIRDKQSGKTILDFLKSDGFANRNFMQLIHDDSLTFKEDIQKAQVSGQGDSLHEHIANLAGSPAIKKGILQTVKVVDELVKVMGRHKPENIVIEMARENQTTQKGQKNSRERMKRIEEGIKELGSQILKEHPVENTQLQNEKLYLYYLQNGRDMYVDQELDINRLSDYDVDHIVPQSFLKDDSIDNKVLTRSDKARGKSDNVPSEEVVKKMKNYWRQLLNAKLITQRKFDNLTKAERGGLSELDKAGFIKRQLVETRQITKHVAQILDSRMNTKYDENDKLIREVKVITLKSKLVSDFRKDFQFYKVREINNYHHAHDAYLNAVVGTALIKKYPKLESEFVYGDYKVYDVRKMIAKSEQEIGKATAKYFFYSNIMNFFKTEITLANGEIRKRPLIETNGETGEIVWDKGRDFATVRKVLSMPQVNIVKKTEVQTGGFSKESILPKRNSDKLIARKKDWDPKKYGGFDSPTVAYSVLVVAKVEKGKSKKLKSVKELLGITIMERSSFEKNPIDFLEAKGYKEVKKDLIIKLPKYSLFELENGRKRMLASAGELQKGNELALPSKYVNFLYLASHYEKLKGSPEDNEQKQLFVEQHKHYLDEIIEQISEFSKRVILADANLDKVLSAYNKHRDKPIREQAENIIHLFTLTNLGAPAAFKYFDTTIDRKRYTSTKEVLDATLIHQSITGLYETRIDLSQLGGDGGGGGPAPGGSGGTAPLEEEYRLFLEAPIQNVTLLEQWKREIPKVWAEINPPGLASTQAPIHVQLLSTALPVRVRQYPITLEAKRSLRETIRKFRAAGILRPVHSPWNTPLLPVRKSGTSEYRMVQDLREVNKRVETIHPTVPNPYTLLSLLPPDRIWYSVLDLKDAFFCIPLAPESQLIFAFEWADAEEGESGQLTWTRLPQGFKNSPTLFNEALNRDLQGFRLDHPSVSLLQYVDDLLIAADTQAACLSATRDLLMTLAELGYRVSGKKAQLCQEEVTYLGFKIHKGSRSLSNSRTQAILQIPVPKTKRQVREFLGKIGYCRLFIPGFAELAQPLYAATRPGNDPLVWGEKEEEAFQSLKLALTQPPALALPSLDKPFQLFVEETSGAAKGVLTQALGPWKRPVAYLSKRLDPVAAGWPRCLRAIAAAALLTREASKLTFGQDIEITSSHNLESLLRSPPDKWLTNARITQYQVLLLDPPRVRFKQTAALNPATLLPETDDTLPIHHCLDTLDSLTSTRPDLTDQPLAQAEATLFTDGSSYIRDGKRYAGAAVVTLDSVIWAEPLPIGTSAQKAELIALTKALEWSKDKSVNIYTDSRYAFATLHVHGMIYRERGWLTAGGKAIKNAPEILALLTAVWLPKRVAVMHCKGHQKDDAPTSTGNRRADEVAREVAIRPLSTQATISAGKRTADGSEFEKRTADGSEFESPKKKAKVE

SEQ ID NO: 1403 - protein, 2096 aa, synthetic construct
MPAAKRVKLDGGDKKYSIGLDIGTNSVGWAVITDEYKVPSKKFKVLGNTDRHSIKKNLIGALLFDSGETAEATRLKRTARRRYTRRKNRICYLQEIFSNEMAKVDDSFFHRLEESFLVEEDKKHERHPIFGNIVDEVAYHEKYPTIYHLRKKLVDSTDKADLRLIYLALAHMIKFRGHFLIEGDLNPDNSDVDKLFIQLVQTYNQLFEENPINASGVDAKAILSARLSKSRRLENLIAQLPGEKKNGLFGNLIALSLGLTPNFKSNFDLAEDAKLQLSKDTYDDDLDNLLAQIGDQYADLFLAAKNLSDAILLSDILRVNTEITKAPLSASMIKRYDEHHQDLTLLKALVRQQLPEKYKEIFFDQSKNGYAGYIDGGASQEEFYKFIKPILEKMDGTEELLVKLNREDLLRKQRTFDNGSIPHQIHLGELHAILRRQEDFYPFLKDNREKIEKILTFRIPYYVGPLARGNSRFAWMTRKSEETITPWNFEEVVDKGASAQSFIERMTNFDKNLPNEKVLPKHSLLYEYFTVYNELTKVKYVTEGMRKPAFLSGEQKKAIVDLLFKTNRKVTVKQLKEDYFKKIECFDSVEISGVEDRFNASLGTYHDLLKIIKDKDFLDNEENEDILEDIVLTLTLFEDREMIEERLKTYAHLFDDKVMKQLKRRRYTGWGRLSRKLINGIRDKQSGKTILDFLKSDGFANRNFMQLIHDDSLTFKEDIQKAQVSGQGDSLHEHIANLAGSPAIKKGILQTVKVVDELVKVMGRHKPENIVIEMARENQTTQKGQKNSRERMKRIEEGIKELGSQILKEHPVENTQLQNEKLYLYYLQNGRDMYVDQELDINRLSDYDVDHIVPQSFLKDDSIDNKVLTRSDKARGKSDNVPSEEVVKKMKNYWRQLLNAKLITQRKFDNLTKAERGGLSELDKAGFIKRQLVETRQITKHVAQILDSRMNTKYDENDKLIREVKVITLKSKLVSDFRKDFQFYKVREINNYHHAHDAYLNAVVGTALIKKYPKLESEFVYGDYKVYDVRKMIAKSEQEIGKATAKYFFYSNIMNFFKTEITLANGEIRKRPLIETNGETGEIVWDKGRDFATVRKVLSMPQVNIVKKTEVQTGGFSKESILPKRNSDKLIARKKDWDPKKYGGFDSPTVAYSVLVVAKVEKGKSKKLKSVKELLGITIMERSSFEKNPIDFLEAKGYKEVKKDLIIKLPKYSLFELENGRKRMLASAGELQKGNELALPSKYVNFLYLASHYEKLKGSPEDNEQKQLFVEQHKHYLDEIIEQISEFSKRVILADANLDKVLSAYNKHRDKPIREQAENIIHLFTLTNLGAPAAFKYFDTTIDRKRYTSTKEVLDATLIHQSITGLYETRIDLSQLGGDGGPAPGGSGGGGGTAPLEEEYRLFLEAPIQNVTLLEQWKREIPKVWAEINPPGLASTQAPIHVQLLSTALPVRVRQYPITLEAKRSLRETIRKFRAAGILRPVHSPWNTPLLPVRKSGTSEYRMVQDLREVNKRVETIHPTVPNPYTLLSLLPPDRIWYSVLDLKDAFFCIPLAPESQLIFAFEWADAEEGESGQLTWTRLPQGFKNSPTLFNEALNRDLQGFRLDHPSVSLLQYVDDLLIAADTQAACLSATRDLLMTLAELGYRVSGKKAQLCQEEVTYLGFKIHKGSRSLSNSRTQAILQIPVPKTKRQVREFLGKIGYCRLFIPGFAELAQPLYAATRPGNDPLVWGEKEEEAFQSLKLALTQPPALALPSLDKPFQLFVEETSGAAKGVLTQALGPWKRPVAYLSKRLDPVAAGWPRCLRAIAAAALLTREASKLTFGQDIEITSSHNLESLLRSPPDKWLTNARITQYQVLLLDPPRVRFKQTAALNPATLLPETDDTLPIHHCLDTLDSLTSTRPDLTDQPLAQAEATLFTDGSSYIRDGKRYAGAAVVTLDSVIWAEPLPIGTSAQKAELIALTKALEWSKDKSVNIYTDSRYAFATLHVHGMIYRERGWLTAGGKAIKNAPEILALLTAVWLPKRVAVMHCKGHQKDDAPTSTGNRRADEVAREVAIRPLSTQATISAGKRTADGSEFEKRTADGSEFESPKKKAKVE

SEQ ID NO: 1404 - protein, 2098 aa, synthetic construct
MPAAKRVKLDGGDKKYSIGLDIGTNSVGWAVITDEYKVPSKKFKVLGNTDRHSIKKNLIGALLFDSGETAEATRLKRTARRRYTRRKNRICYLQEIFSNEMAKVDDSFFHRLEESFLVEEDKKHERHPIFGNIVDEVAYHEKYPTIYHLRKKLVDSTDKADLRLIYLALAHMIKFRGHFLIEGDLNPDNSDVDKLFIQLVQTYNQLFEENPINASGVDAKAILSARLSKSRRLENLIAQLPGEKKNGLFGNLIALSLGLTPNFKSNFDLAEDAKLQLSKDTYDDDLDNLLAQIGDQYADLFLAAKNLSDAILLSDILRVNTEITKAPLSASMIKRYDEHHQDLTLLKALVRQQLPEKYKEIFFDQSKNGYAGYIDGGASQEEFYKFIKPILEKMDGTEELLVKLNREDLLRKQRTFDNGSIPHQIHLGELHAILRRQEDFYPFLKDNREKIEKILTFRIPYYVGPLARGNSRFAWMTRKSEETITPWNFEEVVDKGASAQSFIERMTNFDKNLPNEKVLPKHSLLYEYFTVYNELTKVKYVTEGMRKPAFLSGEQKKAIVDLLFKTNRKVTVKQLKEDYFKKIECFDSVEISGVEDRFNASLGTYHDLLKIIKDKDFLDNEENEDILEDIVLTLTLFEDREMIEERLKTYAHLFDDKVMKQLKRRRYTGWGRLSRKLINGIRDKQSGKTILDFLKSDGFANRNFMQLIHDDSLTFKEDIQKAQVSGQGDSLHEHIANLAGSPAIKKGILQTVKVVDELVKVMGRHKPENIVIEMARENQTTQKGQKNSRERMKRIEEGIKELGSQILKEHPVENTQLQNEKLYLYYLQNGRDMYVDQELDINRLSDYDVDHIVPQSFLKDDSIDNKVLTRSDKARGKSDNVPSEEVVKKMKNYWRQLLNAKLITQRKFDNLTKAERGGLSELDKAGFIKRQLVETRQITKHVAQILDSRMNTKYDENDKLIREVKVITLKSKLVSDFRKDFQFYKVREINNYHHAHDAYLNAVVGTALIKKYPKLESEFVYGDYKVYDVRKMIAKSEQEIGKATAKYFFYSNIMNFFKTEITLANGEIRKRPLIETNGETGEIVWDKGRDFATVRKVLSMPQVNIVKKTEVQTGGFSKESILPKRNSDKLIARKKDWDPKKYGGFDSPTVAYSVLVVAKVEKGKSKKLKSVKELLGITIMERSSFEKNPIDFLEAKGYKEVKKDLIIKLPKYSLFELENGRKRMLASAGELQKGNELALPSKYVNFLYLASHYEKLKGSPEDNEQKQLFVEQHKHYLDEIIEQISEFSKRVILADANLDKVLSAYNKHRDKPIREQAENIIHLFTLTNLGAPAAFKYFDTTIDRKRYTSTKEVLDATLIHQSITGLYETRIDLSQLGGDGGGGGGSSEAAAKGGTAPLEEEYRLFLEAPIQNVTLLEQWKREIPKVWAEINPPGLASTQAPIHVQLLSTALPVRVRQYPITLEAKRSLRETIRKFRAAGILRPVHSPWNTPLLPVRKSGTSEYRMVQDLREVNKRVETIHPTVPNPYTLLSLLPPDRIWYSVLDLKDAFFCIPLAPESQLIFAFEWADAEEGESGQLTWTRLPQGFKNSPTLFNEALNRDLQGFRLDHPSVSLLQYVDDLLIAADTQAACLSATRDLLMTLAELGYRVSGKKAQLCQEEVTYLGFKIHKGSRSLSNSRTQAILQIPVPKTKRQVREFLGKIGYCRLFIPGFAELAQPLYAATRPGNDPLVWGEKEEEAFQSLKLALTQPPALALPSLDKPFQLFVEETSGAAKGVLTQALGPWKRPVAYLSKRLDPVAAGWPRCLRAIAAAALLTREASKLTFGQDIEITSSHNLESLLRSPPDKWLTNARITQYQVLLLDPPRVRFKQTAALNPATLLPETDDTLPIHHCLDTLDSLTSTRPDLTDQPLAQAEATLFTDGSSYIRDGKRYAGAAVVTLDSVIWAEPLPIGTSAQKAELIALTKALEWSKDKSVNIYTDSRYAFATLHVHGMIYRERGWLTAGGKAIKNAPEILALLTAVWLPKRVAVMHCKGHQKDDAPTSTGNRRADEVAREVAIRPLSTQATISAGKRTADGSEFEKRTADGSEFESPKKKAKVE

SEQ ID NO: 1405 - protein, 2095 aa, synthetic construct
MPAAKRVKLDGGDKKYSIGLDIGTNSVGWAVITDEYKVPSKKFKVLGNTDRHSIKKNLIGALLFDSGETAEATRLKRTARRRYTRRKNRICYLQEIFSNEMAKVDDSFFHRLEESFLVEEDKKHERHPIFGNIVDEVAYHEKYPTIYHLRKKLVDSTDKADLRLIYLALAHMIKFRGHFLIEGDLNPDNSDVDKLFIQLVQTYNQLFEENPINASGVDAKAILSARLSKSRRLENLIAQLPGEKKNGLFGNLIALSLGLTPNFKSNFDLAEDAKLQLSKDTYDDDLDNLLAQIGDQYADLFLAAKNLSDAILLSDILRVNTEITKAPLSASMIKRYDEHHQDLTLLKALVRQQLPEKYKEIFFDQSKNGYAGYIDGGASQEEFYKFIKPILEKMDGTEELLVKLNREDLLRKQRTFDNGSIPHQIHLGELHAILRRQEDFYPFLKDNREKIEKILTFRIPYYVGPLARGNSRFAWMTRKSEETITPWNFEEVVDKGASAQSFIERMTNFDKNLPNEKVLPKHSLLYEYFTVYNELTKVKYVTEGMRKPAFLSGEQKKAIVDLLFKTNRKVTVKQLKEDYFKKIECFDSVEISGVEDRFNASLGTYHDLLKIIKDKDFLDNEENEDILEDIVLTLTLFEDREMIEERLKTYAHLFDDKVMKQLKRRRYTGWGRLSRKLINGIRDKQSGKTILDFLKSDGFANRNFMQLIHDDSLTFKEDIQKAQVSGQGDSLHEHIANLAGSPAIKKGILQTVKVVDELVKVMGRHKPENIVIEMARENQTTQKGQKNSRERMKRIEEGIKELGSQILKEHPVENTQLQNEKLYLYYLQNGRDMYVDQELDINRLSDYDVDHIVPQSFLKDDSIDNKVLTRSDKARGKSDNVPSEEVVKKMKNYWRQLLNAKLITQRKFDNLTKAERGGLSELDKAGFIKRQLVETRQITKHVAQILDSRMNTKYDENDKLIREVKVITLKSKLVSDFRKDFQFYKVREINNYHHAHDAYLNAVVGTALIKKYPKLESEFVYGDYKVYDVRKMIAKSEQEIGKATAKYFFYSNIMNFFKTEITLANGEIRKRPLIETNGETGEIVWDKGRDFATVRKVLSMPQVNIVKKTEVQTGGFSKESILPKRNSDKLIARKKDWDPKKYGGFDSPTVAYSVLVVAKVEKGKSKKLKSVKELLGITIMERSSFEKNPIDFLEAKGYKEVKKDLIIKLPKYSLFELENGRKRMLASAGELQKGNELALPSKYVNFLYLASHYEKLKGSPEDNEQKQLFVEQHKHYLDEIIEQISEFSKRVILADANLDKVLSAYNKHRDKPIREQAENIIHLFTLTNLGAPAAFKYFDTTIDRKRYTSTKEVLDATLIHQSITGLYETRIDLSQLGGDGGGSSEAAAKGGTAPLEEEYRLFLEAPIQNVTLLEQWKREIPKVWAEINPPGLASTQAPIHVQLLSTALPVRVRQYPITLEAKRSLRETIRKFRAAGILRPVHSPWNTPLLPVRKSGTSEYRMVQDLREVNKRVETIHPTVPNPYTLLSLLPPDRIWYSVLDLKDAFFCIPLAPESQLIFAFEWADAEEGESGQLTWTRLPQGFKNSPTLFNEALNRDLQGFRLDHPSVSLLQYVDDLLIAADTQAACLSATRDLLMTLAELGYRVSGKKAQLCQEEVTYLGFKIHKGSRSLSNSRTQAILQIPVPKTKRQVREFLGKIGYCRLFIPGFAELAQPLYAATRPGNDPLVWGEKEEEAFQSLKLALTQPPALALPSLDKPFQLFVEETSGAAKGVLTQALGPWKRPVAYLSKRLDPVAAGWPRCLRAIAAAALLTREASKLTFGQDIEITSSHNLESLLRSPPDKWLTNARITQYQVLLLDPPRVRFKQTAALNPATLLPETDDTLPIHHCLDTLDSLTSTRPDLTDQPLAQAEATLFTDGSSYIRDGKRYAGAAVVTLDSVIWAEPLPIGTSAQKAELIALTKALEWSKDKSVNIYTDSRYAFATLHVHGMIYRERGWLTAGGKAIKNAPEILALLTAVWLPKRVAVMHCKGHQKDDAPTSTGNRRADEVAREVAIRPLSTQATISAGKRTADGSEFEKRTADGSEFESPKKKAKVE

SEQ ID NO: 1406 - protein, 2098 aa, synthetic construct
MPAAKRVKLDGGDKKYSIGLDIGTNSVGWAVITDEYKVPSKKFKVLGNTDRHSIKKNLIGALLFDSGETAEATRLKRTARRRYTRRKNRICYLQEIFSNEMAKVDDSFFHRLEESFLVEEDKKHERHPIFGNIVDEVAYHEKYPTIYHLRKKLVDSTDKADLRLIYLALAHMIKFRGHFLIEGDLNPDNSDVDKLFIQLVQTYNQLFEENPINASGVDAKAILSARLSKSRRLENLIAQLPGEKKNGLFGNLIALSLGLTPNFKSNFDLAEDAKLQLSKDTYDDDLDNLLAQIGDQYADLFLAAKNLSDAILLSDILRVNTEITKAPLSASMIKRYDEHHQDLTLLKALVRQQLPEKYKEIFFDQSKNGYAGYIDGGASQEEFYKFIKPILEKMDGTEELLVKLNREDLLRKQRTFDNGSIPHQIHLGELHAILRRQEDFYPFLKDNREKIEKILTFRIPYYVGPLARGNSRFAWMTRKSEETITPWNFEEVVDKGASAQSFIERMTNFDKNLPNEKVLPKHSLLYEYFTVYNELTKVKYVTEGMRKPAFLSGEQKKAIVDLLFKTNRKVTVKQLKEDYFKKIECFDSVEISGVEDRFNASLGTYHDLLKIIKDKDFLDNEENEDILEDIVLTLTLFEDREMIEERLKTYAHLFDDKVMKQLKRRRYTGWGRLSRKLINGIRDKQSGKTILDFLKSDGFANRNFMQLIHDDSLTFKEDIQKAQVSGQGDSLHEHIANLAGSPAIKKGILQTVKVVDELVKVMGRHKPENIVIEMARENQTTQKGQKNSRERMKRIEEGIKELGSQILKEHPVENTQLQNEKLYLYYLQNGRDMYVDQELDINRLSDYDVDHIVPQSFLKDDSIDNKVLTRSDKARGKSDNVPSEEVVKKMKNYWRQLLNAKLITQRKFDNLTKAERGGLSELDKAGFIKRQLVETRQITKHVAQILDSRMNTKYDENDKLIREVKVITLKSKLVSDFRKDFQFYKVREINNYHHAHDAYLNAVVGTALIKKYPKLESEFVYGDYKVYDVRKMIAKSEQEIGKATAKYFFYSNIMNFFKTEITLANGEIRKRPLIETNGETGEIVWDKGRDFATVRKVLSMPQVNIVKKTEVQTGGFSKESILPKRNSDKLIARKKDWDPKKYGGFDSPTVAYSVLVVAKVEKGKSKKLKSVKELLGITIMERSSFEKNPIDFLEAKGYKEVKKDLIIKLPKYSLFELENGRKRMLASAGELQKGNELALPSKYVNFLYLASHYEKLKGSPEDNEQKQLFVEQHKHYLDEIIEQISEFSKRVILADANLDKVLSAYNKHRDKPIREQAENIIHLFTLTNLGAPAAFKYFDTTIDRKRYTSTKEVLDATLIHQSITGLYETRIDLSQLGGDGGEAAAKGGSGSSGGTAPLEEEYRLFLEAPIQNVTLLEQWKREIPKVWAEINPPGLASTQAPIHVQLLSTALPVRVRQYPITLEAKRSLRETIRKFRAAGILRPVHSPWNTPLLPVRKSGTSEYRMVQDLREVNKRVETIHPTVPNPYTLLSLLPPDRIWYSVLDLKDAFFCIPLAPESQLIFAFEWADAEEGESGQLTWTRLPQGFKNSPTLFNEALNRDLQGFRLDHPSVSLLQYVDDLLIAADTQAACLSATRDLLMTLAELGYRVSGKKAQLCQEEVTYLGFKIHKGSRSLSNSRTQAILQIPVPKTKRQVREFLGKIGYCRLFIPGFAELAQPLYAATRPGNDPLVWGEKEEEAFQSLKLALTQPPALALPSLDKPFQLFVEETSGAAKGVLTQALGPWKRPVAYLSKRLDPVAAGWPRCLRAIAAAALLTREASKLTFGQDIEITSSHNLESLLRSPPDKWLTNARITQYQVLLLDPPRVRFKQTAALNPATLLPETDDTLPIHHCLDTLDSLTSTRPDLTDQPLAQAEATLFTDGSSYIRDGKRYAGAAVVTLDSVIWAEPLPIGTSAQKAELIALTKALEWSKDKSVNIYTDSRYAFATLHVHGMIYRERGWLTAGGKAIKNAPEILALLTAVWLPKRVAVMHCKGHQKDDAPTSTGNRRADEVAREVAIRPLSTQATISAGKRTADGSEFEKRTADGSEFESPKKKAKVE

SEQ ID NO: 1407 - protein, 2095 aa, synthetic construct
MPAAKRVKLDGGDKKYSIGLDIGTNSVGWAVITDEYKVPSKKFKVLGNTDRHSIKKNLIGALLFDSGETAEATRLKRTARRRYTRRKNRICYLQEIFSNEMAKVDDSFFHRLEESFLVEEDKKHERHPIFGNIVDEVAYHEKYPTIYHLRKKLVDSTDKADLRLIYLALAHMIKFRGHFLIEGDLNPDNSDVDKLFIQLVQTYNQLFEENPINASGVDAKAILSARLSKSRRLENLIAQLPGEKKNGLFGNLIALSLGLTPNFKSNFDLAEDAKLQLSKDTYDDDLDNLLAQIGDQYADLFLAAKNLSDAILLSDILRVNTEITKAPLSASMIKRYDEHHQDLTLLKALVRQQLPEKYKEIFFDQSKNGYAGYIDGGASQEEFYKFIKPILEKMDGTEELLVKLNREDLLRKQRTFDNGSIPHQIHLGELHAILRRQEDFYPFLKDNREKIEKILTFRIPYYVGPLARGNSRFAWMTRKSEETITPWNFEEVVDKGASAQSFIERMTNFDKNLPNEKVLPKHSLLYEYFTVYNELTKVKYVTEGMRKPAFLSGEQKKAIVDLLFKTNRKVTVKQLKEDYFKKIECFDSVEISGVEDRFNASLGTYHDLLKIIKDKDFLDNEENEDILEDIVLTLTLFEDREMIEERLKTYAHLFDDKVMKQLKRRRYTGWGRLSRKLINGIRDKQSGKTILDFLKSDGFANRNFMQLIHDDSLTFKEDIQKAQVSGQGDSLHEHIANLAGSPAIKKGILQTVKVVDELVKVMGRHKPENIVIEMARENQTTQKGQKNSRERMKRIEEGIKELGSQILKEHPVENTQLQNEKLYLYYLQNGRDMYVDQELDINRLSDYDVDHIVPQSFLKDDSIDNKVLTRSDKARGKSDNVPSEEVVKKMKNYWRQLLNAKLITQRKFDNLTKAERGGLSELDKAGFIKRQLVETRQITKHVAQILDSRMNTKYDENDKLIREVKVITLKSKLVSDFRKDFQFYKVREINNYHHAHDAYLNAVVGTALIKKYPKLESEFVYGDYKVYDVRKMIAKSEQEIGKATAKYFFYSNIMNFFKTEITLANGEIRKRPLIETNGETGEIVWDKGRDFATVRKVLSMPQVNIVKKTEVQTGGFSKESILPKRNSDKLIARKKDWDPKKYGGFDSPTVAYSVLVVAKVEKGKSKKLKSVKELLGITIMERSSFEKNPIDFLEAKGYKEVKKDLIIKLPKYSLFELENGRKRMLASAGELQKGNELALPSKYVNFLYLASHYEKLKGSPEDNEQKQLFVEQHKHYLDEIIEQISEFSKRVILADANLDKVLSAYNKHRDKPIREQAENIIHLFTLTNLGAPAAFKYFDTTIDRKRYTSTKEVLDATLIHQSITGLYETRIDLSQLGGDGGPAPEAAAKGGTAPLEEEYRLFLEAPIQNVTLLEQWKREIPKVWAEINPPGLASTQAPIHVQLLSTALPVRVRQYPITLEAKRSLRETIRKFRAAGILRPVHSPWNTPLLPVRKSGTSEYRMVQDLREVNKRVETIHPTVPNPYTLLSLLPPDRIWYSVLDLKDAFFCIPLAPESQLIFAFEWADAEEGESGQLTWTRLPQGFKNSPTLFNEALNRDLQGFRLDHPSVSLLQYVDDLLIAADTQAACLSATRDLLMTLAELGYRVSGKKAQLCQEEVTYLGFKIHKGSRSLSNSRTQAILQIPVPKTKRQVREFLGKIGYCRLFIPGFAELAQPLYAATRPGNDPLVWGEKEEEAFQSLKLALTQPPALALPSLDKPFQLFVEETSGAAKGVLTQALGPWKRPVAYLSKRLDPVAAGWPRCLRAIAAAALLTREASKLTFGQDIEITSSHNLESLLRSPPDKWLTNARITQYQVLLLDPPRVRFKQTAALNPATLLPETDDTLPIHHCLDTLDSLTSTRPDLTDQPLAQAEATLFTDGSSYIRDGKRYAGAAVVTLDSVIWAEPLPIGTSAQKAELIALTKALEWSKDKSVNIYTDSRYAFATLHVHGMIYRERGWLTAGGKAIKNAPEILALLTAVWLPKRVAVMHCKGHQKDDAPTSTGNRRADEVAREVAIRPLSTQATISAGKRTADGSEFEKRTADGSEFESPKKKAKVE

SEQ ID NO: 1408 - protein, 2099 aa, synthetic construct
MPAAKRVKLDGGDKKYSIGLDIGTNSVGWAVITDEYKVPSKKFKVLGNTDRHSIKKNLIGALLFDSGETAEATRLKRTARRRYTRRKNRICYLQEIFSNEMAKVDDSFFHRLEESFLVEEDKKHERHPIFGNIVDEVAYHEKYPTIYHLRKKLVDSTDKADLRLIYLALAHMIKFRGHFLIEGDLNPDNSDVDKLFIQLVQTYNQLFEENPINASGVDAKAILSARLSKSRRLENLIAQLPGEKKNGLFGNLIALSLGLTPNFKSNFDLAEDAKLQLSKDTYDDDLDNLLAQIGDQYADLFLAAKNLSDAILLSDILRVNTEITKAPLSASMIKRYDEHHQDLTLLKALVRQQLPEKYKEIFFDQSKNGYAGYIDGGASQEEFYKFIKPILEKMDGTEELLVKLNREDLLRKQRTFDNGSIPHQIHLGELHAILRRQEDFYPFLKDNREKIEKILTFRIPYYVGPLARGNSRFAWMTRKSEETITPWNFEEVVDKGASAQSFIERMTNFDKNLPNEKVLPKHSLLYEYFTVYNELTKVKYVTEGMRKPAFLSGEQKKAIVDLLFKTNRKVTVKQLKEDYFKKIECFDSVEISGVEDRFNASLGTYHDLLKIIKDKDFLDNEENEDILEDIVLTLTLFEDREMIEERLKTYAHLFDDKVMKQLKRRRYTGWGRLSRKLINGIRDKQSGKTILDFLKSDGFANRNFMQLIHDDSLTFKEDIQKAQVSGQGDSLHEHIANLAGSPAIKKGILQTVKVVDELVKVMGRHKPENIVIEMARENQTTQKGQKNSRERMKRIEEGIKELGSQILKEHPVENTQLQNEKLYLYYLQNGRDMYVDQELDINRLSDYDVDHIVPQSFLKDDSIDNKVLTRSDKARGKSDNVPSEEVVKKMKNYWRQLLNAKLITQRKFDNLTKAERGGLSELDKAGFIKRQLVETRQITKHVAQILDSRMNTKYDENDKLIREVKVITLKSKLVSDFRKDFQFYKVREINNYHHAHDAYLNAVVGTALIKKYPKLESEFVYGDYKVYDVRKMIAKSEQEIGKATAKYFFYSNIMNFFKTEITLANGEIRKRPLIETNGETGEIVWDKGRDFATVRKVLSMPQVNIVKKTEVQTGGFSKESILPKRNSDKLIARKKDWDPKKYGGFDSPTVAYSVLVVAKVEKGKSKKLKSVKELLGITIMERSSFEKNPIDFLEAKGYKEVKKDLIIKLPKYSLFELENGRKRMLASAGELQKGNELALPSKYVNFLYLASHYEKLKGSPEDNEQKQLFVEQHKHYLDEIIEQISEFSKRVILADANLDKVLSAYNKHRDKPIREQAENIIHLFTLTNLGAPAAFKYFDTTIDRKRYTSTKEVLDATLIHQSITGLYETRIDLSQLGGDGGGSAGSAAGSGEFGGTAPLEEEYRLFLEAPIQNVTLLEQWKREIPKVWAEINPPGLASTQAPIHVQLLSTALPVRVRQYPITLEAKRSLRETIRKFRAAGILRPVHSPWNTPLLPVRKSGTSEYRMVQDLREVNKRVETIHPTVPNPYTLLSLLPPDRIWYSVLDLKDAFFCIPLAPESQLIFAFEWADAEEGESGQLTWTRLPQGFKNSPTLFNEALNRDLQGFRLDHPSVSLLQYVDDLLIAADTQAACLSATRDLLMTLAELGYRVSGKKAQLCQEEVTYLGFKIHKGSRSLSNSRTQAILQIPVPKTKRQVREFLGKIGYCRLFIPGFAELAQPLYAATRPGNDPLVWGEKEEEAFQSLKLALTQPPALALPSLDKPFQLFVEETSGAAKGVLTQALGPWKRPVAYLSKRLDPVAAGWPRCLRAIAAAALLTREASKLTFGQDIEITSSHNLESLLRSPPDKWLTNARITQYQVLLLDPPRVRFKQTAALNPATLLPETDDTLPIHHCLDTLDSLTSTRPDLTDQPLAQAEATLFTDGSSYIRDGKRYAGAAVVTLDSVIWAEPLPIGTSAQKAELIALTKALEWSKDKSVNIYTDSRYAFATLHVHGMIYRERGWLTAGGKAIKNAPEILALLTAVWLPKRVAVMHCKGHQKDDAPTSTGNRRADEVAREVAIRPLSTQATISAGKRTADGSEFEKRTADGSEFESPKKKAKVE

SEQ ID NO: 1409 - protein, 2096 aa, synthetic construct
MPAAKRVKLDGGDKKYSIGLDIGTNSVGWAVITDEYKVPSKKFKVLGNTDRHSIKKNLIGALLFDSGETAEATRLKRTARRRYTRRKNRICYLQEIFSNEMAKVDDSFFHRLEESFLVEEDKKHERHPIFGNIVDEVAYHEKYPTIYHLRKKLVDSTDKADLRLIYLALAHMIKFRGHFLIEGDLNPDNSDVDKLFIQLVQTYNQLFEENPINASGVDAKAILSARLSKSRRLENLIAQLPGEKKNGLFGNLIALSLGLTPNFKSNFDLAEDAKLQLSKDTYDDDLDNLLAQIGDQYADLFLAAKNLSDAILLSDILRVNTEITKAPLSASMIKRYDEHHQDLTLLKALVRQQLPEKYKEIFFDQSKNGYAGYIDGGASQEEFYKFIKPILEKMDGTEELLVKLNREDLLRKQRTFDNGSIPHQIHLGELHAILRRQEDFYPFLKDNREKIEKILTFRIPYYVGPLARGNSRFAWMTRKSEETITPWNFEEVVDKGASAQSFIERMTNFDKNLPNEKVLPKHSLLYEYFTVYNELTKVKYVTEGMRKPAFLSGEQKKAIVDLLFKTNRKVTVKQLKEDYFKKIECFDSVEISGVEDRFNASLGTYHDLLKIIKDKDFLDNEENEDILEDIVLTLTLFEDREMIEERLKTYAHLFDDKVMKQLKRRRYTGWGRLSRKLINGIRDKQSGKTILDFLKSDGFANRNFMQLIHDDSLTFKEDIQKAQVSGQGDSLHEHIANLAGSPAIKKGILQTVKVVDELVKVMGRHKPENIVIEMARENQTTQKGQKNSRERMKRIEEGIKELGSQILKEHPVENTQLQNEKLYLYYLQNGRDMYVDQELDINRLSDYDVDHIVPQSFLKDDSIDNKVLTRSDKARGKSDNVPSEEVVKKMKNYWRQLLNAKLITQRKFDNLTKAERGGLSELDKAGFIKRQLVETRQITKHVAQILDSRMNTKYDENDKLIREVKVITLKSKLVSDFRKDFQFYKVREINNYHHAHDAYLNAVVGTALIKKYPKLESEFVYGDYKVYDVRKMIAKSEQEIGKATAKYFFYSNIMNFFKTEITLANGEIRKRPLIETNGETGEIVWDKGRDFATVRKVLSMPQVNIVKKTEVQTGGFSKESILPKRNSDKLIARKKDWDPKKYGGFDSPTVAYSVLVVAKVEKGKSKKLKSVKELLGITIMERSSFEKNPIDFLEAKGYKEVKKDLIIKLPKYSLFELENGRKRMLASAGELQKGNELALPSKYVNFLYLASHYEKLKGSPEDNEQKQLFVEQHKHYLDEIIEQISEFSKRVILADANLDKVLSAYNKHRDKPIREQAENIIHLFTLTNLGAPAAFKYFDTTIDRKRYTSTKEVLDATLIHQSITGLYETRIDLSQLGGDGGGGSPAPGSSGGTAPLEEEYRLFLEAPIQNVTLLEQWKREIPKVWAEINPPGLASTQAPIHVQLLSTALPVRVRQYPITLEAKRSLRETIRKFRAAGILRPVHSPWNTPLLPVRKSGTSEYRMVQDLREVNKRVETIHPTVPNPYTLLSLLPPDRIWYSVLDLKDAFFCIPLAPESQLIFAFEWADAEEGESGQLTWTRLPQGFKNSPTLFNEALNRDLQGFRLDHPSVSLLQYVDDLLIAADTQAACLSATRDLLMTLAELGYRVSGKKAQLCQEEVTYLGFKIHKGSRSLSNSRTQAILQIPVPKTKRQVREFLGKIGYCRLFIPGFAELAQPLYAATRPGNDPLVWGEKEEEAFQSLKLALTQPPALALPSLDKPFQLFVEETSGAAKGVLTQALGPWKRPVAYLSKRLDPVAAGWPRCLRAIAAAALLTREASKLTFGQDIEITSSHNLESLLRSPPDKWLTNARITQYQVLLLDPPRVRFKQTAALNPATLLPETDDTLPIHHCLDTLDSLTSTRPDLTDQPLAQAEATLFTDGSSYIRDGKRYAGAAVVTLDSVIWAEPLPIGTSAQKAELIALTKALEWSKDKSVNIYTDSRYAFATLHVHGMIYRERGWLTAGGKAIKNAPEILALLTAVWLPKRVAVMHCKGHQKDDAPTSTGNRRADEVAREVAIRPLSTQATISAGKRTADGSEFEKRTADGSEFESPKKKAKVE

SEQ ID NO: 1410 - protein, 2093 aa, synthetic construct
MPAAKRVKLDGGDKKYSIGLDIGTNSVGWAVITDEYKVPSKKFKVLGNTDRHSIKKNLIGALLFDSGETAEATRLKRTARRRYTRRKNRICYLQEIFSNEMAKVDDSFFHRLEESFLVEEDKKHERHPIFGNIVDEVAYHEKYPTIYHLRKKLVDSTDKADLRLIYLALAHMIKFRGHFLIEGDLNPDNSDVDKLFIQLVQTYNQLFEENPINASGVDAKAILSARLSKSRRLENLIAQLPGEKKNGLFGNLIALSLGLTPNFKSNFDLAEDAKLQLSKDTYDDDLDNLLAQIGDQYADLFLAAKNLSDAILLSDILRVNTEITKAPLSASMIKRYDEHHQDLTLLKALVRQQLPEKYKEIFFDQSKNGYAGYIDGGASQEEFYKFIKPILEKMDGTEELLVKLNREDLLRKQRTFDNGSIPHQIHLGELHAILRRQEDFYPFLKDNREKIEKILTFRIPYYVGPLARGNSRFAWMTRKSEETITPWNFEEVVDKGASAQSFIERMTNFDKNLPNEKVLPKHSLLYEYFTVYNELTKVKYVTEGMRKPAFLSGEQKKAIVDLLFKTNRKVTVKQLKEDYFKKIECFDSVEISGVEDRFNASLGTYHDLLKIIKDKDFLDNEENEDILEDIVLTLTLFEDREMIEERLKTYAHLFDDKVMKQLKRRRYTGWGRLSRKLINGIRDKQSGKTILDFLKSDGFANRNFMQLIHDDSLTFKEDIQKAQVSGQGDSLHEHIANLAGSPAIKKGILQTVKVVDELVKVMGRHKPENIVIEMARENQTTQKGQKNSRERMKRIEEGIKELGSQILKEHPVENTQLQNEKLYLYYLQNGRDMYVDQELDINRLSDYDVDHIVPQSFLKDDSIDNKVLTRSDKARGKSDNVPSEEVVKKMKNYWRQLLNAKLITQRKFDNLTKAERGGLSELDKAGFIKRQLVETRQITKHVAQILDSRMNTKYDENDKLIREVKVITLKSKLVSDFRKDFQFYKVREINNYHHAHDAYLNAVVGTALIKKYPKLESEFVYGDYKVYDVRKMIAKSEQEIGKATAKYFFYSNIMNFFKTEITLANGEIRKRPLIETNGETGEIVWDKGRDFATVRKVLSMPQVNIVKKTEVQTGGFSKESILPKRNSDKLIARKKDWDPKKYGGFDSPTVAYSVLVVAKVEKGKSKKLKSVKELLGITIMERSSFEKNPIDFLEAKGYKEVKKDLIIKLPKYSLFELENGRKRMLASAGELQKGNELALPSKYVNFLYLASHYEKLKGSPEDNEQKQLFVEQHKHYLDEIIEQISEFSKRVILADANLDKVLSAYNKHRDKPIREQAENIIHLFTLTNLGAPAAFKYFDTTIDRKRYTSTKEVLDATLIHQSITGLYETRIDLSQLGGDGGPAPGGGGGTAPLEEEYRLFLEAPIQNVTLLEQWKREIPKVWAEINPPGLASTQAPIHVQLLSTALPVRVRQYPITLEAKRSLRETIRKFRAAGILRPVHSPWNTPLLPVRKSGTSEYRMVQDLREVNKRVETIHPTVPNPYTLLSLLPPDRIWYSVLDLKDAFFCIPLAPESQLIFAFEWADAEEGESGQLTWTRLPQGFKNSPTLFNEALNRDLQGFRLDHPSVSLLQYVDDLLIAADTQAACLSATRDLLMTLAELGYRVSGKKAQLCQEEVTYLGFKIHKGSRSLSNSRTQAILQIPVPKTKRQVREFLGKIGYCRLFIPGFAELAQPLYAATRPGNDPLVWGEKEEEAFQSLKLALTQPPALALPSLDKPFQLFVEETSGAAKGVLTQALGPWKRPVAYLSKRLDPVAAGWPRCLRAIAAAALLTREASKLTFGQDIEITSSHNLESLLRSPPDKWLTNARITQYQVLLLDPPRVRFKQTAALNPATLLPETDDTLPIHHCLDTLDSLTSTRPDLTDQPLAQAEATLFTDGSSYIRDGKRYAGAAVVTLDSVIWAEPLPIGTSAQKAELIALTKALEWSKDKSVNIYTDSRYAFATLHVHGMIYRERGWLTAGGKAIKNAPEILALLTAVWLPKRVAVMHCKGHQKDDAPTSTGNRRADEVAREVAIRPLSTQATISAGKRTADGSEFEKRTADGSEFESPKKKAKVE

SEQ ID NO: 1411 - protein, 2096 aa, synthetic construct
MPAAKRVKLDGGDKKYSIGLDIGTNSVGWAVITDEYKVPSKKFKVLGNTDRHSIKKNLIGALLFDSGETAEATRLKRTARRRYTRRKNRICYLQEIFSNEMAKVDDSFFHRLEESFLVEEDKKHERHPIFGNIVDEVAYHEKYPTIYHLRKKLVDSTDKADLRLIYLALAHMIKFRGHFLIEGDLNPDNSDVDKLFIQLVQTYNQLFEENPINASGVDAKAILSARLSKSRRLENLIAQLPGEKKNGLFGNLIALSLGLTPNFKSNFDLAEDAKLQLSKDTYDDDLDNLLAQIGDQYADLFLAAKNLSDAILLSDILRVNTEITKAPLSASMIKRYDEHHQDLTLLKALVRQQLPEKYKEIFFDQSKNGYAGYIDGGASQEEFYKFIKPILEKMDGTEELLVKLNREDLLRKQRTFDNGSIPHQIHLGELHAILRRQEDFYPFLKDNREKIEKILTFRIPYYVGPLARGNSRFAWMTRKSEETITPWNFEEVVDKGASAQSFIERMTNFDKNLPNEKVLPKHSLLYEYFTVYNELTKVKYVTEGMRKPAFLSGEQKKAIVDLLFKTNRKVTVKQLKEDYFKKIECFDSVEISGVEDRFNASLGTYHDLLKIIKDKDFLDNEENEDILEDIVLTLTLFEDREMIEERLKTYAHLFDDKVMKQLKRRRYTGWGRLSRKLINGIRDKQSGKTILDFLKSDGFANRNFMQLIHDDSLTFKEDIQKAQVSGQGDSLHEHIANLAGSPAIKKGILQTVKVVDELVKVMGRHKPENIVIEMARENQTTQKGQKNSRERMKRIEEGIKELGSQILKEHPVENTQLQNEKLYLYYLQNGRDMYVDQELDINRLSDYDVDHIVPQSFLKDDSIDNKVLTRSDKARGKSDNVPSEEVVKKMKNYWRQLLNAKLITQRKFDNLTKAERGGLSELDKAGFIKRQLVETRQITKHVAQILDSRMNTKYDENDKLIREVKVITLKSKLVSDFRKDFQFYKVREINNYHHAHDAYLNAVVGTALIKKYPKLESEFVYGDYKVYDVRKMIAKSEQEIGKATAKYFFYSNIMNFFKTEITLANGEIRKRPLIETNGETGEIVWDKGRDFATVRKVLSMPQVNIVKKTEVQTGGFSKESILPKRNSDKLIARKKDWDPKKYGGFDSPTVAYSVLVVAKVEKGKSKKLKSVKELLGITIMERSSFEKNPIDFLEAKGYKEVKKDLIIKLPKYSLFELENGRKRMLASAGELQKGNELALPSKYVNFLYLASHYEKLKGSPEDNEQKQLFVEQHKHYLDEIIEQISEFSKRVILADANLDKVLSAYNKHRDKPIREQAENIIHLFTLTNLGAPAAFKYFDTTIDRKRYTSTKEVLDATLIHQSITGLYETRIDLSQLGGDGGGGGPAPGSSGGTAPLEEEYRLFLEAPIQNVTLLEQWKREIPKVWAEINPPGLASTQAPIHVQLLSTALPVRVRQYPITLEAKRSLRETIRKFRAAGILRPVHSPWNTPLLPVRKSGTSEYRMVQDLREVNKRVETIHPTVPNPYTLLSLLPPDRIWYSVLDLKDAFFCIPLAPESQLIFAFEWADAEEGESGQLTWTRLPQGFKNSPTLFNEALNRDLQGFRLDHPSVSLLQYVDDLLIAADTQAACLSATRDLLMTLAELGYRVSGKKAQLCQEEVTYLGFKIHKGSRSLSNSRTQAILQIPVPKTKRQVREFLGKIGYCRLFIPGFAELAQPLYAATRPGNDPLVWGEKEEEAFQSLKLALTQPPALALPSLDKPFQLFVEETSGAAKGVLTQALGPWKRPVAYLSKRLDPVAAGWPRCLRAIAAAALLTREASKLTFGQDIEITSSHNLESLLRSPPDKWLTNARITQYQVLLLDPPRVRFKQTAALNPATLLPETDDTLPIHHCLDTLDSLTSTRPDLTDQPLAQAEATLFTDGSSYIRDGKRYAGAAVVTLDSVIWAEPLPIGTSAQKAELIALTKALEWSKDKSVNIYTDSRYAFATLHVHGMIYRERGWLTAGGKAIKNAPEILALLTAVWLPKRVAVMHCKGHQKDDAPTSTGNRRADEVAREVAIRPLSTQATISAGKRTADGSEFEKRTADGSEFESPKKKAKVE

SEQ ID NO: 1412 - protein, 2093 aa, synthetic construct
MPAAKRVKLDGGDKKYSIGLDIGTNSVGWAVITDEYKVPSKKFKVLGNTDRHSIKKNLIGALLFDSGETAEATRLKRTARRRYTRRKNRICYLQEIFSNEMAKVDDSFFHRLEESFLVEEDKKHERHPIFGNIVDEVAYHEKYPTIYHLRKKLVDSTDKADLRLIYLALAHMIKFRGHFLIEGDLNPDNSDVDKLFIQLVQTYNQLFEENPINASGVDAKAILSARLSKSRRLENLIAQLPGEKKNGLFGNLIALSLGLTPNFKSNFDLAEDAKLQLSKDTYDDDLDNLLAQIGDQYADLFLAAKNLSDAILLSDILRVNTEITKAPLSASMIKRYDEHHQDLTLLKALVRQQLPEKYKEIFFDQSKNGYAGYIDGGASQEEFYKFIKPILEKMDGTEELLVKLNREDLLRKQRTFDNGSIPHQIHLGELHAILRRQEDFYPFLKDNREKIEKILTFRIPYYVGPLARGNSRFAWMTRKSEETITPWNFEEVVDKGASAQSFIERMTNFDKNLPNEKVLPKHSLLYEYFTVYNELTKVKYVTEGMRKPAFLSGEQKKAIVDLLFKTNRKVTVKQLKEDYFKKIECFDSVEISGVEDRFNASLGTYHDLLKIIKDKDFLDNEENEDILEDIVLTLTLFEDREMIEERLKTYAHLFDDKVMKQLKRRRYTGWGRLSRKLINGIRDKQSGKTILDFLKSDGFANRNFMQLIHDDSLTFKEDIQKAQVSGQGDSLHEHIANLAGSPAIKKGILQTVKVVDELVKVMGRHKPENIVIEMARENQTTQKGQKNSRERMKRIEEGIKELGSQILKEHPVENTQLQNEKLYLYYLQNGRDMYVDQELDINRLSDYDVDHIVPQSFLKDDSIDNKVLTRSDKARGKSDNVPSEEVVKKMKNYWRQLLNAKLITQRKFDNLTKAERGGLSELDKAGFIKRQLVETRQITKHVAQILDSRMNTKYDENDKLIREVKVITLKSKLVSDFRKDFQFYKVREINNYHHAHDAYLNAVVGTALIKKYPKLESEFVYGDYKVYDVRKMIAKSEQEIGKATAKYFFYSNIMNFFKTEITLANGEIRKRPLIETNGETGEIVWDKGRDFATVRKVLSMPQVNIVKKTEVQTGGFSKESILPKRNSDKLIARKKDWDPKKYGGFDSPTVAYSVLVVAKVEKGKSKKLKSVKELLGITIMERSSFEKNPIDFLEAKGYKEVKKDLIIKLPKYSLFELENGRKRMLASAGELQKGNELALPSKYVNFLYLASHYEKLKGSPEDNEQKQLFVEQHKHYLDEIIEQISEFSKRVILADANLDKVLSAYNKHRDKPIREQAENIIHLFTLTNLGAPAAFKYFDTTIDRKRYTSTKEVLDATLIHQSITGLYETRIDLSQLGGDGGGGSGSSGGTAPLEEEYRLFLEAPIQNVTLLEQWKREIPKVWAEINPPGLASTQAPIHVQLLSTALPVRVRQYPITLEAKRSLRETIRKFRAAGILRPVHSPWNTPLLPVRKSGTSEYRMVQDLREVNKRVETIHPTVPNPYTLLSLLPPDRIWYSVLDLKDAFFCIPLAPESQLIFAFEWADAEEGESGQLTWTRLPQGFKNSPTLFNEALNRDLQGFRLDHPSVSLLQYVDDLLIAADTQAACLSATRDLLMTLAELGYRVSGKKAQLCQEEVTYLGFKIHKGSRSLSNSRTQAILQIPVPKTKRQVREFLGKIGYCRLFIPGFAELAQPLYAATRPGNDPLVWGEKEEEAFQSLKLALTQPPALALPSLDKPFQLFVEETSGAAKGVLTQALGPWKRPVAYLSKRLDPVAAGWPRCLRAIAAAALLTREASKLTFGQDIEITSSHNLESLLRSPPDKWLTNARITQYQVLLLDPPRVRFKQTAALNPATLLPETDDTLPIHHCLDTLDSLTSTRPDLTDQPLAQAEATLFTDGSSYIRDGKRYAGAAVVTLDSVIWAEPLPIGTSAQKAELIALTKALEWSKDKSVNIYTDSRYAFATLHVHGMIYRERGWLTAGGKAIKNAPEILALLTAVWLPKRVAVMHCKGHQKDDAPTSTGNRRADEVAREVAIRPLSTQATISAGKRTADGSEFEKRTADGSEFESPKKKAKVE

SEQ ID NO: 1413 - protein, 2096 aa, synthetic construct
MPAAKRVKLDGGDKKYSIGLDIGTNSVGWAVITDEYKVPSKKFKVLGNTDRHSIKKNLIGALLFDSGETAEATRLKRTARRRYTRRKNRICYLQEIFSNEMAKVDDSFFHRLEESFLVEEDKKHERHPIFGNIVDEVAYHEKYPTIYHLRKKLVDSTDKADLRLIYLALAHMIKFRGHFLIEGDLNPDNSDVDKLFIQLVQTYNQLFEENPINASGVDAKAILSARLSKSRRLENLIAQLPGEKKNGLFGNLIALSLGLTPNFKSNFDLAEDAKLQLSKDTYDDDLDNLLAQIGDQYADLFLAAKNLSDAILLSDILRVNTEITKAPLSASMIKRYDEHHQDLTLLKALVRQQLPEKYKEIFFDQSKNGYAGYIDGGASQEEFYKFIKPILEKMDGTEELLVKLNREDLLRKQRTFDNGSIPHQIHLGELHAILRRQEDFYPFLKDNREKIEKILTFRIPYYVGPLARGNSRFAWMTRKSEETITPWNFEEVVDKGASAQSFIERMTNFDKNLPNEKVLPKHSLLYEYFTVYNELTKVKYVTEGMRKPAFLSGEQKKAIVDLLFKTNRKVTVKQLKEDYFKKIECFDSVEISGVEDRFNASLGTYHDLLKIIKDKDFLDNEENEDILEDIVLTLTLFEDREMIEERLKTYAHLFDDKVMKQLKRRRYTGWGRLSRKLINGIRDKQSGKTILDFLKSDGFANRNFMQLIHDDSLTFKEDIQKAQVSGQGDSLHEHIANLAGSPAIKKGILQTVKVVDELVKVMGRHKPENIVIEMARENQTTQKGQKNSRERMKRIEEGIKELGSQILKEHPVENTQLQNEKLYLYYLQNGRDMYVDQELDINRLSDYDVDHIVPQSFLKDDSIDNKVLTRSDKARGKSDNVPSEEVVKKMKNYWRQLLNAKLITQRKFDNLTKAERGGLSELDKAGFIKRQLVETRQITKHVAQILDSRMNTKYDENDKLIREVKVITLKSKLVSDFRKDFQFYKVREINNYHHAHDAYLNAVVGTALIKKYPKLESEFVYGDYKVYDVRKMIAKSEQEIGKATAKYFFYSNIMNFFKTEITLANGEIRKRPLIETNGETGEIVWDKGRDFATVRKVLSMPQVNIVKKTEVQTGGFSKESILPKRNSDKLIARKKDWDPKKYGGFDSPTVAYSVLVVAKVEKGKSKKLKSVKELLGITIMERSSFEKNPIDFLEAKGYKEVKKDLIIKLPKYSLFELENGRKRMLASAGELQKGNELALPSKYVNFLYLASHYEKLKGSPEDNEQKQLFVEQHKHYLDEIIEQISEFSKRVILADANLDKVLSAYNKHRDKPIREQAENIIHLFTLTNLGAPAAFKYFDTTIDRKRYTSTKEVLDATLIHQSITGLYETRIDLSQLGGDGGGSSGGGGGSGGTAPLEEEYRLFLEAPIQNVTLLEQWKREIPKVWAEINPPGLASTQAPIHVQLLSTALPVRVRQYPITLEAKRSLRETIRKFRAAGILRPVHSPWNTPLLPVRKSGTSEYRMVQDLREVNKRVETIHPTVPNPYTLLSLLPPDRIWYSVLDLKDAFFCIPLAPESQLIFAFEWADAEEGESGQLTWTRLPQGFKNSPTLFNEALNRDLQGFRLDHPSVSLLQYVDDLLIAADTQAACLSATRDLLMTLAELGYRVSGKKAQLCQEEVTYLGFKIHKGSRSLSNSRTQAILQIPVPKTKRQVREFLGKIGYCRLFIPGFAELAQPLYAATRPGNDPLVWGEKEEEAFQSLKLALTQPPALALPSLDKPFQLFVEETSGAAKGVLTQALGPWKRPVAYLSKRLDPVAAGWPRCLRAIAAAALLTREASKLTFGQDIEITSSHNLESLLRSPPDKWLTNARITQYQVLLLDPPRVRFKQTAALNPATLLPETDDTLPIHHCLDTLDSLTSTRPDLTDQPLAQAEATLFTDGSSYIRDGKRYAGAAVVTLDSVIWAEPLPIGTSAQKAELIALTKALEWSKDKSVNIYTDSRYAFATLHVHGMIYRERGWLTAGGKAIKNAPEILALLTAVWLPKRVAVMHCKGHQKDDAPTSTGNRRADEVAREVAIRPLSTQATISAGKRTADGSEFEKRTADGSEFESPKKKAKVE

SEQ ID NO: 1414 - protein, 2090 aa, synthetic construct
MPAAKRVKLDGGDKKYSIGLDIGTNSVGWAVITDEYKVPSKKFKVLGNTDRHSIKKNLIGALLFDSGETAEATRLKRTARRRYTRRKNRICYLQEIFSNEMAKVDDSFFHRLEESFLVEEDKKHERHPIFGNIVDEVAYHEKYPTIYHLRKKLVDSTDKADLRLIYLALAHMIKFRGHFLIEGDLNPDNSDVDKLFIQLVQTYNQLFEENPINASGVDAKAILSARLSKSRRLENLIAQLPGEKKNGLFGNLIALSLGLTPNFKSNFDLAEDAKLQLSKDTYDDDLDNLLAQIGDQYADLFLAAKNLSDAILLSDILRVNTEITKAPLSASMIKRYDEHHQDLTLLKALVRQQLPEKYKEIFFDQSKNGYAGYIDGGASQEEFYKFIKPILEKMDGTEELLVKLNREDLLRKQRTFDNGSIPHQIHLGELHAILRRQEDFYPFLKDNREKIEKILTFRIPYYVGPLARGNSRFAWMTRKSEETITPWNFEEVVDKGASAQSFIERMTNFDKNLPNEKVLPKHSLLYEYFTVYNELTKVKYVTEGMRKPAFLSGEQKKAIVDLLFKTNRKVTVKQLKEDYFKKIECFDSVEISGVEDRFNASLGTYHDLLKIIKDKDFLDNEENEDILEDIVLTLTLFEDREMIEERLKTYAHLFDDKVMKQLKRRRYTGWGRLSRKLINGIRDKQSGKTILDFLKSDGFANRNFMQLIHDDSLTFKEDIQKAQVSGQGDSLHEHIANLAGSPAIKKGILQTVKVVDELVKVMGRHKPENIVIEMARENQTTQKGQKNSRERMKRIEEGIKELGSQILKEHPVENTQLQNEKLYLYYLQNGRDMYVDQELDINRLSDYDVDHIVPQSFLKDDSIDNKVLTRSDKARGKSDNVPSEEVVKKMKNYWRQLLNAKLITQRKFDNLTKAERGGLSELDKAGFIKRQLVETRQITKHVAQILDSRMNTKYDENDKLIREVKVITLKSKLVSDFRKDFQFYKVREINNYHHAHDAYLNAVVGTALIKKYPKLESEFVYGDYKVYDVRKMIAKSEQEIGKATAKYFFYSNIMNFFKTEITLANGEIRKRPLIETNGETGEIVWDKGRDFATVRKVLSMPQVNIVKKTEVQTGGFSKESILPKRNSDKLIARKKDWDPKKYGGFDSPTVAYSVLVVAKVEKGKSKKLKSVKELLGITIMERSSFEKNPIDFLEAKGYKEVKKDLIIKLPKYSLFELENGRKRMLASAGELQKGNELALPSKYVNFLYLASHYEKLKGSPEDNEQKQLFVEQHKHYLDEIIEQISEFSKRVILADANLDKVLSAYNKHRDKPIREQAENIIHLFTLTNLGAPAAFKYFDTTIDRKRYTSTKEVLDATLIHQSITGLYETRIDLSQLGGDGGPAPGGTAPLEEEYRLFLEAPIQNVTLLEQWKREIPKVWAEINPPGLASTQAPIHVQLLSTALPVRVRQYPITLEAKRSLRETIRKFRAAGILRPVHSPWNTPLLPVRKSGTSEYRMVQDLREVNKRVETIHPTVPNPYTLLSLLPPDRIWYSVLDLKDAFFCIPLAPESQLIFAFEWADAEEGESGQLTWTRLPQGFKNSPTLFNEALNRDLQGFRLDHPSVSLLQYVDDLLIAADTQAACLSATRDLLMTLAELGYRVSGKKAQLCQEEVTYLGFKIHKGSRSLSNSRTQAILQIPVPKTKRQVREFLGKIGYCRLFIPGFAELAQPLYAATRPGNDPLVWGEKEEEAFQSLKLALTQPPALALPSLDKPFQLFVEETSGAAKGVLTQALGPWKRPVAYLSKRLDPVAAGWPRCLRAIAAAALLTREASKLTFGQDIEITSSHNLESLLRSPPDKWLTNARITQYQVLLLDPPRVRFKQTAALNPATLLPETDDTLPIHHCLDTLDSLTSTRPDLTDQPLAQAEATLFTDGSSYIRDGKRYAGAAVVTLDSVIWAEPLPIGTSAQKAELIALTKALEWSKDKSVNIYTDSRYAFATLHVHGMIYRERGWLTAGGKAIKNAPEILALLTAVWLPKRVAVMHCKGHQKDDAPTSTGNRRADEVAREVAIRPLSTQATISAGKRTADGSEFEKRTADGSEFESPKKKAKVE

SEQ ID NO: 1415 - protein, 2098 aa, synthetic construct
MPAAKRVKLDGGDKKYSIGLDIGTNSVGWAVITDEYKVPSKKFKVLGNTDRHSIKKNLIGALLFDSGETAEATRLKRTARRRYTRRKNRICYLQEIFSNEMAKVDDSFFHRLEESFLVEEDKKHERHPIFGNIVDEVAYHEKYPTIYHLRKKLVDSTDKADLRLIYLALAHMIKFRGHFLIEGDLNPDNSDVDKLFIQLVQTYNQLFEENPINASGVDAKAILSARLSKSRRLENLIAQLPGEKKNGLFGNLIALSLGLTPNFKSNFDLAEDAKLQLSKDTYDDDLDNLLAQIGDQYADLFLAAKNLSDAILLSDILRVNTEITKAPLSASMIKRYDEHHQDLTLLKALVRQQLPEKYKEIFFDQSKNGYAGYIDGGASQEEFYKFIKPILEKMDGTEELLVKLNREDLLRKQRTFDNGSIPHQIHLGELHAILRRQEDFYPFLKDNREKIEKILTFRIPYYVGPLARGNSRFAWMTRKSEETITPWNFEEVVDKGASAQSFIERMTNFDKNLPNEKVLPKHSLLYEYFTVYNELTKVKYVTEGMRKPAFLSGEQKKAIVDLLFKTNRKVTVKQLKEDYFKKIECFDSVEISGVEDRFNASLGTYHDLLKIIKDKDFLDNEENEDILEDIVLTLTLFEDREMIEERLKTYAHLFDDKVMKQLKRRRYTGWGRLSRKLINGIRDKQSGKTILDFLKSDGFANRNFMQLIHDDSLTFKEDIQKAQVSGQGDSLHEHIANLAGSPAIKKGILQTVKVVDELVKVMGRHKPENIVIEMARENQTTQKGQKNSRERMKRIEEGIKELGSQILKEHPVENTQLQNEKLYLYYLQNGRDMYVDQELDINRLSDYDVDHIVPQSFLKDDSIDNKVLTRSDKARGKSDNVPSEEVVKKMKNYWRQLLNAKLITQRKFDNLTKAERGGLSELDKAGFIKRQLVETRQITKHVAQILDSRMNTKYDENDKLIREVKVITLKSKLVSDFRKDFQFYKVREINNYHHAHDAYLNAVVGTALIKKYPKLESEFVYGDYKVYDVRKMIAKSEQEIGKATAKYFFYSNIMNFFKTEITLANGEIRKRPLIETNGETGEIVWDKGRDFATVRKVLSMPQVNIVKKTEVQTGGFSKESILPKRNSDKLIARKKDWDPKKYGGFDSPTVAYSVLVVAKVEKGKSKKLKSVKELLGITIMERSSFEKNPIDFLEAKGYKEVKKDLIIKLPKYSLFELENGRKRMLASAGELQKGNELALPSKYVNFLYLASHYEKLKGSPEDNEQKQLFVEQHKHYLDEIIEQISEFSKRVILADANLDKVLSAYNKHRDKPIREQAENIIHLFTLTNLGAPAAFKYFDTTIDRKRYTSTKEVLDATLIHQSITGLYETRIDLSQLGGDGGGGGPAPEAAAKGGTAPLEEEYRLFLEAPIQNVTLLEQWKREIPKVWAEINPPGLASTQAPIHVQLLSTALPVRVRQYPITLEAKRSLRETIRKFRAAGILRPVHSPWNTPLLPVRKSGTSEYRMVQDLREVNKRVETIHPTVPNPYTLLSLLPPDRIWYSVLDLKDAFFCIPLAPESQLIFAFEWADAEEGESGQLTWTRLPQGFKNSPTLFNEALNRDLQGFRLDHPSVSLLQYVDDLLIAADTQAACLSATRDLLMTLAELGYRVSGKKAQLCQEEVTYLGFKIHKGSRSLSNSRTQAILQIPVPKTKRQVREFLGKIGYCRLFIPGFAELAQPLYAATRPGNDPLVWGEKEEEAFQSLKLALTQPPALALPSLDKPFQLFVEETSGAAKGVLTQALGPWKRPVAYLSKRLDPVAAGWPRCLRAIAAAALLTREASKLTFGQDIEITSSHNLESLLRSPPDKWLTNARITQYQVLLLDPPRVRFKQTAALNPATLLPETDDTLPIHHCLDTLDSLTSTRPDLTDQPLAQAEATLFTDGSSYIRDGKRYAGAAVVTLDSVIWAEPLPIGTSAQKAELIALTKALEWSKDKSVNIYTDSRYAFATLHVHGMIYRERGWLTAGGKAIKNAPEILALLTAVWLPKRVAVMHCKGHQKDDAPTSTGNRRADEVAREVAIRPLSTQATISAGKRTADGSEFEKRTADGSEFESPKKKAKVE

SEQ ID NO: 1416 - protein, 2098 aa, synthetic construct
MPAAKRVKLDGGDKKYSIGLDIGTNSVGWAVITDEYKVPSKKFKVLGNTDRHSIKKNLIGALLFDSGETAEATRLKRTARRRYTRRKNRICYLQEIFSNEMAKVDDSFFHRLEESFLVEEDKKHERHPIFGNIVDEVAYHEKYPTIYHLRKKLVDSTDKADLRLIYLALAHMIKFRGHFLIEGDLNPDNSDVDKLFIQLVQTYNQLFEENPINASGVDAKAILSARLSKSRRLENLIAQLPGEKKNGLFGNLIALSLGLTPNFKSNFDLAEDAKLQLSKDTYDDDLDNLLAQIGDQYADLFLAAKNLSDAILLSDILRVNTEITKAPLSASMIKRYDEHHQDLTLLKALVRQQLPEKYKEIFFDQSKNGYAGYIDGGASQEEFYKFIKPILEKMDGTEELLVKLNREDLLRKQRTFDNGSIPHQIHLGELHAILRRQEDFYPFLKDNREKIEKILTFRIPYYVGPLARGNSRFAWMTRKSEETITPWNFEEVVDKGASAQSFIERMTNFDKNLPNEKVLPKHSLLYEYFTVYNELTKVKYVTEGMRKPAFLSGEQKKAIVDLLFKTNRKVTVKQLKEDYFKKIECFDSVEISGVEDRFNASLGTYHDLLKIIKDKDFLDNEENEDILEDIVLTLTLFEDREMIEERLKTYAHLFDDKVMKQLKRRRYTGWGRLSRKLINGIRDKQSGKTILDFLKSDGFANRNFMQLIHDDSLTFKEDIQKAQVSGQGDSLHEHIANLAGSPAIKKGILQTVKVVDELVKVMGRHKPENIVIEMARENQTTQKGQKNSRERMKRIEEGIKELGSQILKEHPVENTQLQNEKLYLYYLQNGRDMYVDQELDINRLSDYDVDHIVPQSFLKDDSIDNKVLTRSDKARGKSDNVPSEEVVKKMKNYWRQLLNAKLITQRKFDNLTKAERGGLSELDKAGFIKRQLVETRQITKHVAQILDSRMNTKYDENDKLIREVKVITLKSKLVSDFRKDFQFYKVREINNYHHAHDAYLNAVVGTALIKKYPKLESEFVYGDYKVYDVRKMIAKSEQEIGKATAKYFFYSNIMNFFKTEITLANGEIRKRPLIETNGETGEIVWDKGRDFATVRKVLSMPQVNIVKKTEVQTGGFSKESILPKRNSDKLIARKKDWDPKKYGGFDSPTVAYSVLVVAKVEKGKSKKLKSVKELLGITIMERSSFEKNPIDFLEAKGYKEVKKDLIIKLPKYSLFELENGRKRMLASAGELQKGNELALPSKYVNFLYLASHYEKLKGSPEDNEQKQLFVEQHKHYLDEIIEQISEFSKRVILADANLDKVLSAYNKHRDKPIREQAENIIHLFTLTNLGAPAAFKYFDTTIDRKRYTSTKEVLDATLIHQSITGLYETRIDLSQLGGDGGEAAAKGSSPAPGGTAPLEEEYRLFLEAPIQNVTLLEQWKREIPKVWAEINPPGLASTQAPIHVQLLSTALPVRVRQYPITLEAKRSLRETIRKFRAAGILRPVHSPWNTPLLPVRKSGTSEYRMVQDLREVNKRVETIHPTVPNPYTLLSLLPPDRIWYSVLDLKDAFFCIPLAPESQLIFAFEWADAEEGESGQLTWTRLPQGFKNSPTLFNEALNRDLQGFRLDHPSVSLLQYVDDLLIAADTQAACLSATRDLLMTLAELGYRVSGKKAQLCQEEVTYLGFKIHKGSRSLSNSRTQAILQIPVPKTKRQVREFLGKIGYCRLFIPGFAELAQPLYAATRPGNDPLVWGEKEEEAFQSLKLALTQPPALALPSLDKPFQLFVEETSGAAKGVLTQALGPWKRPVAYLSKRLDPVAAGWPRCLRAIAAAALLTREASKLTFGQDIEITSSHNLESLLRSPPDKWLTNARITQYQVLLLDPPRVRFKQTAALNPATLLPETDDTLPIHHCLDTLDSLTSTRPDLTDQPLAQAEATLFTDGSSYIRDGKRYAGAAVVTLDSVIWAEPLPIGTSAQKAELIALTKALEWSKDKSVNIYTDSRYAFATLHVHGMIYRERGWLTAGGKAIKNAPEILALLTAVWLPKRVAVMHCKGHQKDDAPTSTGNRRADEVAREVAIRPLSTQATISAGKRTADGSEFEKRTADGSEFESPKKKAKVE

SEQ ID NO: 1417 - protein, 2090 aa, synthetic construct
MPAAKRVKLDGGDKKYSIGLDIGTNSVGWAVITDEYKVPSKKFKVLGNTDRHSIKKNLIGALLFDSGETAEATRLKRTARRRYTRRKNRICYLQEIFSNEMAKVDDSFFHRLEESFLVEEDKKHERHPIFGNIVDEVAYHEKYPTIYHLRKKLVDSTDKADLRLIYLALAHMIKFRGHFLIEGDLNPDNSDVDKLFIQLVQTYNQLFEENPINASGVDAKAILSARLSKSRRLENLIAQLPGEKKNGLFGNLIALSLGLTPNFKSNFDLAEDAKLQLSKDTYDDDLDNLLAQIGDQYADLFLAAKNLSDAILLSDILRVNTEITKAPLSASMIKRYDEHHQDLTLLKALVRQQLPEKYKEIFFDQSKNGYAGYIDGGASQEEFYKFIKPILEKMDGTEELLVKLNREDLLRKQRTFDNGSIPHQIHLGELHAILRRQEDFYPFLKDNREKIEKILTFRIPYYVGPLARGNSRFAWMTRKSEETITPWNFEEVVDKGASAQSFIERMTNFDKNLPNEKVLPKHSLLYEYFTVYNELTKVKYVTEGMRKPAFLSGEQKKAIVDLLFKTNRKVTVKQLKEDYFKKIECFDSVEISGVEDRFNASLGTYHDLLKIIKDKDFLDNEENEDILEDIVLTLTLFEDREMIEERLKTYAHLFDDKVMKQLKRRRYTGWGRLSRKLINGIRDKQSGKTILDFLKSDGFANRNFMQLIHDDSLTFKEDIQKAQVSGQGDSLHEHIANLAGSPAIKKGILQTVKVVDELVKVMGRHKPENIVIEMARENQTTQKGQKNSRERMKRIEEGIKELGSQILKEHPVENTQLQNEKLYLYYLQNGRDMYVDQELDINRLSDYDVDHIVPQSFLKDDSIDNKVLTRSDKARGKSDNVPSEEVVKKMKNYWRQLLNAKLITQRKFDNLTKAERGGLSELDKAGFIKRQLVETRQITKHVAQILDSRMNTKYDENDKLIREVKVITLKSKLVSDFRKDFQFYKVREINNYHHAHDAYLNAVVGTALIKKYPKLESEFVYGDYKVYDVRKMIAKSEQEIGKATAKYFFYSNIMNFFKTEITLANGEIRKRPLIETNGETGEIVWDKGRDFATVRKVLSMPQVNIVKKTEVQTGGFSKESILPKRNSDKLIARKKDWDPKKYGGFDSPTVAYSVLVVAKVEKGKSKKLKSVKELLGITIMERSSFEKNPIDFLEAKGYKEVKKDLIIKLPKYSLFELENGRKRMLASAGELQKGNELALPSKYVNFLYLASHYEKLKGSPEDNEQKQLFVEQHKHYLDEIIEQISEFSKRVILADANLDKVLSAYNKHRDKPIREQAENIIHLFTLTNLGAPAAFKYFDTTIDRKRYTSTKEVLDATLIHQSITGLYETRIDLSQLGGDGGGSSGGTAPLEEEYRLFLEAPIQNVTLLEQWKREIPKVWAEINPPGLASTQAPIHVQLLSTALPVRVRQYPITLEAKRSLRETIRKFRAAGILRPVHSPWNTPLLPVRKSGTSEYRMVQDLREVNKRVETIHPTVPNPYTLLSLLPPDRIWYSVLDLKDAFFCIPLAPESQLIFAFEWADAEEGESGQLTWTRLPQGFKNSPTLFNEALNRDLQGFRLDHPSVSLLQYVDDLLIAADTQAACLSATRDLLMTLAELGYRVSGKKAQLCQEEVTYLGFKIHKGSRSLSNSRTQAILQIPVPKTKRQVREFLGKIGYCRLFIPGFAELAQPLYAATRPGNDPLVWGEKEEEAFQSLKLALTQPPALALPSLDKPFQLFVEETSGAAKGVLTQALGPWKRPVAYLSKRLDPVAAGWPRCLRAIAAAALLTREASKLTFGQDIEITSSHNLESLLRSPPDKWLTNARITQYQVLLLDPPRVRFKQTAALNPATLLPETDDTLPIHHCLDTLDSLTSTRPDLTDQPLAQAEATLFTDGSSYIRDGKRYAGAAVVTLDSVIWAEPLPIGTSAQKAELIALTKALEWSKDKSVNIYTDSRYAFATLHVHGMIYRERGWLTAGGKAIKNAPEILALLTAVWLPKRVAVMHCKGHQKDDAPTSTGNRRADEVAREVAIRPLSTQATISAGKRTADGSEFEKRTADGSEFESPKKKAKVE

SEQ ID NO: 1418 - protein, 2096 aa, synthetic construct
MPAAKRVKLDGGDKKYSIGLDIGTNSVGWAVITDEYKVPSKKFKVLGNTDRHSIKKNLIGALLFDSGETAEATRLKRTARRRYTRRKNRICYLQEIFSNEMAKVDDSFFHRLEESFLVEEDKKHERHPIFGNIVDEVAYHEKYPTIYHLRKKLVDSTDKADLRLIYLALAHMIKFRGHFLIEGDLNPDNSDVDKLFIQLVQTYNQLFEENPINASGVDAKAILSARLSKSRRLENLIAQLPGEKKNGLFGNLIALSLGLTPNFKSNFDLAEDAKLQLSKDTYDDDLDNLLAQIGDQYADLFLAAKNLSDAILLSDILRVNTEITKAPLSASMIKRYDEHHQDLTLLKALVRQQLPEKYKEIFFDQSKNGYAGYIDGGASQEEFYKFIKPILEKMDGTEELLVKLNREDLLRKQRTFDNGSIPHQIHLGELHAILRRQEDFYPFLKDNREKIEKILTFRIPYYVGPLARGNSRFAWMTRKSEETITPWNFEEVVDKGASAQSFIERMTNFDKNLPNEKVLPKHSLLYEYFTVYNELTKVKYVTEGMRKPAFLSGEQKKAIVDLLFKTNRKVTVKQLKEDYFKKIECFDSVEISGVEDRFNASLGTYHDLLKIIKDKDFLDNEENEDILEDIVLTLTLFEDREMIEERLKTYAHLFDDKVMKQLKRRRYTGWGRLSRKLINGIRDKQSGKTILDFLKSDGFANRNFMQLIHDDSLTFKEDIQKAQVSGQGDSLHEHIANLAGSPAIKKGILQTVKVVDELVKVMGRHKPENIVIEMARENQTTQKGQKNSRERMKRIEEGIKELGSQILKEHPVENTQLQNEKLYLYYLQNGRDMYVDQELDINRLSDYDVDHIVPQSFLKDDSIDNKVLTRSDKARGKSDNVPSEEVVKKMKNYWRQLLNAKLITQRKFDNLTKAERGGLSELDKAGFIKRQLVETRQITKHVAQILDSRMNTKYDENDKLIREVKVITLKSKLVSDFRKDFQFYKVREINNYHHAHDAYLNAVVGTALIKKYPKLESEFVYGDYKVYDVRKMIAKSEQEIGKATAKYFFYSNIMNFFKTEITLANGEIRKRPLIETNGETGEIVWDKGRDFATVRKVLSMPQVNIVKKTEVQTGGFSKESILPKRNSDKLIARKKDWDPKKYGGFDSPTVAYSVLVVAKVEKGKSKKLKSVKELLGITIMERSSFEKNPIDFLEAKGYKEVKKDLIIKLPKYSLFELENGRKRMLASAGELQKGNELALPSKYVNFLYLASHYEKLKGSPEDNEQKQLFVEQHKHYLDEIIEQISEFSKRVILADANLDKVLSAYNKHRDKPIREQAENIIHLFTLTNLGAPAAFKYFDTTIDRKRYTSTKEVLDATLIHQSITGLYETRIDLSQLGGDGGGGSGSSGGGGGTAPLEEEYRLFLEAPIQNVTLLEQWKREIPKVWAEINPPGLASTQAPIHVQLLSTALPVRVRQYPITLEAKRSLRETIRKFRAAGILRPVHSPWNTPLLPVRKSGTSEYRMVQDLREVNKRVETIHPTVPNPYTLLSLLPPDRIWYSVLDLKDAFFCIPLAPESQLIFAFEWADAEEGESGQLTWTRLPQGFKNSPTLFNEALNRDLQGFRLDHPSVSLLQYVDDLLIAADTQAACLSATRDLLMTLAELGYRVSGKKAQLCQEEVTYLGFKIHKGSRSLSNSRTQAILQIPVPKTKRQVREFLGKIGYCRLFIPGFAELAQPLYAATRPGNDPLVWGEKEEEAFQSLKLALTQPPALALPSLDKPFQLFVEETSGAAKGVLTQALGPWKRPVAYLSKRLDPVAAGWPRCLRAIAAAALLTREASKLTFGQDIEITSSHNLESLLRSPPDKWLTNARITQYQVLLLDPPRVRFKQTAALNPATLLPETDDTLPIHHCLDTLDSLTSTRPDLTDQPLAQAEATLFTDGSSYIRDGKRYAGAAVVTLDSVIWAEPLPIGTSAQKAELIALTKALEWSKDKSVNIYTDSRYAFATLHVHGMIYRERGWLTAGGKAIKNAPEILALLTAVWLPKRVAVMHCKGHQKDDAPTSTGNRRADEVAREVAIRPLSTQATISAGKRTADGSEFEKRTADGSEFESPKKKAKVE

SEQ ID NO: 1419 - protein, 2098 aa, synthetic construct
MPAAKRVKLDGGDKKYSIGLDIGTNSVGWAVITDEYKVPSKKFKVLGNTDRHSIKKNLIGALLFDSGETAEATRLKRTARRRYTRRKNRICYLQEIFSNEMAKVDDSFFHRLEESFLVEEDKKHERHPIFGNIVDEVAYHEKYPTIYHLRKKLVDSTDKADLRLIYLALAHMIKFRGHFLIEGDLNPDNSDVDKLFIQLVQTYNQLFEENPINASGVDAKAILSARLSKSRRLENLIAQLPGEKKNGLFGNLIALSLGLTPNFKSNFDLAEDAKLQLSKDTYDDDLDNLLAQIGDQYADLFLAAKNLSDAILLSDILRVNTEITKAPLSASMIKRYDEHHQDLTLLKALVRQQLPEKYKEIFFDQSKNGYAGYIDGGASQEEFYKFIKPILEKMDGTEELLVKLNREDLLRKQRTFDNGSIPHQIHLGELHAILRRQEDFYPFLKDNREKIEKILTFRIPYYVGPLARGNSRFAWMTRKSEETITPWNFEEVVDKGASAQSFIERMTNFDKNLPNEKVLPKHSLLYEYFTVYNELTKVKYVTEGMRKPAFLSGEQKKAIVDLLFKTNRKVTVKQLKEDYFKKIECFDSVEISGVEDRFNASLGTYHDLLKIIKDKDFLDNEENEDILEDIVLTLTLFEDREMIEERLKTYAHLFDDKVMKQLKRRRYTGWGRLSRKLINGIRDKQSGKTILDFLKSDGFANRNFMQLIHDDSLTFKEDIQKAQVSGQGDSLHEHIANLAGSPAIKKGILQTVKVVDELVKVMGRHKPENIVIEMARENQTTQKGQKNSRERMKRIEEGIKELGSQILKEHPVENTQLQNEKLYLYYLQNGRDMYVDQELDINRLSDYDVDHIVPQSFLKDDSIDNKVLTRSDKARGKSDNVPSEEVVKKMKNYWRQLLNAKLITQRKFDNLTKAERGGLSELDKAGFIKRQLVETRQITKHVAQILDSRMNTKYDENDKLIREVKVITLKSKLVSDFRKDFQFYKVREINNYHHAHDAYLNAVVGTALIKKYPKLESEFVYGDYKVYDVRKMIAKSEQEIGKATAKYFFYSNIMNFFKTEITLANGEIRKRPLIETNGETGEIVWDKGRDFATVRKVLSMPQVNIVKKTEVQTGGFSKESILPKRNSDKLIARKKDWDPKKYGGFDSPTVAYSVLVVAKVEKGKSKKLKSVKELLGITIMERSSFEKNPIDFLEAKGYKEVKKDLIIKLPKYSLFELENGRKRMLASAGELQKGNELALPSKYVNFLYLASHYEKLKGSPEDNEQKQLFVEQHKHYLDEIIEQISEFSKRVILADANLDKVLSAYNKHRDKPIREQAENIIHLFTLTNLGAPAAFKYFDTTIDRKRYTSTKEVLDATLIHQSITGLYETRIDLSQLGGDGGEAAAKGSSGGGGGTAPLEEEYRLFLEAPIQNVTLLEQWKREIPKVWAEINPPGLASTQAPIHVQLLSTALPVRVRQYPITLEAKRSLRETIRKFRAAGILRPVHSPWNTPLLPVRKSGTSEYRMVQDLREVNKRVETIHPTVPNPYTLLSLLPPDRIWYSVLDLKDAFFCIPLAPESQLIFAFEWADAEEGESGQLTWTRLPQGFKNSPTLFNEALNRDLQGFRLDHPSVSLLQYVDDLLIAADTQAACLSATRDLLMTLAELGYRVSGKKAQLCQEEVTYLGFKIHKGSRSLSNSRTQAILQIPVPKTKRQVREFLGKIGYCRLFIPGFAELAQPLYAATRPGNDPLVWGEKEEEAFQSLKLALTQPPALALPSLDKPFQLFVEETSGAAKGVLTQALGPWKRPVAYLSKRLDPVAAGWPRCLRAIAAAALLTREASKLTFGQDIEITSSHNLESLLRSPPDKWLTNARITQYQVLLLDPPRVRFKQTAALNPATLLPETDDTLPIHHCLDTLDSLTSTRPDLTDQPLAQAEATLFTDGSSYIRDGKRYAGAAVVTLDSVIWAEPLPIGTSAQKAELIALTKALEWSKDKSVNIYTDSRYAFATLHVHGMIYRERGWLTAGGKAIKNAPEILALLTAVWLPKRVAVMHCKGHQKDDAPTSTGNRRADEVAREVAIRPLSTQATISAGKRTADGSEFEKRTADGSEFESPKKKAKVE

SEQ ID NO: 1420 - protein, 2096 aa, synthetic construct
MPAAKRVKLDGGDKKYSIGLDIGTNSVGWAVITDEYKVPSKKFKVLGNTDRHSIKKNLIGALLFDSGETAEATRLKRTARRRYTRRKNRICYLQEIFSNEMAKVDDSFFHRLEESFLVEEDKKHERHPIFGNIVDEVAYHEKYPTIYHLRKKLVDSTDKADLRLIYLALAHMIKFRGHFLIEGDLNPDNSDVDKLFIQLVQTYNQLFEENPINASGVDAKAILSARLSKSRRLENLIAQLPGEKKNGLFGNLIALSLGLTPNFKSNFDLAEDAKLQLSKDTYDDDLDNLLAQIGDQYADLFLAAKNLSDAILLSDILRVNTEITKAPLSASMIKRYDEHHQDLTLLKALVRQQLPEKYKEIFFDQSKNGYAGYIDGGASQEEFYKFIKPILEKMDGTEELLVKLNREDLLRKQRTFDNGSIPHQIHLGELHAILRRQEDFYPFLKDNREKIEKILTFRIPYYVGPLARGNSRFAWMTRKSEETITPWNFEEVVDKGASAQSFIERMTNFDKNLPNEKVLPKHSLLYEYFTVYNELTKVKYVTEGMRKPAFLSGEQKKAIVDLLFKTNRKVTVKQLKEDYFKKIECFDSVEISGVEDRFNASLGTYHDLLKIIKDKDFLDNEENEDILEDIVLTLTLFEDREMIEERLKTYAHLFDDKVMKQLKRRRYTGWGRLSRKLINGIRDKQSGKTILDFLKSDGFANRNFMQLIHDDSLTFKEDIQKAQVSGQGDSLHEHIANLAGSPAIKKGILQTVKVVDELVKVMGRHKPENIVIEMARENQTTQKGQKNSRERMKRIEEGIKELGSQILKEHPVENTQLQNEKLYLYYLQNGRDMYVDQELDINRLSDYDVDHIVPQSFLKDDSIDNKVLTRSDKARGKSDNVPSEEVVKKMKNYWRQLLNAKLITQRKFDNLTKAERGGLSELDKAGFIKRQLVETRQITKHVAQILDSRMNTKYDENDKLIREVKVITLKSKLVSDFRKDFQFYKVREINNYHHAHDAYLNAVVGTALIKKYPKLESEFVYGDYKVYDVRKMIAKSEQEIGKATAKYFFYSNIMNFFKTEITLANGEIRKRPLIETNGETGEIVWDKGRDFATVRKVLSMPQVNIVKKTEVQTGGFSKESILPKRNSDKLIARKKDWDPKKYGGFDSPTVAYSVLVVAKVEKGKSKKLKSVKELLGITIMERSSFEKNPIDFLEAKGYKEVKKDLIIKLPKYSLFELENGRKRMLASAGELQKGNELALPSKYVNFLYLASHYEKLKGSPEDNEQKQLFVEQHKHYLDEIIEQISEFSKRVILADANLDKVLSAYNKHRDKPIREQAENIIHLFTLTNLGAPAAFKYFDTTIDRKRYTSTKEVLDATLIHQSITGLYETRIDLSQLGGDGGGGGGSSGGSGGTAPLEEEYRLFLEAPIQNVTLLEQWKREIPKVWAEINPPGLASTQAPIHVQLLSTALPVRVRQYPITLEAKRSLRETIRKFRAAGILRPVHSPWNTPLLPVRKSGTSEYRMVQDLREVNKRVETIHPTVPNPYTLLSLLPPDRIWYSVLDLKDAFFCIPLAPESQLIFAFEWADAEEGESGQLTWTRLPQGFKNSPTLFNEALNRDLQGFRLDHPSVSLLQYVDDLLIAADTQAACLSATRDLLMTLAELGYRVSGKKAQLCQEEVTYLGFKIHKGSRSLSNSRTQAILQIPVPKTKRQVREFLGKIGYCRLFIPGFAELAQPLYAATRPGNDPLVWGEKEEEAFQSLKLALTQPPALALPSLDKPFQLFVEETSGAAKGVLTQALGPWKRPVAYLSKRLDPVAAGWPRCLRAIAAAALLTREASKLTFGQDIEITSSHNLESLLRSPPDKWLTNARITQYQVLLLDPPRVRFKQTAALNPATLLPETDDTLPIHHCLDTLDSLTSTRPDLTDQPLAQAEATLFTDGSSYIRDGKRYAGAAVVTLDSVIWAEPLPIGTSAQKAELIALTKALEWSKDKSVNIYTDSRYAFATLHVHGMIYRERGWLTAGGKAIKNAPEILALLTAVWLPKRVAVMHCKGHQKDDAPTSTGNRRADEVAREVAIRPLSTQATISAGKRTADGSEFEKRTADGSEFESPKKKAKVE

SEQ ID NO: 1421 - protein, 2100 aa, synthetic construct
MPAAKRVKLDGGDKKYSIGLDIGTNSVGWAVITDEYKVPSKKFKVLGNTDRHSIKKNLIGALLFDSGETAEATRLKRTARRRYTRRKNRICYLQEIFSNEMAKVDDSFFHRLEESFLVEEDKKHERHPIFGNIVDEVAYHEKYPTIYHLRKKLVDSTDKADLRLIYLALAHMIKFRGHFLIEGDLNPDNSDVDKLFIQLVQTYNQLFEENPINASGVDAKAILSARLSKSRRLENLIAQLPGEKKNGLFGNLIALSLGLTPNFKSNFDLAEDAKLQLSKDTYDDDLDNLLAQIGDQYADLFLAAKNLSDAILLSDILRVNTEITKAPLSASMIKRYDEHHQDLTLLKALVRQQLPEKYKEIFFDQSKNGYAGYIDGGASQEEFYKFIKPILEKMDGTEELLVKLNREDLLRKQRTFDNGSIPHQIHLGELHAILRRQEDFYPFLKDNREKIEKILTFRIPYYVGPLARGNSRFAWMTRKSEETITPWNFEEVVDKGASAQSFIERMTNFDKNLPNEKVLPKHSLLYEYFTVYNELTKVKYVTEGMRKPAFLSGEQKKAIVDLLFKTNRKVTVKQLKEDYFKKIECFDSVEISGVEDRFNASLGTYHDLLKIIKDKDFLDNEENEDILEDIVLTLTLFEDREMIEERLKTYAHLFDDKVMKQLKRRRYTGWGRLSRKLINGIRDKQSGKTILDFLKSDGFANRNFMQLIHDDSLTFKEDIQKAQVSGQGDSLHEHIANLAGSPAIKKGILQTVKVVDELVKVMGRHKPENIVIEMARENQTTQKGQKNSRERMKRIEEGIKELGSQILKEHPVENTQLQNEKLYLYYLQNGRDMYVDQELDINRLSDYDVDHIVPQSFLKDDSIDNKVLTRSDKARGKSDNVPSEEVVKKMKNYWRQLLNAKLITQRKFDNLTKAERGGLSELDKAGFIKRQLVETRQITKHVAQILDSRMNTKYDENDKLIREVKVITLKSKLVSDFRKDFQFYKVREINNYHHAHDAYLNAVVGTALIKKYPKLESEFVYGDYKVYDVRKMIAKSEQEIGKATAKYFFYSNIMNFFKTEITLANGEIRKRPLIETNGETGEIVWDKGRDFATVRKVLSMPQVNIVKKTEVQTGGFSKESILPKRNSDKLIARKKDWDPKKYGGFDSPTVAYSVLVVAKVEKGKSKKLKSVKELLGITIMERSSFEKNPIDFLEAKGYKEVKKDLIIKLPKYSLFELENGRKRMLASAGELQKGNELALPSKYVNFLYLASHYEKLKGSPEDNEQKQLFVEQHKHYLDEIIEQISEFSKRVILADANLDKVLSAYNKHRDKPIREQAENIIHLFTLTNLGAPAAFKYFDTTIDRKRYTSTKEVLDATLIHQSITGLYETRIDLSQLGGDGGPAPAPAPAPAPAPGGTAPLEEEYRLFLEAPIQNVTLLEQWKREIPKVWAEINPPGLASTQAPIHVQLLSTALPVRVRQYPITLEAKRSLRETIRKFRAAGILRPVHSPWNTPLLPVRKSGTSEYRMVQDLREVNKRVETIHPTVPNPYTLLSLLPPDRIWYSVLDLKDAFFCIPLAPESQLIFAFEWADAEEGESGQLTWTRLPQGFKNSPTLFNEALNRDLQGFRLDHPSVSLLQYVDDLLIAADTQAACLSATRDLLMTLAELGYRVSGKKAQLCQEEVTYLGFKIHKGSRSLSNSRTQAILQIPVPKTKRQVREFLGKIGYCRLFIPGFAELAQPLYAATRPGNDPLVWGEKEEEAFQSLKLALTQPPALALPSLDKPFQLFVEETSGAAKGVLTQALGPWKRPVAYLSKRLDPVAAGWPRCLRAIAAAALLTREASKLTFGQDIEITSSHNLESLLRSPPDKWLTNARITQYQVLLLDPPRVRFKQTAALNPATLLPETDDTLPIHHCLDTLDSLTSTRPDLTDQPLAQAEATLFTDGSSYIRDGKRYAGAAVVTLDSVIWAEPLPIGTSAQKAELIALTKALEWSKDKSVNIYTDSRYAFATLHVHGMIYRERGWLTAGGKAIKNAPEILALLTAVWLPKRVAVMHCKGHQKDDAPTSTGNRRADEVAREVAIRPLSTQATISAGKRTADGSEFEKRTADGSEFESPKKKAKVE

SEQ ID NO: 1422 - protein, 2095 aa, synthetic construct
MPAAKRVKLDGGDKKYSIGLDIGTNSVGWAVITDEYKVPSKKFKVLGNTDRHSIKKNLIGALLFDSGETAEATRLKRTARRRYTRRKNRICYLQEIFSNEMAKVDDSFFHRLEESFLVEEDKKHERHPIFGNIVDEVAYHEKYPTIYHLRKKLVDSTDKADLRLIYLALAHMIKFRGHFLIEGDLNPDNSDVDKLFIQLVQTYNQLFEENPINASGVDAKAILSARLSKSRRLENLIAQLPGEKKNGLFGNLIALSLGLTPNFKSNFDLAEDAKLQLSKDTYDDDLDNLLAQIGDQYADLFLAAKNLSDAILLSDILRVNTEITKAPLSASMIKRYDEHHQDLTLLKALVRQQLPEKYKEIFFDQSKNGYAGYIDGGASQEEFYKFIKPILEKMDGTEELLVKLNREDLLRKQRTFDNGSIPHQIHLGELHAILRRQEDFYPFLKDNREKIEKILTFRIPYYVGPLARGNSRFAWMTRKSEETITPWNFEEVVDKGASAQSFIERMTNFDKNLPNEKVLPKHSLLYEYFTVYNELTKVKYVTEGMRKPAFLSGEQKKAIVDLLFKTNRKVTVKQLKEDYFKKIECFDSVEISGVEDRFNASLGTYHDLLKIIKDKDFLDNEENEDILEDIVLTLTLFEDREMIEERLKTYAHLFDDKVMKQLKRRRYTGWGRLSRKLINGIRDKQSGKTILDFLKSDGFANRNFMQLIHDDSLTFKEDIQKAQVSGQGDSLHEHIANLAGSPAIKKGILQTVKVVDELVKVMGRHKPENIVIEMARENQTTQKGQKNSRERMKRIEEGIKELGSQILKEHPVENTQLQNEKLYLYYLQNGRDMYVDQELDINRLSDYDVDHIVPQSFLKDDSIDNKVLTRSDKARGKSDNVPSEEVVKKMKNYWRQLLNAKLITQRKFDNLTKAERGGLSELDKAGFIKRQLVETRQITKHVAQILDSRMNTKYDENDKLIREVKVITLKSKLVSDFRKDFQFYKVREINNYHHAHDAYLNAVVGTALIKKYPKLESEFVYGDYKVYDVRKMIAKSEQEIGKATAKYFFYSNIMNFFKTEITLANGEIRKRPLIETNGETGEIVWDKGRDFATVRKVLSMPQVNIVKKTEVQTGGFSKESILPKRNSDKLIARKKDWDPKKYGGFDSPTVAYSVLVVAKVEKGKSKKLKSVKELLGITIMERSSFEKNPIDFLEAKGYKEVKKDLIIKLPKYSLFELENGRKRMLASAGELQKGNELALPSKYVNFLYLASHYEKLKGSPEDNEQKQLFVEQHKHYLDEIIEQISEFSKRVILADANLDKVLSAYNKHRDKPIREQAENIIHLFTLTNLGAPAAFKYFDTTIDRKRYTSTKEVLDATLIHQSITGLYETRIDLSQLGGDGGEAAAKGGGGGTAPLEEEYRLFLEAPIQNVTLLEQWKREIPKVWAEINPPGLASTQAPIHVQLLSTALPVRVRQYPITLEAKRSLRETIRKFRAAGILRPVHSPWNTPLLPVRKSGTSEYRMVQDLREVNKRVETIHPTVPNPYTLLSLLPPDRIWYSVLDLKDAFFCIPLAPESQLIFAFEWADAEEGESGQLTWTRLPQGFKNSPTLFNEALNRDLQGFRLDHPSVSLLQYVDDLLIAADTQAACLSATRDLLMTLAELGYRVSGKKAQLCQEEVTYLGFKIHKGSRSLSNSRTQAILQIPVPKTKRQVREFLGKIGYCRLFIPGFAELAQPLYAATRPGNDPLVWGEKEEEAFQSLKLALTQPPALALPSLDKPFQLFVEETSGAAKGVLTQALGPWKRPVAYLSKRLDPVAAGWPRCLRAIAAAALLTREASKLTFGQDIEITSSHNLESLLRSPPDKWLTNARITQYQVLLLDPPRVRFKQTAALNPATLLPETDDTLPIHHCLDTLDSLTSTRPDLTDQPLAQAEATLFTDGSSYIRDGKRYAGAAVVTLDSVIWAEPLPIGTSAQKAELIALTKALEWSKDKSVNIYTDSRYAFATLHVHGMIYRERGWLTAGGKAIKNAPEILALLTAVWLPKRVAVMHCKGHQKDDAPTSTGNRRADEVAREVAIRPLSTQATISAGKRTADGSEFEKRTADGSEFESPKKKAKVE

SEQ ID NO: 1423 - protein, 2097 aa, synthetic construct
MPAAKRVKLDGGDKKYSIGLDIGTNSVGWAVITDEYKVPSKKFKVLGNTDRHSIKKNLIGALLFDSGETAEATRLKRTARRRYTRRKNRICYLQEIFSNEMAKVDDSFFHRLEESFLVEEDKKHERHPIFGNIVDEVAYHEKYPTIYHLRKKLVDSTDKADLRLIYLALAHMIKFRGHFLIEGDLNPDNSDVDKLFIQLVQTYNQLFEENPINASGVDAKAILSARLSKSRRLENLIAQLPGEKKNGLFGNLIALSLGLTPNFKSNFDLAEDAKLQLSKDTYDDDLDNLLAQIGDQYADLFLAAKNLSDAILLSDILRVNTEITKAPLSASMIKRYDEHHQDLTLLKALVRQQLPEKYKEIFFDQSKNGYAGYIDGGASQEEFYKFIKPILEKMDGTEELLVKLNREDLLRKQRTFDNGSIPHQIHLGELHAILRRQEDFYPFLKDNREKIEKILTFRIPYYVGPLARGNSRFAWMTRKSEETITPWNFEEVVDKGASAQSFIERMTNFDKNLPNEKVLPKHSLLYEYFTVYNELTKVKYVTEGMRKPAFLSGEQKKAIVDLLFKTNRKVTVKQLKEDYFKKIECFDSVEISGVEDRFNASLGTYHDLLKIIKDKDFLDNEENEDILEDIVLTLTLFEDREMIEERLKTYAHLFDDKVMKQLKRRRYTGWGRLSRKLINGIRDKQSGKTILDFLKSDGFANRNFMQLIHDDSLTFKEDIQKAQVSGQGDSLHEHIANLAGSPAIKKGILQTVKVVDELVKVMGRHKPENIVIEMARENQTTQKGQKNSRERMKRIEEGIKELGSQILKEHPVENTQLQNEKLYLYYLQNGRDMYVDQELDINRLSDYDVDHIVPQSFLKDDSIDNKVLTRSDKARGKSDNVPSEEVVKKMKNYWRQLLNAKLITQRKFDNLTKAERGGLSELDKAGFIKRQLVETRQITKHVAQILDSRMNTKYDENDKLIREVKVITLKSKLVSDFRKDFQFYKVREINNYHHAHDAYLNAVVGTALIKKYPKLESEFVYGDYKVYDVRKMIAKSEQEIGKATAKYFFYSNIMNFFKTEITLANGEIRKRPLIETNGETGEIVWDKGRDFATVRKVLSMPQVNIVKKTEVQTGGFSKESILPKRNSDKLIARKKDWDPKKYGGFDSPTVAYSVLVVAKVEKGKSKKLKSVKELLGITIMERSSFEKNPIDFLEAKGYKEVKKDLIIKLPKYSLFELENGRKRMLASAGELQKGNELALPSKYVNFLYLASHYEKLKGSPEDNEQKQLFVEQHKHYLDEIIEQISEFSKRVILADANLDKVLSAYNKHRDKPIREQAENIIHLFTLTNLGAPAAFKYFDTTIDRKRYTSTKEVLDATLIHQSITGLYETRIDLSQLGGDGGGGGGSGGGGSGGTAPLEEEYRLFLEAPIQNVTLLEQWKREIPKVWAEINPPGLASTQAPIHVQLLSTALPVRVRQYPITLEAKRSLRETIRKFRAAGILRPVHSPWNTPLLPVRKSGTSEYRMVQDLREVNKRVETIHPTVPNPYTLLSLLPPDRIWYSVLDLKDAFFCIPLAPESQLIFAFEWADAEEGESGQLTWTRLPQGFKNSPTLFNEALNRDLQGFRLDHPSVSLLQYVDDLLIAADTQAACLSATRDLLMTLAELGYRVSGKKAQLCQEEVTYLGFKIHKGSRSLSNSRTQAILQIPVPKTKRQVREFLGKIGYCRLFIPGFAELAQPLYAATRPGNDPLVWGEKEEEAFQSLKLALTQPPALALPSLDKPFQLFVEETSGAAKGVLTQALGPWKRPVAYLSKRLDPVAAGWPRCLRAIAAAALLTREASKLTFGQDIEITSSHNLESLLRSPPDKWLTNARITQYQVLLLDPPRVRFKQTAALNPATLLPETDDTLPIHHCLDTLDSLTSTRPDLTDQPLAQAEATLFTDGSSYIRDGKRYAGAAVVTLDSVIWAEPLPIGTSAQKAELIALTKALEWSKDKSVNIYTDSRYAFATLHVHGMIYRERGWLTAGGKAIKNAPEILALLTAVWLPKRVAVMHCKGHQKDDAPTSTGNRRADEVAREVAIRPLSTQATISAGKRTADGSEFEKRTADGSEFESPKKKAKVE

SEQ ID NO: 1424 - protein, 2098 aa, synthetic construct
MPAAKRVKLDGGDKKYSIGLDIGTNSVGWAVITDEYKVPSKKFKVLGNTDRHSIKKNLIGALLFDSGETAEATRLKRTARRRYTRRKNRICYLQEIFSNEMAKVDDSFFHRLEESFLVEEDKKHERHPIFGNIVDEVAYHEKYPTIYHLRKKLVDSTDKADLRLIYLALAHMIKFRGHFLIEGDLNPDNSDVDKLFIQLVQTYNQLFEENPINASGVDAKAILSARLSKSRRLENLIAQLPGEKKNGLFGNLIALSLGLTPNFKSNFDLAEDAKLQLSKDTYDDDLDNLLAQIGDQYADLFLAAKNLSDAILLSDILRVNTEITKAPLSASMIKRYDEHHQDLTLLKALVRQQLPEKYKEIFFDQSKNGYAGYIDGGASQEEFYKFIKPILEKMDGTEELLVKLNREDLLRKQRTFDNGSIPHQIHLGELHAILRRQEDFYPFLKDNREKIEKILTFRIPYYVGPLARGNSRFAWMTRKSEETITPWNFEEVVDKGASAQSFIERMTNFDKNLPNEKVLPKHSLLYEYFTVYNELTKVKYVTEGMRKPAFLSGEQKKAIVDLLFKTNRKVTVKQLKEDYFKKIECFDSVEISGVEDRFNASLGTYHDLLKIIKDKDFLDNEENEDILEDIVLTLTLFEDREMIEERLKTYAHLFDDKVMKQLKRRRYTGWGRLSRKLINGIRDKQSGKTILDFLKSDGFANRNFMQLIHDDSLTFKEDIQKAQVSGQGDSLHEHIANLAGSPAIKKGILQTVKVVDELVKVMGRHKPENIVIEMARENQTTQKGQKNSRERMKRIEEGIKELGSQILKEHPVENTQLQNEKLYLYYLQNGRDMYVDQELDINRLSDYDVDHIVPQSFLKDDSIDNKVLTRSDKARGKSDNVPSEEVVKKMKNYWRQLLNAKLITQRKFDNLTKAERGGLSELDKAGFIKRQLVETRQITKHVAQILDSRMNTKYDENDKLIREVKVITLKSKLVSDFRKDFQFYKVREINNYHHAHDAYLNAVVGTALIKKYPKLESEFVYGDYKVYDVRKMIAKSEQEIGKATAKYFFYSNIMNFFKTEITLANGEIRKRPLIETNGETGEIVWDKGRDFATVRKVLSMPQVNIVKKTEVQTGGFSKESILPKRNSDKLIARKKDWDPKKYGGFDSPTVAYSVLVVAKVEKGKSKKLKSVKELLGITIMERSSFEKNPIDFLEAKGYKEVKKDLIIKLPKYSLFELENGRKRMLASAGELQKGNELALPSKYVNFLYLASHYEKLKGSPEDNEQKQLFVEQHKHYLDEIIEQISEFSKRVILADANLDKVLSAYNKHRDKPIREQAENIIHLFTLTNLGAPAAFKYFDTTIDRKRYTSTKEVLDATLIHQSITGLYETRIDLSQLGGDGGGSSGGGEAAAKGGTAPLEEEYRLFLEAPIQNVTLLEQWKREIPKVWAEINPPGLASTQAPIHVQLLSTALPVRVRQYPITLEAKRSLRETIRKFRAAGILRPVHSPWNTPLLPVRKSGTSEYRMVQDLREVNKRVETIHPTVPNPYTLLSLLPPDRIWYSVLDLKDAFFCIPLAPESQLIFAFEWADAEEGESGQLTWTRLPQGFKNSPTLFNEALNRDLQGFRLDHPSVSLLQYVDDLLIAADTQAACLSATRDLLMTLAELGYRVSGKKAQLCQEEVTYLGFKIHKGSRSLSNSRTQAILQIPVPKTKRQVREFLGKIGYCRLFIPGFAELAQPLYAATRPGNDPLVWGEKEEEAFQSLKLALTQPPALALPSLDKPFQLFVEETSGAAKGVLTQALGPWKRPVAYLSKRLDPVAAGWPRCLRAIAAAALLTREASKLTFGQDIEITSSHNLESLLRSPPDKWLTNARITQYQVLLLDPPRVRFKQTAALNPATLLPETDDTLPIHHCLDTLDSLTSTRPDLTDQPLAQAEATLFTDGSSYIRDGKRYAGAAVVTLDSVIWAEPLPIGTSAQKAELIALTKALEWSKDKSVNIYTDSRYAFATLHVHGMIYRERGWLTAGGKAIKNAPEILALLTAVWLPKRVAVMHCKGHQKDDAPTSTGNRRADEVAREVAIRPLSTQATISAGKRTADGSEFEKRTADGSEFESPKKKAKVE

SEQ ID NO: 1425 - protein, 2098 aa, synthetic construct
MPAAKRVKLDGGDKKYSIGLDIGTNSVGWAVITDEYKVPSKKFKVLGNTDRHSIKKNLIGALLFDSGETAEATRLKRTARRRYTRRKNRICYLQEIFSNEMAKVDDSFFHRLEESFLVEEDKKHERHPIFGNIVDEVAYHEKYPTIYHLRKKLVDSTDKADLRLIYLALAHMIKFRGHFLIEGDLNPDNSDVDKLFIQLVQTYNQLFEENPINASGVDAKAILSARLSKSRRLENLIAQLPGEKKNGLFGNLIALSLGLTPNFKSNFDLAEDAKLQLSKDTYDDDLDNLLAQIGDQYADLFLAAKNLSDAILLSDILRVNTEITKAPLSASMIKRYDEHHQDLTLLKALVRQQLPEKYKEIFFDQSKNGYAGYIDGGASQEEFYKFIKPILEKMDGTEELLVKLNREDLLRKQRTFDNGSIPHQIHLGELHAILRRQEDFYPFLKDNREKIEKILTFRIPYYVGPLARGNSRFAWMTRKSEETITPWNFEEVVDKGASAQSFIERMTNFDKNLPNEKVLPKHSLLYEYFTVYNELTKVKYVTEGMRKPAFLSGEQKKAIVDLLFKTNRKVTVKQLKEDYFKKIECFDSVEISGVEDRFNASLGTYHDLLKIIKDKDFLDNEENEDILEDIVLTLTLFEDREMIEERLKTYAHLFDDKVMKQLKRRRYTGWGRLSRKLINGIRDKQSGKTILDFLKSDGFANRNFMQLIHDDSLTFKEDIQKAQVSGQGDSLHEHIANLAGSPAIKKGILQTVKVVDELVKVMGRHKPENIVIEMARENQTTQKGQKNSRERMKRIEEGIKELGSQILKEHPVENTQLQNEKLYLYYLQNGRDMYVDQELDINRLSDYDVDHIVPQSFLKDDSIDNKVLTRSDKARGKSDNVPSEEVVKKMKNYWRQLLNAKLITQRKFDNLTKAERGGLSELDKAGFIKRQLVETRQITKHVAQILDSRMNTKYDENDKLIREVKVITLKSKLVSDFRKDFQFYKVREINNYHHAHDAYLNAVVGTALIKKYPKLESEFVYGDYKVYDVRKMIAKSEQEIGKATAKYFFYSNIMNFFKTEITLANGEIRKRPLIETNGETGEIVWDKGRDFATVRKVLSMPQVNIVKKTEVQTGGFSKESILPKRNSDKLIARKKDWDPKKYGGFDSPTVAYSVLVVAKVEKGKSKKLKSVKELLGITIMERSSFEKNPIDFLEAKGYKEVKKDLIIKLPKYSLFELENGRKRMLASAGELQKGNELALPSKYVNFLYLASHYEKLKGSPEDNEQKQLFVEQHKHYLDEIIEQISEFSKRVILADANLDKVLSAYNKHRDKPIREQAENIIHLFTLTNLGAPAAFKYFDTTIDRKRYTSTKEVLDATLIHQSITGLYETRIDLSQLGGDGGGGSEAAAKGGGGGTAPLEEEYRLFLEAPIQNVTLLEQWKREIPKVWAEINPPGLASTQAPIHVQLLSTALPVRVRQYPITLEAKRSLRETIRKFRAAGILRPVHSPWNTPLLPVRKSGTSEYRMVQDLREVNKRVETIHPTVPNPYTLLSLLPPDRIWYSVLDLKDAFFCIPLAPESQLIFAFEWADAEEGESGQLTWTRLPQGFKNSPTLFNEALNRDLQGFRLDHPSVSLLQYVDDLLIAADTQAACLSATRDLLMTLAELGYRVSGKKAQLCQEEVTYLGFKIHKGSRSLSNSRTQAILQIPVPKTKRQVREFLGKIGYCRLFIPGFAELAQPLYAATRPGNDPLVWGEKEEEAFQSLKLALTQPPALALPSLDKPFQLFVEETSGAAKGVLTQALGPWKRPVAYLSKRLDPVAAGWPRCLRAIAAAALLTREASKLTFGQDIEITSSHNLESLLRSPPDKWLTNARITQYQVLLLDPPRVRFKQTAALNPATLLPETDDTLPIHHCLDTLDSLTSTRPDLTDQPLAQAEATLFTDGSSYIRDGKRYAGAAVVTLDSVIWAEPLPIGTSAQKAELIALTKALEWSKDKSVNIYTDSRYAFATLHVHGMIYRERGWLTAGGKAIKNAPEILALLTAVWLPKRVAVMHCKGHQKDDAPTSTGNRRADEVAREVAIRPLSTQATISAGKRTADGSEFEKRTADGSEFESPKKKAKVE

SEQ ID NO: 1426 - protein, 2117 aa, synthetic construct
MPAAKRVKLDGGDKKYSIGLDIGTNSVGWAVITDEYKVPSKKFKVLGNTDRHSIKKNLIGALLFDSGETAEATRLKRTARRRYTRRKNRICYLQEIFSNEMAKVDDSFFHRLEESFLVEEDKKHERHPIFGNIVDEVAYHEKYPTIYHLRKKLVDSTDKADLRLIYLALAHMIKFRGHFLIEGDLNPDNSDVDKLFIQLVQTYNQLFEENPINASGVDAKAILSARLSKSRRLENLIAQLPGEKKNGLFGNLIALSLGLTPNFKSNFDLAEDAKLQLSKDTYDDDLDNLLAQIGDQYADLFLAAKNLSDAILLSDILRVNTEITKAPLSASMIKRYDEHHQDLTLLKALVRQQLPEKYKEIFFDQSKNGYAGYIDGGASQEEFYKFIKPILEKMDGTEELLVKLNREDLLRKQRTFDNGSIPHQIHLGELHAILRRQEDFYPFLKDNREKIEKILTFRIPYYVGPLARGNSRFAWMTRKSEETITPWNFEEVVDKGASAQSFIERMTNFDKNLPNEKVLPKHSLLYEYFTVYNELTKVKYVTEGMRKPAFLSGEQKKAIVDLLFKTNRKVTVKQLKEDYFKKIECFDSVEISGVEDRFNASLGTYHDLLKIIKDKDFLDNEENEDILEDIVLTLTLFEDREMIEERLKTYAHLFDDKVMKQLKRRRYTGWGRLSRKLINGIRDKQSGKTILDFLKSDGFANRNFMQLIHDDSLTFKEDIQKAQVSGQGDSLHEHIANLAGSPAIKKGILQTVKVVDELVKVMGRHKPENIVIEMARENQTTQKGQKNSRERMKRIEEGIKELGSQILKEHPVENTQLQNEKLYLYYLQNGRDMYVDQELDINRLSDYDVDHIVPQSFLKDDSIDNKVLTRSDKARGKSDNVPSEEVVKKMKNYWRQLLNAKLITQRKFDNLTKAERGGLSELDKAGFIKRQLVETRQITKHVAQILDSRMNTKYDENDKLIREVKVITLKSKLVSDFRKDFQFYKVREINNYHHAHDAYLNAVVGTALIKKYPKLESEFVYGDYKVYDVRKMIAKSEQEIGKATAKYFFYSNIMNFFKTEITLANGEIRKRPLIETNGETGEIVWDKGRDFATVRKVLSMPQVNIVKKTEVQTGGFSKESILPKRNSDKLIARKKDWDPKKYGGFDSPTVAYSVLVVAKVEKGKSKKLKSVKELLGITIMERSSFEKNPIDFLEAKGYKEVKKDLIIKLPKYSLFELENGRKRMLASAGELQKGNELALPSKYVNFLYLASHYEKLKGSPEDNEQKQLFVEQHKHYLDEIIEQISEFSKRVILADANLDKVLSAYNKHRDKPIREQAENIIHLFTLTNLGAPAAFKYFDTTIDRKRYTSTKEVLDATLIHQSITGLYETRIDLSQLGGDGGEAAAKEAAAKEAAAKEAAAKEAAAKEAAAKGGTAPLEEEYRLFLEAPIQNVTLLEQWKREIPKVWAEINPPGLASTQAPIHVQLLSTALPVRVRQYPITLEAKRSLRETIRKFRAAGILRPVHSPWNTPLLPVRKSGTSEYRMVQDLREVNKRVETIHPTVPNPYTLLSLLPPDRIWYSVLDLKDAFFCIPLAPESQLIFAFEWADAEEGESGQLTWTRLPQGFKNSPTLFNEALNRDLQGFRLDHPSVSLLQYVDDLLIAADTQAACLSATRDLLMTLAELGYRVSGKKAQLCQEEVTYLGFKIHKGSRSLSNSRTQAILQIPVPKTKRQVREFLGKIGYCRLFIPGFAELAQPLYAATRPGNDPLVWGEKEEEAFQSLKLALTQPPALALPSLDKPFQLFVEETSGAAKGVLTQALGPWKRPVAYLSKRLDPVAAGWPRCLRAIAAAALLTREASKLTFGQDIEITSSHNLESLLRSPPDKWLTNARITQYQVLLLDPPRVRFKQTAALNPATLLPETDDTLPIHHCLDTLDSLTSTRPDLTDQPLAQAEATLFTDGSSYIRDGKRYAGAAVVTLDSVIWAEPLPIGTSAQKAELIALTKALEWSKDKSVNIYTDSRYAFATLHVHGMIYRERGWLTAGGKAIKNAPEILALLTAVWLPKRVAVMHCKGHQKDDAPTSTGNRRADEVAREVAIRPLSTQATISAGKRTADGSEFEKRTADGSEFESPKKKAKVE

SEQ ID NO: 1427 - protein, 2098 aa, synthetic construct
MPAAKRVKLDGGDKKYSIGLDIGTNSVGWAVITDEYKVPSKKFKVLGNTDRHSIKKNLIGALLFDSGETAEATRLKRTARRRYTRRKNRICYLQEIFSNEMAKVDDSFFHRLEESFLVEEDKKHERHPIFGNIVDEVAYHEKYPTIYHLRKKLVDSTDKADLRLIYLALAHMIKFRGHFLIEGDLNPDNSDVDKLFIQLVQTYNQLFEENPINASGVDAKAILSARLSKSRRLENLIAQLPGEKKNGLFGNLIALSLGLTPNFKSNFDLAEDAKLQLSKDTYDDDLDNLLAQIGDQYADLFLAAKNLSDAILLSDILRVNTEITKAPLSASMIKRYDEHHQDLTLLKALVRQQLPEKYKEIFFDQSKNGYAGYIDGGASQEEFYKFIKPILEKMDGTEELLVKLNREDLLRKQRTFDNGSIPHQIHLGELHAILRRQEDFYPFLKDNREKIEKILTFRIPYYVGPLARGNSRFAWMTRKSEETITPWNFEEVVDKGASAQSFIERMTNFDKNLPNEKVLPKHSLLYEYFTVYNELTKVKYVTEGMRKPAFLSGEQKKAIVDLLFKTNRKVTVKQLKEDYFKKIECFDSVEISGVEDRFNASLGTYHDLLKIIKDKDFLDNEENEDILEDIVLTLTLFEDREMIEERLKTYAHLFDDKVMKQLKRRRYTGWGRLSRKLINGIRDKQSGKTILDFLKSDGFANRNFMQLIHDDSLTFKEDIQKAQVSGQGDSLHEHIANLAGSPAIKKGILQTVKVVDELVKVMGRHKPENIVIEMARENQTTQKGQKNSRERMKRIEEGIKELGSQILKEHPVENTQLQNEKLYLYYLQNGRDMYVDQELDINRLSDYDVDHIVPQSFLKDDSIDNKVLTRSDKARGKSDNVPSEEVVKKMKNYWRQLLNAKLITQRKFDNLTKAERGGLSELDKAGFIKRQLVETRQITKHVAQILDSRMNTKYDENDKLIREVKVITLKSKLVSDFRKDFQFYKVREINNYHHAHDAYLNAVVGTALIKKYPKLESEFVYGDYKVYDVRKMIAKSEQEIGKATAKYFFYSNIMNFFKTEITLANGEIRKRPLIETNGETGEIVWDKGRDFATVRKVLSMPQVNIVKKTEVQTGGFSKESILPKRNSDKLIARKKDWDPKKYGGFDSPTVAYSVLVVAKVEKGKSKKLKSVKELLGITIMERSSFEKNPIDFLEAKGYKEVKKDLIIKLPKYSLFELENGRKRMLASAGELQKGNELALPSKYVNFLYLASHYEKLKGSPEDNEQKQLFVEQHKHYLDEIIEQISEFSKRVILADANLDKVLSAYNKHRDKPIREQAENIIHLFTLTNLGAPAAFKYFDTTIDRKRYTSTKEVLDATLIHQSITGLYETRIDLSQLGGDGGGGGGGSEAAAKGGTAPLEEEYRLFLEAPIQNVTLLEQWKREIPKVWAEINPPGLASTQAPIHVQLLSTALPVRVRQYPITLEAKRSLRETIRKFRAAGILRPVHSPWNTPLLPVRKSGTSEYRMVQDLREVNKRVETIHPTVPNPYTLLSLLPPDRIWYSVLDLKDAFFCIPLAPESQLIFAFEWADAEEGESGQLTWTRLPQGFKNSPTLFNEALNRDLQGFRLDHPSVSLLQYVDDLLIAADTQAACLSATRDLLMTLAELGYRVSGKKAQLCQEEVTYLGFKIHKGSRSLSNSRTQAILQIPVPKTKRQVREFLGKIGYCRLFIPGFAELAQPLYAATRPGNDPLVWGEKEEEAFQSLKLALTQPPALALPSLDKPFQLFVEETSGAAKGVLTQALGPWKRPVAYLSKRLDPVAAGWPRCLRAIAAAALLTREASKLTFGQDIEITSSHNLESLLRSPPDKWLTNARITQYQVLLLDPPRVRFKQTAALNPATLLPETDDTLPIHHCLDTLDSLTSTRPDLTDQPLAQAEATLFTDGSSYIRDGKRYAGAAVVTLDSVIWAEPLPIGTSAQKAELIALTKALEWSKDKSVNIYTDSRYAFATLHVHGMIYRERGWLTAGGKAIKNAPEILALLTAVWLPKRVAVMHCKGHQKDDAPTSTGNRRADEVAREVAIRPLSTQATISAGKRTADGSEFEKRTADGSEFESPKKKAKVE

SEQ ID NO: 1428 - protein, 2095 aa, synthetic construct
MPAAKRVKLDGGDKKYSIGLDIGTNSVGWAVITDEYKVPSKKFKVLGNTDRHSIKKNLIGALLFDSGETAEATRLKRTARRRYTRRKNRICYLQEIFSNEMAKVDDSFFHRLEESFLVEEDKKHERHPIFGNIVDEVAYHEKYPTIYHLRKKLVDSTDKADLRLIYLALAHMIKFRGHFLIEGDLNPDNSDVDKLFIQLVQTYNQLFEENPINASGVDAKAILSARLSKSRRLENLIAQLPGEKKNGLFGNLIALSLGLTPNFKSNFDLAEDAKLQLSKDTYDDDLDNLLAQIGDQYADLFLAAKNLSDAILLSDILRVNTEITKAPLSASMIKRYDEHHQDLTLLKALVRQQLPEKYKEIFFDQSKNGYAGYIDGGASQEEFYKFIKPILEKMDGTEELLVKLNREDLLRKQRTFDNGSIPHQIHLGELHAILRRQEDFYPFLKDNREKIEKILTFRIPYYVGPLARGNSRFAWMTRKSEETITPWNFEEVVDKGASAQSFIERMTNFDKNLPNEKVLPKHSLLYEYFTVYNELTKVKYVTEGMRKPAFLSGEQKKAIVDLLFKTNRKVTVKQLKEDYFKKIECFDSVEISGVEDRFNASLGTYHDLLKIIKDKDFLDNEENEDILEDIVLTLTLFEDREMIEERLKTYAHLFDDKVMKQLKRRRYTGWGRLSRKLINGIRDKQSGKTILDFLKSDGFANRNFMQLIHDDSLTFKEDIQKAQVSGQGDSLHEHIANLAGSPAIKKGILQTVKVVDELVKVMGRHKPENIVIEMARENQTTQKGQKNSRERMKRIEEGIKELGSQILKEHPVENTQLQNEKLYLYYLQNGRDMYVDQELDINRLSDYDVDHIVPQSFLKDDSIDNKVLTRSDKARGKSDNVPSEEVVKKMKNYWRQLLNAKLITQRKFDNLTKAERGGLSELDKAGFIKRQLVETRQITKHVAQILDSRMNTKYDENDKLIREVKVITLKSKLVSDFRKDFQFYKVREINNYHHAHDAYLNAVVGTALIKKYPKLESEFVYGDYKVYDVRKMIAKSEQEIGKATAKYFFYSNIMNFFKTEITLANGEIRKRPLIETNGETGEIVWDKGRDFATVRKVLSMPQVNIVKKTEVQTGGFSKESILPKRNSDKLIARKKDWDPKKYGGFDSPTVAYSVLVVAKVEKGKSKKLKSVKELLGITIMERSSFEKNPIDFLEAKGYKEVKKDLIIKLPKYSLFELENGRKRMLASAGELQKGNELALPSKYVNFLYLASHYEKLKGSPEDNEQKQLFVEQHKHYLDEIIEQISEFSKRVILADANLDKVLSAYNKHRDKPIREQAENIIHLFTLTNLGAPAAFKYFDTTIDRKRYTSTKEVLDATLIHQSITGLYETRIDLSQLGGDGGEAAAKGGSGGTAPLEEEYRLFLEAPIQNVTLLEQWKREIPKVWAEINPPGLASTQAPIHVQLLSTALPVRVRQYPITLEAKRSLRETIRKFRAAGILRPVHSPWNTPLLPVRKSGTSEYRMVQDLREVNKRVETIHPTVPNPYTLLSLLPPDRIWYSVLDLKDAFFCIPLAPESQLIFAFEWADAEEGESGQLTWTRLPQGFKNSPTLFNEALNRDLQGFRLDHPSVSLLQYVDDLLIAADTQAACLSATRDLLMTLAELGYRVSGKKAQLCQEEVTYLGFKIHKGSRSLSNSRTQAILQIPVPKTKRQVREFLGKIGYCRLFIPGFAELAQPLYAATRPGNDPLVWGEKEEEAFQSLKLALTQPPALALPSLDKPFQLFVEETSGAAKGVLTQALGPWKRPVAYLSKRLDPVAAGWPRCLRAIAAAALLTREASKLTFGQDIEITSSHNLESLLRSPPDKWLTNARITQYQVLLLDPPRVRFKQTAALNPATLLPETDDTLPIHHCLDTLDSLTSTRPDLTDQPLAQAEATLFTDGSSYIRDGKRYAGAAVVTLDSVIWAEPLPIGTSAQKAELIALTKALEWSKDKSVNIYTDSRYAFATLHVHGMIYRERGWLTAGGKAIKNAPEILALLTAVWLPKRVAVMHCKGHQKDDAPTSTGNRRADEVAREVAIRPLSTQATISAGKRTADGSEFEKRTADGSEFESPKKKAKVE

SEQ ID NO: 1429 - protein, 2096 aa, synthetic construct
MPAAKRVKLDGGDKKYSIGLDIGTNSVGWAVITDEYKVPSKKFKVLGNTDRHSIKKNLIGALLFDSGETAEATRLKRTARRRYTRRKNRICYLQEIFSNEMAKVDDSFFHRLEESFLVEEDKKHERHPIFGNIVDEVAYHEKYPTIYHLRKKLVDSTDKADLRLIYLALAHMIKFRGHFLIEGDLNPDNSDVDKLFIQLVQTYNQLFEENPINASGVDAKAILSARLSKSRRLENLIAQLPGEKKNGLFGNLIALSLGLTPNFKSNFDLAEDAKLQLSKDTYDDDLDNLLAQIGDQYADLFLAAKNLSDAILLSDILRVNTEITKAPLSASMIKRYDEHHQDLTLLKALVRQQLPEKYKEIFFDQSKNGYAGYIDGGASQEEFYKFIKPILEKMDGTEELLVKLNREDLLRKQRTFDNGSIPHQIHLGELHAILRRQEDFYPFLKDNREKIEKILTFRIPYYVGPLARGNSRFAWMTRKSEETITPWNFEEVVDKGASAQSFIERMTNFDKNLPNEKVLPKHSLLYEYFTVYNELTKVKYVTEGMRKPAFLSGEQKKAIVDLLFKTNRKVTVKQLKEDYFKKIECFDSVEISGVEDRFNASLGTYHDLLKIIKDKDFLDNEENEDILEDIVLTLTLFEDREMIEERLKTYAHLFDDKVMKQLKRRRYTGWGRLSRKLINGIRDKQSGKTILDFLKSDGFANRNFMQLIHDDSLTFKEDIQKAQVSGQGDSLHEHIANLAGSPAIKKGILQTVKVVDELVKVMGRHKPENIVIEMARENQTTQKGQKNSRERMKRIEEGIKELGSQILKEHPVENTQLQNEKLYLYYLQNGRDMYVDQELDINRLSDYDVDHIVPQSFLKDDSIDNKVLTRSDKARGKSDNVPSEEVVKKMKNYWRQLLNAKLITQRKFDNLTKAERGGLSELDKAGFIKRQLVETRQITKHVAQILDSRMNTKYDENDKLIREVKVITLKSKLVSDFRKDFQFYKVREINNYHHAHDAYLNAVVGTALIKKYPKLESEFVYGDYKVYDVRKMIAKSEQEIGKATAKYFFYSNIMNFFKTEITLANGEIRKRPLIETNGETGEIVWDKGRDFATVRKVLSMPQVNIVKKTEVQTGGFSKESILPKRNSDKLIARKKDWDPKKYGGFDSPTVAYSVLVVAKVEKGKSKKLKSVKELLGITIMERSSFEKNPIDFLEAKGYKEVKKDLIIKLPKYSLFELENGRKRMLASAGELQKGNELALPSKYVNFLYLASHYEKLKGSPEDNEQKQLFVEQHKHYLDEIIEQISEFSKRVILADANLDKVLSAYNKHRDKPIREQAENIIHLFTLTNLGAPAAFKYFDTTIDRKRYTSTKEVLDATLIHQSITGLYETRIDLSQLGGDGGPAPAPAPAPGGTAPLEEEYRLFLEAPIQNVTLLEQWKREIPKVWAEINPPGLASTQAPIHVQLLSTALPVRVRQYPITLEAKRSLRETIRKFRAAGILRPVHSPWNTPLLPVRKSGTSEYRMVQDLREVNKRVETIHPTVPNPYTLLSLLPPDRIWYSVLDLKDAFFCIPLAPESQLIFAFEWADAEEGESGQLTWTRLPQGFKNSPTLFNEALNRDLQGFRLDHPSVSLLQYVDDLLIAADTQAACLSATRDLLMTLAELGYRVSGKKAQLCQEEVTYLGFKIHKGSRSLSNSRTQAILQIPVPKTKRQVREFLGKIGYCRLFIPGFAELAQPLYAATRPGNDPLVWGEKEEEAFQSLKLALTQPPALALPSLDKPFQLFVEETSGAAKGVLTQALGPWKRPVAYLSKRLDPVAAGWPRCLRAIAAAALLTREASKLTFGQDIEITSSHNLESLLRSPPDKWLTNARITQYQVLLLDPPRVRFKQTAALNPATLLPETDDTLPIHHCLDTLDSLTSTRPDLTDQPLAQAEATLFTDGSSYIRDGKRYAGAAVVTLDSVIWAEPLPIGTSAQKAELIALTKALEWSKDKSVNIYTDSRYAFATLHVHGMIYRERGWLTAGGKAIKNAPEILALLTAVWLPKRVAVMHCKGHQKDDAPTSTGNRRADEVAREVAIRPLSTQATISAGKRTADGSEFEKRTADGSEFESPKKKAKVE

SEQ ID NO: 1430 - protein, 2093 aa, synthetic construct
MPAAKRVKLDGGDKKYSIGLDIGTNSVGWAVITDEYKVPSKKFKVLGNTDRHSIKKNLIGALLFDSGETAEATRLKRTARRRYTRRKNRICYLQEIFSNEMAKVDDSFFHRLEESFLVEEDKKHERHPIFGNIVDEVAYHEKYPTIYHLRKKLVDSTDKADLRLIYLALAHMIKFRGHFLIEGDLNPDNSDVDKLFIQLVQTYNQLFEENPINASGVDAKAILSARLSKSRRLENLIAQLPGEKKNGLFGNLIALSLGLTPNFKSNFDLAEDAKLQLSKDTYDDDLDNLLAQIGDQYADLFLAAKNLSDAILLSDILRVNTEITKAPLSASMIKRYDEHHQDLTLLKALVRQQLPEKYKEIFFDQSKNGYAGYIDGGASQEEFYKFIKPILEKMDGTEELLVKLNREDLLRKQRTFDNGSIPHQIHLGELHAILRRQEDFYPFLKDNREKIEKILTFRIPYYVGPLARGNSRFAWMTRKSEETITPWNFEEVVDKGASAQSFIERMTNFDKNLPNEKVLPKHSLLYEYFTVYNELTKVKYVTEGMRKPAFLSGEQKKAIVDLLFKTNRKVTVKQLKEDYFKKIECFDSVEISGVEDRFNASLGTYHDLLKIIKDKDFLDNEENEDILEDIVLTLTLFEDREMIEERLKTYAHLFDDKVMKQLKRRRYTGWGRLSRKLINGIRDKQSGKTILDFLKSDGFANRNFMQLIHDDSLTFKEDIQKAQVSGQGDSLHEHIANLAGSPAIKKGILQTVKVVDELVKVMGRHKPENIVIEMARENQTTQKGQKNSRERMKRIEEGIKELGSQILKEHPVENTQLQNEKLYLYYLQNGRDMYVDQELDINRLSDYDVDHIVPQSFLKDDSIDNKVLTRSDKARGKSDNVPSEEVVKKMKNYWRQLLNAKLITQRKFDNLTKAERGGLSELDKAGFIKRQLVETRQITKHVAQILDSRMNTKYDENDKLIREVKVITLKSKLVSDFRKDFQFYKVREINNYHHAHDAYLNAVVGTALIKKYPKLESEFVYGDYKVYDVRKMIAKSEQEIGKATAKYFFYSNIMNFFKTEITLANGEIRKRPLIETNGETGEIVWDKGRDFATVRKVLSMPQVNIVKKTEVQTGGFSKESILPKRNSDKLIARKKDWDPKKYGGFDSPTVAYSVLVVAKVEKGKSKKLKSVKELLGITIMERSSFEKNPIDFLEAKGYKEVKKDLIIKLPKYSLFELENGRKRMLASAGELQKGNELALPSKYVNFLYLASHYEKLKGSPEDNEQKQLFVEQHKHYLDEIIEQISEFSKRVILADANLDKVLSAYNKHRDKPIREQAENIIHLFTLTNLGAPAAFKYFDTTIDRKRYTSTKEVLDATLIHQSITGLYETRIDLSQLGGDGGGSSGGGGGTAPLEEEYRLFLEAPIQNVTLLEQWKREIPKVWAEINPPGLASTQAPIHVQLLSTALPVRVRQYPITLEAKRSLRETIRKFRAAGILRPVHSPWNTPLLPVRKSGTSEYRMVQDLREVNKRVETIHPTVPNPYTLLSLLPPDRIWYSVLDLKDAFFCIPLAPESQLIFAFEWADAEEGESGQLTWTRLPQGFKNSPTLFNEALNRDLQGFRLDHPSVSLLQYVDDLLIAADTQAACLSATRDLLMTLAELGYRVSGKKAQLCQEEVTYLGFKIHKGSRSLSNSRTQAILQIPVPKTKRQVREFLGKIGYCRLFIPGFAELAQPLYAATRPGNDPLVWGEKEEEAFQSLKLALTQPPALALPSLDKPFQLFVEETSGAAKGVLTQALGPWKRPVAYLSKRLDPVAAGWPRCLRAIAAAALLTREASKLTFGQDIEITSSHNLESLLRSPPDKWLTNARITQYQVLLLDPPRVRFKQTAALNPATLLPETDDTLPIHHCLDTLDSLTSTRPDLTDQPLAQAEATLFTDGSSYIRDGKRYAGAAVVTLDSVIWAEPLPIGTSAQKAELIALTKALEWSKDKSVNIYTDSRYAFATLHVHGMIYRERGWLTAGGKAIKNAPEILALLTAVWLPKRVAVMHCKGHQKDDAPTSTGNRRADEVAREVAIRPLSTQATISAGKRTADGSEFEKRTADGSEFESPKKKAKVE

SEQ ID NO: 1431 - protein, 2098 aa, synthetic construct
MPAAKRVKLDGGDKKYSIGLDIGTNSVGWAVITDEYKVPSKKFKVLGNTDRHSIKKNLIGALLFDSGETAEATRLKRTARRRYTRRKNRICYLQEIFSNEMAKVDDSFFHRLEESFLVEEDKKHERHPIFGNIVDEVAYHEKYPTIYHLRKKLVDSTDKADLRLIYLALAHMIKFRGHFLIEGDLNPDNSDVDKLFIQLVQTYNQLFEENPINASGVDAKAILSARLSKSRRLENLIAQLPGEKKNGLFGNLIALSLGLTPNFKSNFDLAEDAKLQLSKDTYDDDLDNLLAQIGDQYADLFLAAKNLSDAILLSDILRVNTEITKAPLSASMIKRYDEHHQDLTLLKALVRQQLPEKYKEIFFDQSKNGYAGYIDGGASQEEFYKFIKPILEKMDGTEELLVKLNREDLLRKQRTFDNGSIPHQIHLGELHAILRRQEDFYPFLKDNREKIEKILTFRIPYYVGPLARGNSRFAWMTRKSEETITPWNFEEVVDKGASAQSFIERMTNFDKNLPNEKVLPKHSLLYEYFTVYNELTKVKYVTEGMRKPAFLSGEQKKAIVDLLFKTNRKVTVKQLKEDYFKKIECFDSVEISGVEDRFNASLGTYHDLLKIIKDKDFLDNEENEDILEDIVLTLTLFEDREMIEERLKTYAHLFDDKVMKQLKRRRYTGWGRLSRKLINGIRDKQSGKTILDFLKSDGFANRNFMQLIHDDSLTFKEDIQKAQVSGQGDSLHEHIANLAGSPAIKKGILQTVKVVDELVKVMGRHKPENIVIEMARENQTTQKGQKNSRERMKRIEEGIKELGSQILKEHPVENTQLQNEKLYLYYLQNGRDMYVDQELDINRLSDYDVDHIVPQSFLKDDSIDNKVLTRSDKARGKSDNVPSEEVVKKMKNYWRQLLNAKLITQRKFDNLTKAERGGLSELDKAGFIKRQLVETRQITKHVAQILDSRMNTKYDENDKLIREVKVITLKSKLVSDFRKDFQFYKVREINNYHHAHDAYLNAVVGTALIKKYPKLESEFVYGDYKVYDVRKMIAKSEQEIGKATAKYFFYSNIMNFFKTEITLANGEIRKRPLIETNGETGEIVWDKGRDFATVRKVLSMPQVNIVKKTEVQTGGFSKESILPKRNSDKLIARKKDWDPKKYGGFDSPTVAYSVLVVAKVEKGKSKKLKSVKELLGITIMERSSFEKNPIDFLEAKGYKEVKKDLIIKLPKYSLFELENGRKRMLASAGELQKGNELALPSKYVNFLYLASHYEKLKGSPEDNEQKQLFVEQHKHYLDEIIEQISEFSKRVILADANLDKVLSAYNKHRDKPIREQAENIIHLFTLTNLGAPAAFKYFDTTIDRKRYTSTKEVLDATLIHQSITGLYETRIDLSQLGGDGGEAAAKGGSPAPGGTAPLEEEYRLFLEAPIQNVTLLEQWKREIPKVWAEINPPGLASTQAPIHVQLLSTALPVRVRQYPITLEAKRSLRETIRKFRAAGILRPVHSPWNTPLLPVRKSGTSEYRMVQDLREVNKRVETIHPTVPNPYTLLSLLPPDRIWYSVLDLKDAFFCIPLAPESQLIFAFEWADAEEGESGQLTWTRLPQGFKNSPTLFNEALNRDLQGFRLDHPSVSLLQYVDDLLIAADTQAACLSATRDLLMTLAELGYRVSGKKAQLCQEEVTYLGFKIHKGSRSLSNSRTQAILQIPVPKTKRQVREFLGKIGYCRLFIPGFAELAQPLYAATRPGNDPLVWGEKEEEAFQSLKLALTQPPALALPSLDKPFQLFVEETSGAAKGVLTQALGPWKRPVAYLSKRLDPVAAGWPRCLRAIAAAALLTREASKLTFGQDIEITSSHNLESLLRSPPDKWLTNARITQYQVLLLDPPRVRFKQTAALNPATLLPETDDTLPIHHCLDTLDSLTSTRPDLTDQPLAQAEATLFTDGSSYIRDGKRYAGAAVVTLDSVIWAEPLPIGTSAQKAELIALTKALEWSKDKSVNIYTDSRYAFATLHVHGMIYRERGWLTAGGKAIKNAPEILALLTAVWLPKRVAVMHCKGHQKDDAPTSTGNRRADEVAREVAIRPLSTQATISAGKRTADGSEFEKRTADGSEFESPKKKAKVE

SEQ ID NO: 1432 - protein, 2096 aa, synthetic construct
MPAAKRVKLDGGDKKYSIGLDIGTNSVGWAVITDEYKVPSKKFKVLGNTDRHSIKKNLIGALLFDSGETAEATRLKRTARRRYTRRKNRICYLQEIFSNEMAKVDDSFFHRLEESFLVEEDKKHERHPIFGNIVDEVAYHEKYPTIYHLRKKLVDSTDKADLRLIYLALAHMIKFRGHFLIEGDLNPDNSDVDKLFIQLVQTYNQLFEENPINASGVDAKAILSARLSKSRRLENLIAQLPGEKKNGLFGNLIALSLGLTPNFKSNFDLAEDAKLQLSKDTYDDDLDNLLAQIGDQYADLFLAAKNLSDAILLSDILRVNTEITKAPLSASMIKRYDEHHQDLTLLKALVRQQLPEKYKEIFFDQSKNGYAGYIDGGASQEEFYKFIKPILEKMDGTEELLVKLNREDLLRKQRTFDNGSIPHQIHLGELHAILRRQEDFYPFLKDNREKIEKILTFRIPYYVGPLARGNSRFAWMTRKSEETITPWNFEEVVDKGASAQSFIERMTNFDKNLPNEKVLPKHSLLYEYFTVYNELTKVKYVTEGMRKPAFLSGEQKKAIVDLLFKTNRKVTVKQLKEDYFKKIECFDSVEISGVEDRFNASLGTYHDLLKIIKDKDFLDNEENEDILEDIVLTLTLFEDREMIEERLKTYAHLFDDKVMKQLKRRRYTGWGRLSRKLINGIRDKQSGKTILDFLKSDGFANRNFMQLIHDDSLTFKEDIQKAQVSGQGDSLHEHIANLAGSPAIKKGILQTVKVVDELVKVMGRHKPENIVIEMARENQTTQKGQKNSRERMKRIEEGIKELGSQILKEHPVENTQLQNEKLYLYYLQNGRDMYVDQELDINRLSDYDVDHIVPQSFLKDDSIDNKVLTRSDKARGKSDNVPSEEVVKKMKNYWRQLLNAKLITQRKFDNLTKAERGGLSELDKAGFIKRQLVETRQITKHVAQILDSRMNTKYDENDKLIREVKVITLKSKLVSDFRKDFQFYKVREINNYHHAHDAYLNAVVGTALIKKYPKLESEFVYGDYKVYDVRKMIAKSEQEIGKATAKYFFYSNIMNFFKTEITLANGEIRKRPLIETNGETGEIVWDKGRDFATVRKVLSMPQVNIVKKTEVQTGGFSKESILPKRNSDKLIARKKDWDPKKYGGFDSPTVAYSVLVVAKVEKGKSKKLKSVKELLGITIMERSSFEKNPIDFLEAKGYKEVKKDLIIKLPKYSLFELENGRKRMLASAGELQKGNELALPSKYVNFLYLASHYEKLKGSPEDNEQKQLFVEQHKHYLDEIIEQISEFSKRVILADANLDKVLSAYNKHRDKPIREQAENIIHLFTLTNLGAPAAFKYFDTTIDRKRYTSTKEVLDATLIHQSITGLYETRIDLSQLGGDGGGGGGGSPAPGGTAPLEEEYRLFLEAPIQNVTLLEQWKREIPKVWAEINPPGLASTQAPIHVQLLSTALPVRVRQYPITLEAKRSLRETIRKFRAAGILRPVHSPWNTPLLPVRKSGTSEYRMVQDLREVNKRVETIHPTVPNPYTLLSLLPPDRIWYSVLDLKDAFFCIPLAPESQLIFAFEWADAEEGESGQLTWTRLPQGFKNSPTLFNEALNRDLQGFRLDHPSVSLLQYVDDLLIAADTQAACLSATRDLLMTLAELGYRVSGKKAQLCQEEVTYLGFKIHKGSRSLSNSRTQAILQIPVPKTKRQVREFLGKIGYCRLFIPGFAELAQPLYAATRPGNDPLVWGEKEEEAFQSLKLALTQPPALALPSLDKPFQLFVEETSGAAKGVLTQALGPWKRPVAYLSKRLDPVAAGWPRCLRAIAAAALLTREASKLTFGQDIEITSSHNLESLLRSPPDKWLTNARITQYQVLLLDPPRVRFKQTAALNPATLLPETDDTLPIHHCLDTLDSLTSTRPDLTDQPLAQAEATLFTDGSSYIRDGKRYAGAAVVTLDSVIWAEPLPIGTSAQKAELIALTKALEWSKDKSVNIYTDSRYAFATLHVHGMIYRERGWLTAGGKAIKNAPEILALLTAVWLPKRVAVMHCKGHQKDDAPTSTGNRRADEVAREVAIRPLSTQATISAGKRTADGSEFEKRTADGSEFESPKKKAKVE

SEQ ID NO: 1433 - protein, 2098 aa, synthetic construct
MPAAKRVKLDGGDKKYSIGLDIGTNSVGWAVITDEYKVPSKKFKVLGNTDRHSIKKNLIGALLFDSGETAEATRLKRTARRRYTRRKNRICYLQEIFSNEMAKVDDSFFHRLEESFLVEEDKKHERHPIFGNIVDEVAYHEKYPTIYHLRKKLVDSTDKADLRLIYLALAHMIKFRGHFLIEGDLNPDNSDVDKLFIQLVQTYNQLFEENPINASGVDAKAILSARLSKSRRLENLIAQLPGEKKNGLFGNLIALSLGLTPNFKSNFDLAEDAKLQLSKDTYDDDLDNLLAQIGDQYADLFLAAKNLSDAILLSDILRVNTEITKAPLSASMIKRYDEHHQDLTLLKALVRQQLPEKYKEIFFDQSKNGYAGYIDGGASQEEFYKFIKPILEKMDGTEELLVKLNREDLLRKQRTFDNGSIPHQIHLGELHAILRRQEDFYPFLKDNREKIEKILTFRIPYYVGPLARGNSRFAWMTRKSEETITPWNFEEVVDKGASAQSFIERMTNFDKNLPNEKVLPKHSLLYEYFTVYNELTKVKYVTEGMRKPAFLSGEQKKAIVDLLFKTNRKVTVKQLKEDYFKKIECFDSVEISGVEDRFNASLGTYHDLLKIIKDKDFLDNEENEDILEDIVLTLTLFEDREMIEERLKTYAHLFDDKVMKQLKRRRYTGWGRLSRKLINGIRDKQSGKTILDFLKSDGFANRNFMQLIHDDSLTFKEDIQKAQVSGQGDSLHEHIANLAGSPAIKKGILQTVKVVDELVKVMGRHKPENIVIEMARENQTTQKGQKNSRERMKRIEEGIKELGSQILKEHPVENTQLQNEKLYLYYLQNGRDMYVDQELDINRLSDYDVDHIVPQSFLKDDSIDNKVLTRSDKARGKSDNVPSEEVVKKMKNYWRQLLNAKLITQRKFDNLTKAERGGLSELDKAGFIKRQLVETRQITKHVAQILDSRMNTKYDENDKLIREVKVITLKSKLVSDFRKDFQFYKVREINNYHHAHDAYLNAVVGTALIKKYPKLESEFVYGDYKVYDVRKMIAKSEQEIGKATAKYFFYSNIMNFFKTEITLANGEIRKRPLIETNGETGEIVWDKGRDFATVRKVLSMPQVNIVKKTEVQTGGFSKESILPKRNSDKLIARKKDWDPKKYGGFDSPTVAYSVLVVAKVEKGKSKKLKSVKELLGITIMERSSFEKNPIDFLEAKGYKEVKKDLIIKLPKYSLFELENGRKRMLASAGELQKGNELALPSKYVNFLYLASHYEKLKGSPEDNEQKQLFVEQHKHYLDEIIEQISEFSKRVILADANLDKVLSAYNKHRDKPIREQAENIIHLFTLTNLGAPAAFKYFDTTIDRKRYTSTKEVLDATLIHQSITGLYETRIDLSQLGGDGGGGSEAAAKPAPGGTAPLEEEYRLFLEAPIQNVTLLEQWKREIPKVWAEINPPGLASTQAPIHVQLLSTALPVRVRQYPITLEAKRSLRETIRKFRAAGILRPVHSPWNTPLLPVRKSGTSEYRMVQDLREVNKRVETIHPTVPNPYTLLSLLPPDRIWYSVLDLKDAFFCIPLAPESQLIFAFEWADAEEGESGQLTWTRLPQGFKNSPTLFNEALNRDLQGFRLDHPSVSLLQYVDDLLIAADTQAACLSATRDLLMTLAELGYRVSGKKAQLCQEEVTYLGFKIHKGSRSLSNSRTQAILQIPVPKTKRQVREFLGKIGYCRLFIPGFAELAQPLYAATRPGNDPLVWGEKEEEAFQSLKLALTQPPALALPSLDKPFQLFVEETSGAAKGVLTQALGPWKRPVAYLSKRLDPVAAGWPRCLRAIAAAALLTREASKLTFGQDIEITSSHNLESLLRSPPDKWLTNARITQYQVLLLDPPRVRFKQTAALNPATLLPETDDTLPIHHCLDTLDSLTSTRPDLTDQPLAQAEATLFTDGSSYIRDGKRYAGAAVVTLDSVIWAEPLPIGTSAQKAELIALTKALEWSKDKSVNIYTDSRYAFATLHVHGMIYRERGWLTAGGKAIKNAPEILALLTAVWLPKRVAVMHCKGHQKDDAPTSTGNRRADEVAREVAIRPLSTQATISAGKRTADGSEFEKRTADGSEFESPKKKAKVE

SEQ ID NO: 1434 - protein, 2093 aa, synthetic construct
MPAAKRVKLDGGDKKYSIGLDIGTNSVGWAVITDEYKVPSKKFKVLGNTDRHSIKKNLIGALLFDSGETAEATRLKRTARRRYTRRKNRICYLQEIFSNEMAKVDDSFFHRLEESFLVEEDKKHERHPIFGNIVDEVAYHEKYPTIYHLRKKLVDSTDKADLRLIYLALAHMIKFRGHFLIEGDLNPDNSDVDKLFIQLVQTYNQLFEENPINASGVDAKAILSARLSKSRRLENLIAQLPGEKKNGLFGNLIALSLGLTPNFKSNFDLAEDAKLQLSKDTYDDDLDNLLAQIGDQYADLFLAAKNLSDAILLSDILRVNTEITKAPLSASMIKRYDEHHQDLTLLKALVRQQLPEKYKEIFFDQSKNGYAGYIDGGASQEEFYKFIKPILEKMDGTEELLVKLNREDLLRKQRTFDNGSIPHQIHLGELHAILRRQEDFYPFLKDNREKIEKILTFRIPYYVGPLARGNSRFAWMTRKSEETITPWNFEEVVDKGASAQSFIERMTNFDKNLPNEKVLPKHSLLYEYFTVYNELTKVKYVTEGMRKPAFLSGEQKKAIVDLLFKTNRKVTVKQLKEDYFKKIECFDSVEISGVEDRFNASLGTYHDLLKIIKDKDFLDNEENEDILEDIVLTLTLFEDREMIEERLKTYAHLFDDKVMKQLKRRRYTGWGRLSRKLINGIRDKQSGKTILDFLKSDGFANRNFMQLIHDDSLTFKEDIQKAQVSGQGDSLHEHIANLAGSPAIKKGILQTVKVVDELVKVMGRHKPENIVIEMARENQTTQKGQKNSRERMKRIEEGIKELGSQILKEHPVENTQLQNEKLYLYYLQNGRDMYVDQELDINRLSDYDVDHIVPQSFLKDDSIDNKVLTRSDKARGKSDNVPSEEVVKKMKNYWRQLLNAKLITQRKFDNLTKAERGGLSELDKAGFIKRQLVETRQITKHVAQILDSRMNTKYDENDKLIREVKVITLKSKLVSDFRKDFQFYKVREINNYHHAHDAYLNAVVGTALIKKYPKLESEFVYGDYKVYDVRKMIAKSEQEIGKATAKYFFYSNIMNFFKTEITLANGEIRKRPLIETNGETGEIVWDKGRDFATVRKVLSMPQVNIVKKTEVQTGGFSKESILPKRNSDKLIARKKDWDPKKYGGFDSPTVAYSVLVVAKVEKGKSKKLKSVKELLGITIMERSSFEKNPIDFLEAKGYKEVKKDLIIKLPKYSLFELENGRKRMLASAGELQKGNELALPSKYVNFLYLASHYEKLKGSPEDNEQKQLFVEQHKHYLDEIIEQISEFSKRVILADANLDKVLSAYNKHRDKPIREQAENIIHLFTLTNLGAPAAFKYFDTTIDRKRYTSTKEVLDATLIHQSITGLYETRIDLSQLGGDGGGGSGGSGGTAPLEEEYRLFLEAPIQNVTLLEQWKREIPKVWAEINPPGLASTQAPIHVQLLSTALPVRVRQYPITLEAKRSLRETIRKFRAAGILRPVHSPWNTPLLPVRKSGTSEYRMVQDLREVNKRVETIHPTVPNPYTLLSLLPPDRIWYSVLDLKDAFFCIPLAPESQLIFAFEWADAEEGESGQLTWTRLPQGFKNSPTLFNEALNRDLQGFRLDHPSVSLLQYVDDLLIAADTQAACLSATRDLLMTLAELGYRVSGKKAQLCQEEVTYLGFKIHKGSRSLSNSRTQAILQIPVPKTKRQVREFLGKIGYCRLFIPGFAELAQPLYAATRPGNDPLVWGEKEEEAFQSLKLALTQPPALALPSLDKPFQLFVEETSGAAKGVLTQALGPWKRPVAYLSKRLDPVAAGWPRCLRAIAAAALLTREASKLTFGQDIEITSSHNLESLLRSPPDKWLTNARITQYQVLLLDPPRVRFKQTAALNPATLLPETDDTLPIHHCLDTLDSLTSTRPDLTDQPLAQAEATLFTDGSSYIRDGKRYAGAAVVTLDSVIWAEPLPIGTSAQKAELIALTKALEWSKDKSVNIYTDSRYAFATLHVHGMIYRERGWLTAGGKAIKNAPEILALLTAVWLPKRVAVMHCKGHQKDDAPTSTGNRRADEVAREVAIRPLSTQATISAGKRTADGSEFEKRTADGSEFESPKKKAKVE

SEQ ID NO: 1435 - protein, 2091 aa, synthetic construct
MPAAKRVKLDGGDKKYSIGLDIGTNSVGWAVITDEYKVPSKKFKVLGNTDRHSIKKNLIGALLFDSGETAEATRLKRTARRRYTRRKNRICYLQEIFSNEMAKVDDSFFHRLEESFLVEEDKKHERHPIFGNIVDEVAYHEKYPTIYHLRKKLVDSTDKADLRLIYLALAHMIKFRGHFLIEGDLNPDNSDVDKLFIQLVQTYNQLFEENPINASGVDAKAILSARLSKSRRLENLIAQLPGEKKNGLFGNLIALSLGLTPNFKSNFDLAEDAKLQLSKDTYDDDLDNLLAQIGDQYADLFLAAKNLSDAILLSDILRVNTEITKAPLSASMIKRYDEHHQDLTLLKALVRQQLPEKYKEIFFDQSKNGYAGYIDGGASQEEFYKFIKPILEKMDGTEELLVKLNREDLLRKQRTFDNGSIPHQIHLGELHAILRRQEDFYPFLKDNREKIEKILTFRIPYYVGPLARGNSRFAWMTRKSEETITPWNFEEVVDKGASAQSFIERMTNFDKNLPNEKVLPKHSLLYEYFTVYNELTKVKYVTEGMRKPAFLSGEQKKAIVDLLFKTNRKVTVKQLKEDYFKKIECFDSVEISGVEDRFNASLGTYHDLLKIIKDKDFLDNEENEDILEDIVLTLTLFEDREMIEERLKTYAHLFDDKVMKQLKRRRYTGWGRLSRKLINGIRDKQSGKTILDFLKSDGFANRNFMQLIHDDSLTFKEDIQKAQVSGQGDSLHEHIANLAGSPAIKKGILQTVKVVDELVKVMGRHKPENIVIEMARENQTTQKGQKNSRERMKRIEEGIKELGSQILKEHPVENTQLQNEKLYLYYLQNGRDMYVDQELDINRLSDYDVDHIVPQSFLKDDSIDNKVLTRSDKARGKSDNVPSEEVVKKMKNYWRQLLNAKLITQRKFDNLTKAERGGLSELDKAGFIKRQLVETRQITKHVAQILDSRMNTKYDENDKLIREVKVITLKSKLVSDFRKDFQFYKVREINNYHHAHDAYLNAVVGTALIKKYPKLESEFVYGDYKVYDVRKMIAKSEQEIGKATAKYFFYSNIMNFFKTEITLANGEIRKRPLIETNGETGEIVWDKGRDFATVRKVLSMPQVNIVKKTEVQTGGFSKESILPKRNSDKLIARKKDWDPKKYGGFDSPTVAYSVLVVAKVEKGKSKKLKSVKELLGITIMERSSFEKNPIDFLEAKGYKEVKKDLIIKLPKYSLFELENGRKRMLASAGELQKGNELALPSKYVNFLYLASHYEKLKGSPEDNEQKQLFVEQHKHYLDEIIEQISEFSKRVILADANLDKVLSAYNKHRDKPIREQAENIIHLFTLTNLGAPAAFKYFDTTIDRKRYTSTKEVLDATLIHQSITGLYETRIDLSQLGGDGGGGGGGGTAPLEEEYRLFLEAPIQNVTLLEQWKREIPKVWAEINPPGLASTQAPIHVQLLSTALPVRVRQYPITLEAKRSLRETIRKFRAAGILRPVHSPWNTPLLPVRKSGTSEYRMVQDLREVNKRVETIHPTVPNPYTLLSLLPPDRIWYSVLDLKDAFFCIPLAPESQLIFAFEWADAEEGESGQLTWTRLPQGFKNSPTLFNEALNRDLQGFRLDHPSVSLLQYVDDLLIAADTQAACLSATRDLLMTLAELGYRVSGKKAQLCQEEVTYLGFKIHKGSRSLSNSRTQAILQIPVPKTKRQVREFLGKIGYCRLFIPGFAELAQPLYAATRPGNDPLVWGEKEEEAFQSLKLALTQPPALALPSLDKPFQLFVEETSGAAKGVLTQALGPWKRPVAYLSKRLDPVAAGWPRCLRAIAAAALLTREASKLTFGQDIEITSSHNLESLLRSPPDKWLTNARITQYQVLLLDPPRVRFKQTAALNPATLLPETDDTLPIHHCLDTLDSLTSTRPDLTDQPLAQAEATLFTDGSSYIRDGKRYAGAAVVTLDSVIWAEPLPIGTSAQKAELIALTKALEWSKDKSVNIYTDSRYAFATLHVHGMIYRERGWLTAGGKAIKNAPEILALLTAVWLPKRVAVMHCKGHQKDDAPTSTGNRRADEVAREVAIRPLSTQATISAGKRTADGSEFEKRTADGSEFESPKKKAKVE

SEQ ID NO: 1436 - protein, 2096 aa, synthetic construct
MPAAKRVKLDGGDKKYSIGLDIGTNSVGWAVITDEYKVPSKKFKVLGNTDRHSIKKNLIGALLFDSGETAEATRLKRTARRRYTRRKNRICYLQEIFSNEMAKVDDSFFHRLEESFLVEEDKKHERHPIFGNIVDEVAYHEKYPTIYHLRKKLVDSTDKADLRLIYLALAHMIKFRGHFLIEGDLNPDNSDVDKLFIQLVQTYNQLFEENPINASGVDAKAILSARLSKSRRLENLIAQLPGEKKNGLFGNLIALSLGLTPNFKSNFDLAEDAKLQLSKDTYDDDLDNLLAQIGDQYADLFLAAKNLSDAILLSDILRVNTEITKAPLSASMIKRYDEHHQDLTLLKALVRQQLPEKYKEIFFDQSKNGYAGYIDGGASQEEFYKFIKPILEKMDGTEELLVKLNREDLLRKQRTFDNGSIPHQIHLGELHAILRRQEDFYPFLKDNREKIEKILTFRIPYYVGPLARGNSRFAWMTRKSEETITPWNFEEVVDKGASAQSFIERMTNFDKNLPNEKVLPKHSLLYEYFTVYNELTKVKYVTEGMRKPAFLSGEQKKAIVDLLFKTNRKVTVKQLKEDYFKKIECFDSVEISGVEDRFNASLGTYHDLLKIIKDKDFLDNEENEDILEDIVLTLTLFEDREMIEERLKTYAHLFDDKVMKQLKRRRYTGWGRLSRKLINGIRDKQSGKTILDFLKSDGFANRNFMQLIHDDSLTFKEDIQKAQVSGQGDSLHEHIANLAGSPAIKKGILQTVKVVDELVKVMGRHKPENIVIEMARENQTTQKGQKNSRERMKRIEEGIKELGSQILKEHPVENTQLQNEKLYLYYLQNGRDMYVDQELDINRLSDYDVDHIVPQSFLKDDSIDNKVLTRSDKARGKSDNVPSEEVVKKMKNYWRQLLNAKLITQRKFDNLTKAERGGLSELDKAGFIKRQLVETRQITKHVAQILDSRMNTKYDENDKLIREVKVITLKSKLVSDFRKDFQFYKVREINNYHHAHDAYLNAVVGTALIKKYPKLESEFVYGDYKVYDVRKMIAKSEQEIGKATAKYFFYSNIMNFFKTEITLANGEIRKRPLIETNGETGEIVWDKGRDFATVRKVLSMPQVNIVKKTEVQTGGFSKESILPKRNSDKLIARKKDWDPKKYGGFDSPTVAYSVLVVAKVEKGKSKKLKSVKELLGITIMERSSFEKNPIDFLEAKGYKEVKKDLIIKLPKYSLFELENGRKRMLASAGELQKGNELALPSKYVNFLYLASHYEKLKGSPEDNEQKQLFVEQHKHYLDEIIEQISEFSKRVILADANLDKVLSAYNKHRDKPIREQAENIIHLFTLTNLGAPAAFKYFDTTIDRKRYTSTKEVLDATLIHQSITGLYETRIDLSQLGGDGGPAPGGGGGSGGTAPLEEEYRLFLEAPIQNVTLLEQWKREIPKVWAEINPPGLASTQAPIHVQLLSTALPVRVRQYPITLEAKRSLRETIRKFRAAGILRPVHSPWNTPLLPVRKSGTSEYRMVQDLREVNKRVETIHPTVPNPYTLLSLLPPDRIWYSVLDLKDAFFCIPLAPESQLIFAFEWADAEEGESGQLTWTRLPQGFKNSPTLFNEALNRDLQGFRLDHPSVSLLQYVDDLLIAADTQAACLSATRDLLMTLAELGYRVSGKKAQLCQEEVTYLGFKIHKGSRSLSNSRTQAILQIPVPKTKRQVREFLGKIGYCRLFIPGFAELAQPLYAATRPGNDPLVWGEKEEEAFQSLKLALTQPPALALPSLDKPFQLFVEETSGAAKGVLTQALGPWKRPVAYLSKRLDPVAAGWPRCLRAIAAAALLTREASKLTFGQDIEITSSHNLESLLRSPPDKWLTNARITQYQVLLLDPPRVRFKQTAALNPATLLPETDDTLPIHHCLDTLDSLTSTRPDLTDQPLAQAEATLFTDGSSYIRDGKRYAGAAVVTLDSVIWAEPLPIGTSAQKAELIALTKALEWSKDKSVNIYTDSRYAFATLHVHGMIYRERGWLTAGGKAIKNAPEILALLTAVWLPKRVAVMHCKGHQKDDAPTSTGNRRADEVAREVAIRPLSTQATISAGKRTADGSEFEKRTADGSEFESPKKKAKVE

SEQ ID NO: 1437 - protein, 2096 aa, synthetic construct
MPAAKRVKLDGGDKKYSIGLDIGTNSVGWAVITDEYKVPSKKFKVLGNTDRHSIKKNLIGALLFDSGETAEATRLKRTARRRYTRRKNRICYLQEIFSNEMAKVDDSFFHRLEESFLVEEDKKHERHPIFGNIVDEVAYHEKYPTIYHLRKKLVDSTDKADLRLIYLALAHMIKFRGHFLIEGDLNPDNSDVDKLFIQLVQTYNQLFEENPINASGVDAKAILSARLSKSRRLENLIAQLPGEKKNGLFGNLIALSLGLTPNFKSNFDLAEDAKLQLSKDTYDDDLDNLLAQIGDQYADLFLAAKNLSDAILLSDILRVNTEITKAPLSASMIKRYDEHHQDLTLLKALVRQQLPEKYKEIFFDQSKNGYAGYIDGGASQEEFYKFIKPILEKMDGTEELLVKLNREDLLRKQRTFDNGSIPHQIHLGELHAILRRQEDFYPFLKDNREKIEKILTFRIPYYVGPLARGNSRFAWMTRKSEETITPWNFEEVVDKGASAQSFIERMTNFDKNLPNEKVLPKHSLLYEYFTVYNELTKVKYVTEGMRKPAFLSGEQKKAIVDLLFKTNRKVTVKQLKEDYFKKIECFDSVEISGVEDRFNASLGTYHDLLKIIKDKDFLDNEENEDILEDIVLTLTLFEDREMIEERLKTYAHLFDDKVMKQLKRRRYTGWGRLSRKLINGIRDKQSGKTILDFLKSDGFANRNFMQLIHDDSLTFKEDIQKAQVSGQGDSLHEHIANLAGSPAIKKGILQTVKVVDELVKVMGRHKPENIVIEMARENQTTQKGQKNSRERMKRIEEGIKELGSQILKEHPVENTQLQNEKLYLYYLQNGRDMYVDQELDINRLSDYDVDHIVPQSFLKDDSIDNKVLTRSDKARGKSDNVPSEEVVKKMKNYWRQLLNAKLITQRKFDNLTKAERGGLSELDKAGFIKRQLVETRQITKHVAQILDSRMNTKYDENDKLIREVKVITLKSKLVSDFRKDFQFYKVREINNYHHAHDAYLNAVVGTALIKKYPKLESEFVYGDYKVYDVRKMIAKSEQEIGKATAKYFFYSNIMNFFKTEITLANGEIRKRPLIETNGETGEIVWDKGRDFATVRKVLSMPQVNIVKKTEVQTGGFSKESILPKRNSDKLIARKKDWDPKKYGGFDSPTVAYSVLVVAKVEKGKSKKLKSVKELLGITIMERSSFEKNPIDFLEAKGYKEVKKDLIIKLPKYSLFELENGRKRMLASAGELQKGNELALPSKYVNFLYLASHYEKLKGSPEDNEQKQLFVEQHKHYLDEIIEQISEFSKRVILADANLDKVLSAYNKHRDKPIREQAENIIHLFTLTNLGAPAAFKYFDTTIDRKRYTSTKEVLDATLIHQSITGLYETRIDLSQLGGDGGGSSGGSGGGGGTAPLEEEYRLFLEAPIQNVTLLEQWKREIPKVWAEINPPGLASTQAPIHVQLLSTALPVRVRQYPITLEAKRSLRETIRKFRAAGILRPVHSPWNTPLLPVRKSGTSEYRMVQDLREVNKRVETIHPTVPNPYTLLSLLPPDRIWYSVLDLKDAFFCIPLAPESQLIFAFEWADAEEGESGQLTWTRLPQGFKNSPTLFNEALNRDLQGFRLDHPSVSLLQYVDDLLIAADTQAACLSATRDLLMTLAELGYRVSGKKAQLCQEEVTYLGFKIHKGSRSLSNSRTQAILQIPVPKTKRQVREFLGKIGYCRLFIPGFAELAQPLYAATRPGNDPLVWGEKEEEAFQSLKLALTQPPALALPSLDKPFQLFVEETSGAAKGVLTQALGPWKRPVAYLSKRLDPVAAGWPRCLRAIAAAALLTREASKLTFGQDIEITSSHNLESLLRSPPDKWLTNARITQYQVLLLDPPRVRFKQTAALNPATLLPETDDTLPIHHCLDTLDSLTSTRPDLTDQPLAQAEATLFTDGSSYIRDGKRYAGAAVVTLDSVIWAEPLPIGTSAQKAELIALTKALEWSKDKSVNIYTDSRYAFATLHVHGMIYRERGWLTAGGKAIKNAPEILALLTAVWLPKRVAVMHCKGHQKDDAPTSTGNRRADEVAREVAIRPLSTQATISAGKRTADGSEFEKRTADGSEFESPKKKAKVE

SEQ ID NO: 1438 - protein, 2092 aa, synthetic construct
MPAAKRVKLDGGDKKYSIGLDIGTNSVGWAVITDEYKVPSKKFKVLGNTDRHSIKKNLIGALLFDSGETAEATRLKRTARRRYTRRKNRICYLQEIFSNEMAKVDDSFFHRLEESFLVEEDKKHERHPIFGNIVDEVAYHEKYPTIYHLRKKLVDSTDKADLRLIYLALAHMIKFRGHFLIEGDLNPDNSDVDKLFIQLVQTYNQLFEENPINASGVDAKAILSARLSKSRRLENLIAQLPGEKKNGLFGNLIALSLGLTPNFKSNFDLAEDAKLQLSKDTYDDDLDNLLAQIGDQYADLFLAAKNLSDAILLSDILRVNTEITKAPLSASMIKRYDEHHQDLTLLKALVRQQLPEKYKEIFFDQSKNGYAGYIDGGASQEEFYKFIKPILEKMDGTEELLVKLNREDLLRKQRTFDNGSIPHQIHLGELHAILRRQEDFYPFLKDNREKIEKILTFRIPYYVGPLARGNSRFAWMTRKSEETITPWNFEEVVDKGASAQSFIERMTNFDKNLPNEKVLPKHSLLYEYFTVYNELTKVKYVTEGMRKPAFLSGEQKKAIVDLLFKTNRKVTVKQLKEDYFKKIECFDSVEISGVEDRFNASLGTYHDLLKIIKDKDFLDNEENEDILEDIVLTLTLFEDREMIEERLKTYAHLFDDKVMKQLKRRRYTGWGRLSRKLINGIRDKQSGKTILDFLKSDGFANRNFMQLIHDDSLTFKEDIQKAQVSGQGDSLHEHIANLAGSPAIKKGILQTVKVVDELVKVMGRHKPENIVIEMARENQTTQKGQKNSRERMKRIEEGIKELGSQILKEHPVENTQLQNEKLYLYYLQNGRDMYVDQELDINRLSDYDVDHIVPQSFLKDDSIDNKVLTRSDKARGKSDNVPSEEVVKKMKNYWRQLLNAKLITQRKFDNLTKAERGGLSELDKAGFIKRQLVETRQITKHVAQILDSRMNTKYDENDKLIREVKVITLKSKLVSDFRKDFQFYKVREINNYHHAHDAYLNAVVGTALIKKYPKLESEFVYGDYKVYDVRKMIAKSEQEIGKATAKYFFYSNIMNFFKTEITLANGEIRKRPLIETNGETGEIVWDKGRDFATVRKVLSMPQVNIVKKTEVQTGGFSKESILPKRNSDKLIARKKDWDPKKYGGFDSPTVAYSVLVVAKVEKGKSKKLKSVKELLGITIMERSSFEKNPIDFLEAKGYKEVKKDLIIKLPKYSLFELENGRKRMLASAGELQKGNELALPSKYVNFLYLASHYEKLKGSPEDNEQKQLFVEQHKHYLDEIIEQISEFSKRVILADANLDKVLSAYNKHRDKPIREQAENIIHLFTLTNLGAPAAFKYFDTTIDRKRYTSTKEVLDATLIHQSITGLYETRIDLSQLGGDGGGGGGGGGTAPLEEEYRLFLEAPIQNVTLLEQWKREIPKVWAEINPPGLASTQAPIHVQLLSTALPVRVRQYPITLEAKRSLRETIRKFRAAGILRPVHSPWNTPLLPVRKSGTSEYRMVQDLREVNKRVETIHPTVPNPYTLLSLLPPDRIWYSVLDLKDAFFCIPLAPESQLIFAFEWADAEEGESGQLTWTRLPQGFKNSPTLFNEALNRDLQGFRLDHPSVSLLQYVDDLLIAADTQAACLSATRDLLMTLAELGYRVSGKKAQLCQEEVTYLGFKIHKGSRSLSNSRTQAILQIPVPKTKRQVREFLGKIGYCRLFIPGFAELAQPLYAATRPGNDPLVWGEKEEEAFQSLKLALTQPPALALPSLDKPFQLFVEETSGAAKGVLTQALGPWKRPVAYLSKRLDPVAAGWPRCLRAIAAAALLTREASKLTFGQDIEITSSHNLESLLRSPPDKWLTNARITQYQVLLLDPPRVRFKQTAALNPATLLPETDDTLPIHHCLDTLDSLTSTRPDLTDQPLAQAEATLFTDGSSYIRDGKRYAGAAVVTLDSVIWAEPLPIGTSAQKAELIALTKALEWSKDKSVNIYTDSRYAFATLHVHGMIYRERGWLTAGGKAIKNAPEILALLTAVWLPKRVAVMHCKGHQKDDAPTSTGNRRADEVAREVAIRPLSTQATISAGKRTADGSEFEKRTADGSEFESPKKKAKVE

SEQ ID NO: 1439 - protein, 2098 aa, synthetic construct
MPAAKRVKLDGGDKKYSIGLDIGTNSVGWAVITDEYKVPSKKFKVLGNTDRHSIKKNLIGALLFDSGETAEATRLKRTARRRYTRRKNRICYLQEIFSNEMAKVDDSFFHRLEESFLVEEDKKHERHPIFGNIVDEVAYHEKYPTIYHLRKKLVDSTDKADLRLIYLALAHMIKFRGHFLIEGDLNPDNSDVDKLFIQLVQTYNQLFEENPINASGVDAKAILSARLSKSRRLENLIAQLPGEKKNGLFGNLIALSLGLTPNFKSNFDLAEDAKLQLSKDTYDDDLDNLLAQIGDQYADLFLAAKNLSDAILLSDILRVNTEITKAPLSASMIKRYDEHHQDLTLLKALVRQQLPEKYKEIFFDQSKNGYAGYIDGGASQEEFYKFIKPILEKMDGTEELLVKLNREDLLRKQRTFDNGSIPHQIHLGELHAILRRQEDFYPFLKDNREKIEKILTFRIPYYVGPLARGNSRFAWMTRKSEETITPWNFEEVVDKGASAQSFIERMTNFDKNLPNEKVLPKHSLLYEYFTVYNELTKVKYVTEGMRKPAFLSGEQKKAIVDLLFKTNRKVTVKQLKEDYFKKIECFDSVEISGVEDRFNASLGTYHDLLKIIKDKDFLDNEENEDILEDIVLTLTLFEDREMIEERLKTYAHLFDDKVMKQLKRRRYTGWGRLSRKLINGIRDKQSGKTILDFLKSDGFANRNFMQLIHDDSLTFKEDIQKAQVSGQGDSLHEHIANLAGSPAIKKGILQTVKVVDELVKVMGRHKPENIVIEMARENQTTQKGQKNSRERMKRIEEGIKELGSQILKEHPVENTQLQNEKLYLYYLQNGRDMYVDQELDINRLSDYDVDHIVPQSFLKDDSIDNKVLTRSDKARGKSDNVPSEEVVKKMKNYWRQLLNAKLITQRKFDNLTKAERGGLSELDKAGFIKRQLVETRQITKHVAQILDSRMNTKYDENDKLIREVKVITLKSKLVSDFRKDFQFYKVREINNYHHAHDAYLNAVVGTALIKKYPKLESEFVYGDYKVYDVRKMIAKSEQEIGKATAKYFFYSNIMNFFKTEITLANGEIRKRPLIETNGETGEIVWDKGRDFATVRKVLSMPQVNIVKKTEVQTGGFSKESILPKRNSDKLIARKKDWDPKKYGGFDSPTVAYSVLVVAKVEKGKSKKLKSVKELLGITIMERSSFEKNPIDFLEAKGYKEVKKDLIIKLPKYSLFELENGRKRMLASAGELQKGNELALPSKYVNFLYLASHYEKLKGSPEDNEQKQLFVEQHKHYLDEIIEQISEFSKRVILADANLDKVLSAYNKHRDKPIREQAENIIHLFTLTNLGAPAAFKYFDTTIDRKRYTSTKEVLDATLIHQSITGLYETRIDLSQLGGDGGEAAAKPAPGGSGGTAPLEEEYRLFLEAPIQNVTLLEQWKREIPKVWAEINPPGLASTQAPIHVQLLSTALPVRVRQYPITLEAKRSLRETIRKFRAAGILRPVHSPWNTPLLPVRKSGTSEYRMVQDLREVNKRVETIHPTVPNPYTLLSLLPPDRIWYSVLDLKDAFFCIPLAPESQLIFAFEWADAEEGESGQLTWTRLPQGFKNSPTLFNEALNRDLQGFRLDHPSVSLLQYVDDLLIAADTQAACLSATRDLLMTLAELGYRVSGKKAQLCQEEVTYLGFKIHKGSRSLSNSRTQAILQIPVPKTKRQVREFLGKIGYCRLFIPGFAELAQPLYAATRPGNDPLVWGEKEEEAFQSLKLALTQPPALALPSLDKPFQLFVEETSGAAKGVLTQALGPWKRPVAYLSKRLDPVAAGWPRCLRAIAAAALLTREASKLTFGQDIEITSSHNLESLLRSPPDKWLTNARITQYQVLLLDPPRVRFKQTAALNPATLLPETDDTLPIHHCLDTLDSLTSTRPDLTDQPLAQAEATLFTDGSSYIRDGKRYAGAAVVTLDSVIWAEPLPIGTSAQKAELIALTKALEWSKDKSVNIYTDSRYAFATLHVHGMIYRERGWLTAGGKAIKNAPEILALLTAVWLPKRVAVMHCKGHQKDDAPTSTGNRRADEVAREVAIRPLSTQATISAGKRTADGSEFEKRTADGSEFESPKKKAKVE

SEQ ID NO: 1440 - protein, 2094 aa, synthetic construct
MPAAKRVKLDGGDKKYSIGLDIGTNSVGWAVITDEYKVPSKKFKVLGNTDRHSIKKNLIGALLFDSGETAEATRLKRTARRRYTRRKNRICYLQEIFSNEMAKVDDSFFHRLEESFLVEEDKKHERHPIFGNIVDEVAYHEKYPTIYHLRKKLVDSTDKADLRLIYLALAHMIKFRGHFLIEGDLNPDNSDVDKLFIQLVQTYNQLFEENPINASGVDAKAILSARLSKSRRLENLIAQLPGEKKNGLFGNLIALSLGLTPNFKSNFDLAEDAKLQLSKDTYDDDLDNLLAQIGDQYADLFLAAKNLSDAILLSDILRVNTEITKAPLSASMIKRYDEHHQDLTLLKALVRQQLPEKYKEIFFDQSKNGYAGYIDGGASQEEFYKFIKPILEKMDGTEELLVKLNREDLLRKQRTFDNGSIPHQIHLGELHAILRRQEDFYPFLKDNREKIEKILTFRIPYYVGPLARGNSRFAWMTRKSEETITPWNFEEVVDKGASAQSFIERMTNFDKNLPNEKVLPKHSLLYEYFTVYNELTKVKYVTEGMRKPAFLSGEQKKAIVDLLFKTNRKVTVKQLKEDYFKKIECFDSVEISGVEDRFNASLGTYHDLLKIIKDKDFLDNEENEDILEDIVLTLTLFEDREMIEERLKTYAHLFDDKVMKQLKRRRYTGWGRLSRKLINGIRDKQSGKTILDFLKSDGFANRNFMQLIHDDSLTFKEDIQKAQVSGQGDSLHEHIANLAGSPAIKKGILQTVKVVDELVKVMGRHKPENIVIEMARENQTTQKGQKNSRERMKRIEEGIKELGSQILKEHPVENTQLQNEKLYLYYLQNGRDMYVDQELDINRLSDYDVDHIVPQSFLKDDSIDNKVLTRSDKARGKSDNVPSEEVVKKMKNYWRQLLNAKLITQRKFDNLTKAERGGLSELDKAGFIKRQLVETRQITKHVAQILDSRMNTKYDENDKLIREVKVITLKSKLVSDFRKDFQFYKVREINNYHHAHDAYLNAVVGTALIKKYPKLESEFVYGDYKVYDVRKMIAKSEQEIGKATAKYFFYSNIMNFFKTEITLANGEIRKRPLIETNGETGEIVWDKGRDFATVRKVLSMPQVNIVKKTEVQTGGFSKESILPKRNSDKLIARKKDWDPKKYGGFDSPTVAYSVLVVAKVEKGKSKKLKSVKELLGITIMERSSFEKNPIDFLEAKGYKEVKKDLIIKLPKYSLFELENGRKRMLASAGELQKGNELALPSKYVNFLYLASHYEKLKGSPEDNEQKQLFVEQHKHYLDEIIEQISEFSKRVILADANLDKVLSAYNKHRDKPIREQAENIIHLFTLTNLGAPAAFKYFDTTIDRKRYTSTKEVLDATLIHQSITGLYETRIDLSQLGGDGGPAPAPAPGGTAPLEEEYRLFLEAPIQNVTLLEQWKREIPKVWAEINPPGLASTQAPIHVQLLSTALPVRVRQYPITLEAKRSLRETIRKFRAAGILRPVHSPWNTPLLPVRKSGTSEYRMVQDLREVNKRVETIHPTVPNPYTLLSLLPPDRIWYSVLDLKDAFFCIPLAPESQLIFAFEWADAEEGESGQLTWTRLPQGFKNSPTLFNEALNRDLQGFRLDHPSVSLLQYVDDLLIAADTQAACLSATRDLLMTLAELGYRVSGKKAQLCQEEVTYLGFKIHKGSRSLSNSRTQAILQIPVPKTKRQVREFLGKIGYCRLFIPGFAELAQPLYAATRPGNDPLVWGEKEEEAFQSLKLALTQPPALALPSLDKPFQLFVEETSGAAKGVLTQALGPWKRPVAYLSKRLDPVAAGWPRCLRAIAAAALLTREASKLTFGQDIEITSSHNLESLLRSPPDKWLTNARITQYQVLLLDPPRVRFKQTAALNPATLLPETDDTLPIHHCLDTLDSLTSTRPDLTDQPLAQAEATLFTDGSSYIRDGKRYAGAAVVTLDSVIWAEPLPIGTSAQKAELIALTKALEWSKDKSVNIYTDSRYAFATLHVHGMIYRERGWLTAGGKAIKNAPEILALLTAVWLPKRVAVMHCKGHQKDDAPTSTGNRRADEVAREVAIRPLSTQATISAGKRTADGSEFEKRTADGSEFESPKKKAKVE

SEQ ID NO: 1441 - protein, 2098 aa, synthetic construct
MPAAKRVKLDGGDKKYSIGLDIGTNSVGWAVITDEYKVPSKKFKVLGNTDRHSIKKNLIGALLFDSGETAEATRLKRTARRRYTRRKNRICYLQEIFSNEMAKVDDSFFHRLEESFLVEEDKKHERHPIFGNIVDEVAYHEKYPTIYHLRKKLVDSTDKADLRLIYLALAHMIKFRGHFLIEGDLNPDNSDVDKLFIQLVQTYNQLFEENPINASGVDAKAILSARLSKSRRLENLIAQLPGEKKNGLFGNLIALSLGLTPNFKSNFDLAEDAKLQLSKDTYDDDLDNLLAQIGDQYADLFLAAKNLSDAILLSDILRVNTEITKAPLSASMIKRYDEHHQDLTLLKALVRQQLPEKYKEIFFDQSKNGYAGYIDGGASQEEFYKFIKPILEKMDGTEELLVKLNREDLLRKQRTFDNGSIPHQIHLGELHAILRRQEDFYPFLKDNREKIEKILTFRIPYYVGPLARGNSRFAWMTRKSEETITPWNFEEVVDKGASAQSFIERMTNFDKNLPNEKVLPKHSLLYEYFTVYNELTKVKYVTEGMRKPAFLSGEQKKAIVDLLFKTNRKVTVKQLKEDYFKKIECFDSVEISGVEDRFNASLGTYHDLLKIIKDKDFLDNEENEDILEDIVLTLTLFEDREMIEERLKTYAHLFDDKVMKQLKRRRYTGWGRLSRKLINGIRDKQSGKTILDFLKSDGFANRNFMQLIHDDSLTFKEDIQKAQVSGQGDSLHEHIANLAGSPAIKKGILQTVKVVDELVKVMGRHKPENIVIEMARENQTTQKGQKNSRERMKRIEEGIKELGSQILKEHPVENTQLQNEKLYLYYLQNGRDMYVDQELDINRLSDYDVDHIVPQSFLKDDSIDNKVLTRSDKARGKSDNVPSEEVVKKMKNYWRQLLNAKLITQRKFDNLTKAERGGLSELDKAGFIKRQLVETRQITKHVAQILDSRMNTKYDENDKLIREVKVITLKSKLVSDFRKDFQFYKVREINNYHHAHDAYLNAVVGTALIKKYPKLESEFVYGDYKVYDVRKMIAKSEQEIGKATAKYFFYSNIMNFFKTEITLANGEIRKRPLIETNGETGEIVWDKGRDFATVRKVLSMPQVNIVKKTEVQTGGFSKESILPKRNSDKLIARKKDWDPKKYGGFDSPTVAYSVLVVAKVEKGKSKKLKSVKELLGITIMERSSFEKNPIDFLEAKGYKEVKKDLIIKLPKYSLFELENGRKRMLASAGELQKGNELALPSKYVNFLYLASHYEKLKGSPEDNEQKQLFVEQHKHYLDEIIEQISEFSKRVILADANLDKVLSAYNKHRDKPIREQAENIIHLFTLTNLGAPAAFKYFDTTIDRKRYTSTKEVLDATLIHQSITGLYETRIDLSQLGGDGGEAAAKGGSGGGGGTAPLEEEYRLFLEAPIQNVTLLEQWKREIPKVWAEINPPGLASTQAPIHVQLLSTALPVRVRQYPITLEAKRSLRETIRKFRAAGILRPVHSPWNTPLLPVRKSGTSEYRMVQDLREVNKRVETIHPTVPNPYTLLSLLPPDRIWYSVLDLKDAFFCIPLAPESQLIFAFEWADAEEGESGQLTWTRLPQGFKNSPTLFNEALNRDLQGFRLDHPSVSLLQYVDDLLIAADTQAACLSATRDLLMTLAELGYRVSGKKAQLCQEEVTYLGFKIHKGSRSLSNSRTQAILQIPVPKTKRQVREFLGKIGYCRLFIPGFAELAQPLYAATRPGNDPLVWGEKEEEAFQSLKLALTQPPALALPSLDKPFQLFVEETSGAAKGVLTQALGPWKRPVAYLSKRLDPVAAGWPRCLRAIAAAALLTREASKLTFGQDIEITSSHNLESLLRSPPDKWLTNARITQYQVLLLDPPRVRFKQTAALNPATLLPETDDTLPIHHCLDTLDSLTSTRPDLTDQPLAQAEATLFTDGSSYIRDGKRYAGAAVVTLDSVIWAEPLPIGTSAQKAELIALTKALEWSKDKSVNIYTDSRYAFATLHVHGMIYRERGWLTAGGKAIKNAPEILALLTAVWLPKRVAVMHCKGHQKDDAPTSTGNRRADEVAREVAIRPLSTQATISAGKRTADGSEFEKRTADGSEFESPKKKAKVE

SEQ ID NO: 1442 - protein, 2098 aa, synthetic construct
MPAAKRVKLDGGDKKYSIGLDIGTNSVGWAVITDEYKVPSKKFKVLGNTDRHSIKKNLIGALLFDSGETAEATRLKRTARRRYTRRKNRICYLQEIFSNEMAKVDDSFFHRLEESFLVEEDKKHERHPIFGNIVDEVAYHEKYPTIYHLRKKLVDSTDKADLRLIYLALAHMIKFRGHFLIEGDLNPDNSDVDKLFIQLVQTYNQLFEENPINASGVDAKAILSARLSKSRRLENLIAQLPGEKKNGLFGNLIALSLGLTPNFKSNFDLAEDAKLQLSKDTYDDDLDNLLAQIGDQYADLFLAAKNLSDAILLSDILRVNTEITKAPLSASMIKRYDEHHQDLTLLKALVRQQLPEKYKEIFFDQSKNGYAGYIDGGASQEEFYKFIKPILEKMDGTEELLVKLNREDLLRKQRTFDNGSIPHQIHLGELHAILRRQEDFYPFLKDNREKIEKILTFRIPYYVGPLARGNSRFAWMTRKSEETITPWNFEEVVDKGASAQSFIERMTNFDKNLPNEKVLPKHSLLYEYFTVYNELTKVKYVTEGMRKPAFLSGEQKKAIVDLLFKTNRKVTVKQLKEDYFKKIECFDSVEISGVEDRFNASLGTYHDLLKIIKDKDFLDNEENEDILEDIVLTLTLFEDREMIEERLKTYAHLFDDKVMKQLKRRRYTGWGRLSRKLINGIRDKQSGKTILDFLKSDGFANRNFMQLIHDDSLTFKEDIQKAQVSGQGDSLHEHIANLAGSPAIKKGILQTVKVVDELVKVMGRHKPENIVIEMARENQTTQKGQKNSRERMKRIEEGIKELGSQILKEHPVENTQLQNEKLYLYYLQNGRDMYVDQELDINRLSDYDVDHIVPQSFLKDDSIDNKVLTRSDKARGKSDNVPSEEVVKKMKNYWRQLLNAKLITQRKFDNLTKAERGGLSELDKAGFIKRQLVETRQITKHVAQILDSRMNTKYDENDKLIREVKVITLKSKLVSDFRKDFQFYKVREINNYHHAHDAYLNAVVGTALIKKYPKLESEFVYGDYKVYDVRKMIAKSEQEIGKATAKYFFYSNIMNFFKTEITLANGEIRKRPLIETNGETGEIVWDKGRDFATVRKVLSMPQVNIVKKTEVQTGGFSKESILPKRNSDKLIARKKDWDPKKYGGFDSPTVAYSVLVVAKVEKGKSKKLKSVKELLGITIMERSSFEKNPIDFLEAKGYKEVKKDLIIKLPKYSLFELENGRKRMLASAGELQKGNELALPSKYVNFLYLASHYEKLKGSPEDNEQKQLFVEQHKHYLDEIIEQISEFSKRVILADANLDKVLSAYNKHRDKPIREQAENIIHLFTLTNLGAPAAFKYFDTTIDRKRYTSTKEVLDATLIHQSITGLYETRIDLSQLGGDGGGGSGGGEAAAKGGTAPLEEEYRLFLEAPIQNVTLLEQWKREIPKVWAEINPPGLASTQAPIHVQLLSTALPVRVRQYPITLEAKRSLRETIRKFRAAGILRPVHSPWNTPLLPVRKSGTSEYRMVQDLREVNKRVETIHPTVPNPYTLLSLLPPDRIWYSVLDLKDAFFCIPLAPESQLIFAFEWADAEEGESGQLTWTRLPQGFKNSPTLFNEALNRDLQGFRLDHPSVSLLQYVDDLLIAADTQAACLSATRDLLMTLAELGYRVSGKKAQLCQEEVTYLGFKIHKGSRSLSNSRTQAILQIPVPKTKRQVREFLGKIGYCRLFIPGFAELAQPLYAATRPGNDPLVWGEKEEEAFQSLKLALTQPPALALPSLDKPFQLFVEETSGAAKGVLTQALGPWKRPVAYLSKRLDPVAAGWPRCLRAIAAAALLTREASKLTFGQDIEITSSHNLESLLRSPPDKWLTNARITQYQVLLLDPPRVRFKQTAALNPATLLPETDDTLPIHHCLDTLDSLTSTRPDLTDQPLAQAEATLFTDGSSYIRDGKRYAGAAVVTLDSVIWAEPLPIGTSAQKAELIALTKALEWSKDKSVNIYTDSRYAFATLHVHGMIYRERGWLTAGGKAIKNAPEILALLTAVWLPKRVAVMHCKGHQKDDAPTSTGNRRADEVAREVAIRPLSTQATISAGKRTADGSEFEKRTADGSEFESPKKKAKVE

SEQ ID NO: 1443 - protein, 2093 aa, synthetic construct
MPAAKRVKLDGGDKKYSIGLDIGTNSVGWAVITDEYKVPSKKFKVLGNTDRHSIKKNLIGALLFDSGETAEATRLKRTARRRYTRRKNRICYLQEIFSNEMAKVDDSFFHRLEESFLVEEDKKHERHPIFGNIVDEVAYHEKYPTIYHLRKKLVDSTDKADLRLIYLALAHMIKFRGHFLIEGDLNPDNSDVDKLFIQLVQTYNQLFEENPINASGVDAKAILSARLSKSRRLENLIAQLPGEKKNGLFGNLIALSLGLTPNFKSNFDLAEDAKLQLSKDTYDDDLDNLLAQIGDQYADLFLAAKNLSDAILLSDILRVNTEITKAPLSASMIKRYDEHHQDLTLLKALVRQQLPEKYKEIFFDQSKNGYAGYIDGGASQEEFYKFIKPILEKMDGTEELLVKLNREDLLRKQRTFDNGSIPHQIHLGELHAILRRQEDFYPFLKDNREKIEKILTFRIPYYVGPLARGNSRFAWMTRKSEETITPWNFEEVVDKGASAQSFIERMTNFDKNLPNEKVLPKHSLLYEYFTVYNELTKVKYVTEGMRKPAFLSGEQKKAIVDLLFKTNRKVTVKQLKEDYFKKIECFDSVEISGVEDRFNASLGTYHDLLKIIKDKDFLDNEENEDILEDIVLTLTLFEDREMIEERLKTYAHLFDDKVMKQLKRRRYTGWGRLSRKLINGIRDKQSGKTILDFLKSDGFANRNFMQLIHDDSLTFKEDIQKAQVSGQGDSLHEHIANLAGSPAIKKGILQTVKVVDELVKVMGRHKPENIVIEMARENQTTQKGQKNSRERMKRIEEGIKELGSQILKEHPVENTQLQNEKLYLYYLQNGRDMYVDQELDINRLSDYDVDHIVPQSFLKDDSIDNKVLTRSDKARGKSDNVPSEEVVKKMKNYWRQLLNAKLITQRKFDNLTKAERGGLSELDKAGFIKRQLVETRQITKHVAQILDSRMNTKYDENDKLIREVKVITLKSKLVSDFRKDFQFYKVREINNYHHAHDAYLNAVVGTALIKKYPKLESEFVYGDYKVYDVRKMIAKSEQEIGKATAKYFFYSNIMNFFKTEITLANGEIRKRPLIETNGETGEIVWDKGRDFATVRKVLSMPQVNIVKKTEVQTGGFSKESILPKRNSDKLIARKKDWDPKKYGGFDSPTVAYSVLVVAKVEKGKSKKLKSVKELLGITIMERSSFEKNPIDFLEAKGYKEVKKDLIIKLPKYSLFELENGRKRMLASAGELQKGNELALPSKYVNFLYLASHYEKLKGSPEDNEQKQLFVEQHKHYLDEIIEQISEFSKRVILADANLDKVLSAYNKHRDKPIREQAENIIHLFTLTNLGAPAAFKYFDTTIDRKRYTSTKEVLDATLIHQSITGLYETRIDLSQLGGDGGGSSGSSGGTAPLEEEYRLFLEAPIQNVTLLEQWKREIPKVWAEINPPGLASTQAPIHVQLLSTALPVRVRQYPITLEAKRSLRETIRKFRAAGILRPVHSPWNTPLLPVRKSGTSEYRMVQDLREVNKRVETIHPTVPNPYTLLSLLPPDRIWYSVLDLKDAFFCIPLAPESQLIFAFEWADAEEGESGQLTWTRLPQGFKNSPTLFNEALNRDLQGFRLDHPSVSLLQYVDDLLIAADTQAACLSATRDLLMTLAELGYRVSGKKAQLCQEEVTYLGFKIHKGSRSLSNSRTQAILQIPVPKTKRQVREFLGKIGYCRLFIPGFAELAQPLYAATRPGNDPLVWGEKEEEAFQSLKLALTQPPALALPSLDKPFQLFVEETSGAAKGVLTQALGPWKRPVAYLSKRLDPVAAGWPRCLRAIAAAALLTREASKLTFGQDIEITSSHNLESLLRSPPDKWLTNARITQYQVLLLDPPRVRFKQTAALNPATLLPETDDTLPIHHCLDTLDSLTSTRPDLTDQPLAQAEATLFTDGSSYIRDGKRYAGAAVVTLDSVIWAEPLPIGTSAQKAELIALTKALEWSKDKSVNIYTDSRYAFATLHVHGMIYRERGWLTAGGKAIKNAPEILALLTAVWLPKRVAVMHCKGHQKDDAPTSTGNRRADEVAREVAIRPLSTQATISAGKRTADGSEFEKRTADGSEFESPKKKAKVE

SEQ ID NO: 1444 - protein, 2093 aa, synthetic construct
MPAAKRVKLDGGDKKYSIGLDIGTNSVGWAVITDEYKVPSKKFKVLGNTDRHSIKKNLIGALLFDSGETAEATRLKRTARRRYTRRKNRICYLQEIFSNEMAKVDDSFFHRLEESFLVEEDKKHERHPIFGNIVDEVAYHEKYPTIYHLRKKLVDSTDKADLRLIYLALAHMIKFRGHFLIEGDLNPDNSDVDKLFIQLVQTYNQLFEENPINASGVDAKAILSARLSKSRRLENLIAQLPGEKKNGLFGNLIALSLGLTPNFKSNFDLAEDAKLQLSKDTYDDDLDNLLAQIGDQYADLFLAAKNLSDAILLSDILRVNTEITKAPLSASMIKRYDEHHQDLTLLKALVRQQLPEKYKEIFFDQSKNGYAGYIDGGASQEEFYKFIKPILEKMDGTEELLVKLNREDLLRKQRTFDNGSIPHQIHLGELHAILRRQEDFYPFLKDNREKIEKILTFRIPYYVGPLARGNSRFAWMTRKSEETITPWNFEEVVDKGASAQSFIERMTNFDKNLPNEKVLPKHSLLYEYFTVYNELTKVKYVTEGMRKPAFLSGEQKKAIVDLLFKTNRKVTVKQLKEDYFKKIECFDSVEISGVEDRFNASLGTYHDLLKIIKDKDFLDNEENEDILEDIVLTLTLFEDREMIEERLKTYAHLFDDKVMKQLKRRRYTGWGRLSRKLINGIRDKQSGKTILDFLKSDGFANRNFMQLIHDDSLTFKEDIQKAQVSGQGDSLHEHIANLAGSPAIKKGILQTVKVVDELVKVMGRHKPENIVIEMARENQTTQKGQKNSRERMKRIEEGIKELGSQILKEHPVENTQLQNEKLYLYYLQNGRDMYVDQELDINRLSDYDVDHIVPQSFLKDDSIDNKVLTRSDKARGKSDNVPSEEVVKKMKNYWRQLLNAKLITQRKFDNLTKAERGGLSELDKAGFIKRQLVETRQITKHVAQILDSRMNTKYDENDKLIREVKVITLKSKLVSDFRKDFQFYKVREINNYHHAHDAYLNAVVGTALIKKYPKLESEFVYGDYKVYDVRKMIAKSEQEIGKATAKYFFYSNIMNFFKTEITLANGEIRKRPLIETNGETGEIVWDKGRDFATVRKVLSMPQVNIVKKTEVQTGGFSKESILPKRNSDKLIARKKDWDPKKYGGFDSPTVAYSVLVVAKVEKGKSKKLKSVKELLGITIMERSSFEKNPIDFLEAKGYKEVKKDLIIKLPKYSLFELENGRKRMLASAGELQKGNELALPSKYVNFLYLASHYEKLKGSPEDNEQKQLFVEQHKHYLDEIIEQISEFSKRVILADANLDKVLSAYNKHRDKPIREQAENIIHLFTLTNLGAPAAFKYFDTTIDRKRYTSTKEVLDATLIHQSITGLYETRIDLSQLGGDGGGGGGSSGGTAPLEEEYRLFLEAPIQNVTLLEQWKREIPKVWAEINPPGLASTQAPIHVQLLSTALPVRVRQYPITLEAKRSLRETIRKFRAAGILRPVHSPWNTPLLPVRKSGTSEYRMVQDLREVNKRVETIHPTVPNPYTLLSLLPPDRIWYSVLDLKDAFFCIPLAPESQLIFAFEWADAEEGESGQLTWTRLPQGFKNSPTLFNEALNRDLQGFRLDHPSVSLLQYVDDLLIAADTQAACLSATRDLLMTLAELGYRVSGKKAQLCQEEVTYLGFKIHKGSRSLSNSRTQAILQIPVPKTKRQVREFLGKIGYCRLFIPGFAELAQPLYAATRPGNDPLVWGEKEEEAFQSLKLALTQPPALALPSLDKPFQLFVEETSGAAKGVLTQALGPWKRPVAYLSKRLDPVAAGWPRCLRAIAAAALLTREASKLTFGQDIEITSSHNLESLLRSPPDKWLTNARITQYQVLLLDPPRVRFKQTAALNPATLLPETDDTLPIHHCLDTLDSLTSTRPDLTDQPLAQAEATLFTDGSSYIRDGKRYAGAAVVTLDSVIWAEPLPIGTSAQKAELIALTKALEWSKDKSVNIYTDSRYAFATLHVHGMIYRERGWLTAGGKAIKNAPEILALLTAVWLPKRVAVMHCKGHQKDDAPTSTGNRRADEVAREVAIRPLSTQATISAGKRTADGSEFEKRTADGSEFESPKKKAKVE

SEQ ID NO: 1445 - protein, 2093 aa, synthetic construct
MPAAKRVKLDGGDKKYSIGLDIGTNSVGWAVITDEYKVPSKKFKVLGNTDRHSIKKNLIGALLFDSGETAEATRLKRTARRRYTRRKNRICYLQEIFSNEMAKVDDSFFHRLEESFLVEEDKKHERHPIFGNIVDEVAYHEKYPTIYHLRKKLVDSTDKADLRLIYLALAHMIKFRGHFLIEGDLNPDNSDVDKLFIQLVQTYNQLFEENPINASGVDAKAILSARLSKSRRLENLIAQLPGEKKNGLFGNLIALSLGLTPNFKSNFDLAEDAKLQLSKDTYDDDLDNLLAQIGDQYADLFLAAKNLSDAILLSDILRVNTEITKAPLSASMIKRYDEHHQDLTLLKALVRQQLPEKYKEIFFDQSKNGYAGYIDGGASQEEFYKFIKPILEKMDGTEELLVKLNREDLLRKQRTFDNGSIPHQIHLGELHAILRRQEDFYPFLKDNREKIEKILTFRIPYYVGPLARGNSRFAWMTRKSEETITPWNFEEVVDKGASAQSFIERMTNFDKNLPNEKVLPKHSLLYEYFTVYNELTKVKYVTEGMRKPAFLSGEQKKAIVDLLFKTNRKVTVKQLKEDYFKKIECFDSVEISGVEDRFNASLGTYHDLLKIIKDKDFLDNEENEDILEDIVLTLTLFEDREMIEERLKTYAHLFDDKVMKQLKRRRYTGWGRLSRKLINGIRDKQSGKTILDFLKSDGFANRNFMQLIHDDSLTFKEDIQKAQVSGQGDSLHEHIANLAGSPAIKKGILQTVKVVDELVKVMGRHKPENIVIEMARENQTTQKGQKNSRERMKRIEEGIKELGSQILKEHPVENTQLQNEKLYLYYLQNGRDMYVDQELDINRLSDYDVDHIVPQSFLKDDSIDNKVLTRSDKARGKSDNVPSEEVVKKMKNYWRQLLNAKLITQRKFDNLTKAERGGLSELDKAGFIKRQLVETRQITKHVAQILDSRMNTKYDENDKLIREVKVITLKSKLVSDFRKDFQFYKVREINNYHHAHDAYLNAVVGTALIKKYPKLESEFVYGDYKVYDVRKMIAKSEQEIGKATAKYFFYSNIMNFFKTEITLANGEIRKRPLIETNGETGEIVWDKGRDFATVRKVLSMPQVNIVKKTEVQTGGFSKESILPKRNSDKLIARKKDWDPKKYGGFDSPTVAYSVLVVAKVEKGKSKKLKSVKELLGITIMERSSFEKNPIDFLEAKGYKEVKKDLIIKLPKYSLFELENGRKRMLASAGELQKGNELALPSKYVNFLYLASHYEKLKGSPEDNEQKQLFVEQHKHYLDEIIEQISEFSKRVILADANLDKVLSAYNKHRDKPIREQAENIIHLFTLTNLGAPAAFKYFDTTIDRKRYTSTKEVLDATLIHQSITGLYETRIDLSQLGGDGGGSSGGSGGTAPLEEEYRLFLEAPIQNVTLLEQWKREIPKVWAEINPPGLASTQAPIHVQLLSTALPVRVRQYPITLEAKRSLRETIRKFRAAGILRPVHSPWNTPLLPVRKSGTSEYRMVQDLREVNKRVETIHPTVPNPYTLLSLLPPDRIWYSVLDLKDAFFCIPLAPESQLIFAFEWADAEEGESGQLTWTRLPQGFKNSPTLFNEALNRDLQGFRLDHPSVSLLQYVDDLLIAADTQAACLSATRDLLMTLAELGYRVSGKKAQLCQEEVTYLGFKIHKGSRSLSNSRTQAILQIPVPKTKRQVREFLGKIGYCRLFIPGFAELAQPLYAATRPGNDPLVWGEKEEEAFQSLKLALTQPPALALPSLDKPFQLFVEETSGAAKGVLTQALGPWKRPVAYLSKRLDPVAAGWPRCLRAIAAAALLTREASKLTFGQDIEITSSHNLESLLRSPPDKWLTNARITQYQVLLLDPPRVRFKQTAALNPATLLPETDDTLPIHHCLDTLDSLTSTRPDLTDQPLAQAEATLFTDGSSYIRDGKRYAGAAVVTLDSVIWAEPLPIGTSAQKAELIALTKALEWSKDKSVNIYTDSRYAFATLHVHGMIYRERGWLTAGGKAIKNAPEILALLTAVWLPKRVAVMHCKGHQKDDAPTSTGNRRADEVAREVAIRPLSTQATISAGKRTADGSEFEKRTADGSEFESPKKKAKVE

SEQ ID NO: 1446 - protein, 2095 aa, synthetic construct
MPAAKRVKLDGGDKKYSIGLDIGTNSVGWAVITDEYKVPSKKFKVLGNTDRHSIKKNLIGALLFDSGETAEATRLKRTARRRYTRRKNRICYLQEIFSNEMAKVDDSFFHRLEESFLVEEDKKHERHPIFGNIVDEVAYHEKYPTIYHLRKKLVDSTDKADLRLIYLALAHMIKFRGHFLIEGDLNPDNSDVDKLFIQLVQTYNQLFEENPINASGVDAKAILSARLSKSRRLENLIAQLPGEKKNGLFGNLIALSLGLTPNFKSNFDLAEDAKLQLSKDTYDDDLDNLLAQIGDQYADLFLAAKNLSDAILLSDILRVNTEITKAPLSASMIKRYDEHHQDLTLLKALVRQQLPEKYKEIFFDQSKNGYAGYIDGGASQEEFYKFIKPILEKMDGTEELLVKLNREDLLRKQRTFDNGSIPHQIHLGELHAILRRQEDFYPFLKDNREKIEKILTFRIPYYVGPLARGNSRFAWMTRKSEETITPWNFEEVVDKGASAQSFIERMTNFDKNLPNEKVLPKHSLLYEYFTVYNELTKVKYVTEGMRKPAFLSGEQKKAIVDLLFKTNRKVTVKQLKEDYFKKIECFDSVEISGVEDRFNASLGTYHDLLKIIKDKDFLDNEENEDILEDIVLTLTLFEDREMIEERLKTYAHLFDDKVMKQLKRRRYTGWGRLSRKLINGIRDKQSGKTILDFLKSDGFANRNFMQLIHDDSLTFKEDIQKAQVSGQGDSLHEHIANLAGSPAIKKGILQTVKVVDELVKVMGRHKPENIVIEMARENQTTQKGQKNSRERMKRIEEGIKELGSQILKEHPVENTQLQNEKLYLYYLQNGRDMYVDQELDINRLSDYDVDHIVPQSFLKDDSIDNKVLTRSDKARGKSDNVPSEEVVKKMKNYWRQLLNAKLITQRKFDNLTKAERGGLSELDKAGFIKRQLVETRQITKHVAQILDSRMNTKYDENDKLIREVKVITLKSKLVSDFRKDFQFYKVREINNYHHAHDAYLNAVVGTALIKKYPKLESEFVYGDYKVYDVRKMIAKSEQEIGKATAKYFFYSNIMNFFKTEITLANGEIRKRPLIETNGETGEIVWDKGRDFATVRKVLSMPQVNIVKKTEVQTGGFSKESILPKRNSDKLIARKKDWDPKKYGGFDSPTVAYSVLVVAKVEKGKSKKLKSVKELLGITIMERSSFEKNPIDFLEAKGYKEVKKDLIIKLPKYSLFELENGRKRMLASAGELQKGNELALPSKYVNFLYLASHYEKLKGSPEDNEQKQLFVEQHKHYLDEIIEQISEFSKRVILADANLDKVLSAYNKHRDKPIREQAENIIHLFTLTNLGAPAAFKYFDTTIDRKRYTSTKEVLDATLIHQSITGLYETRIDLSQLGGDGGGGGEAAAKGGTAPLEEEYRLFLEAPIQNVTLLEQWKREIPKVWAEINPPGLASTQAPIHVQLLSTALPVRVRQYPITLEAKRSLRETIRKFRAAGILRPVHSPWNTPLLPVRKSGTSEYRMVQDLREVNKRVETIHPTVPNPYTLLSLLPPDRIWYSVLDLKDAFFCIPLAPESQLIFAFEWADAEEGESGQLTWTRLPQGFKNSPTLFNEALNRDLQGFRLDHPSVSLLQYVDDLLIAADTQAACLSATRDLLMTLAELGYRVSGKKAQLCQEEVTYLGFKIHKGSRSLSNSRTQAILQIPVPKTKRQVREFLGKIGYCRLFIPGFAELAQPLYAATRPGNDPLVWGEKEEEAFQSLKLALTQPPALALPSLDKPFQLFVEETSGAAKGVLTQALGPWKRPVAYLSKRLDPVAAGWPRCLRAIAAAALLTREASKLTFGQDIEITSSHNLESLLRSPPDKWLTNARITQYQVLLLDPPRVRFKQTAALNPATLLPETDDTLPIHHCLDTLDSLTSTRPDLTDQPLAQAEATLFTDGSSYIRDGKRYAGAAVVTLDSVIWAEPLPIGTSAQKAELIALTKALEWSKDKSVNIYTDSRYAFATLHVHGMIYRERGWLTAGGKAIKNAPEILALLTAVWLPKRVAVMHCKGHQKDDAPTSTGNRRADEVAREVAIRPLSTQATISAGKRTADGSEFEKRTADGSEFESPKKKAKVE

SEQ ID NO: 1447 - protein, 2096 aa, synthetic construct
MPAAKRVKLDGGDKKYSIGLDIGTNSVGWAVITDEYKVPSKKFKVLGNTDRHSIKKNLIGALLFDSGETAEATRLKRTARRRYTRRKNRICYLQEIFSNEMAKVDDSFFHRLEESFLVEEDKKHERHPIFGNIVDEVAYHEKYPTIYHLRKKLVDSTDKADLRLIYLALAHMIKFRGHFLIEGDLNPDNSDVDKLFIQLVQTYNQLFEENPINASGVDAKAILSARLSKSRRLENLIAQLPGEKKNGLFGNLIALSLGLTPNFKSNFDLAEDAKLQLSKDTYDDDLDNLLAQIGDQYADLFLAAKNLSDAILLSDILRVNTEITKAPLSASMIKRYDEHHQDLTLLKALVRQQLPEKYKEIFFDQSKNGYAGYIDGGASQEEFYKFIKPILEKMDGTEELLVKLNREDLLRKQRTFDNGSIPHQIHLGELHAILRRQEDFYPFLKDNREKIEKILTFRIPYYVGPLARGNSRFAWMTRKSEETITPWNFEEVVDKGASAQSFIERMTNFDKNLPNEKVLPKHSLLYEYFTVYNELTKVKYVTEGMRKPAFLSGEQKKAIVDLLFKTNRKVTVKQLKEDYFKKIECFDSVEISGVEDRFNASLGTYHDLLKIIKDKDFLDNEENEDILEDIVLTLTLFEDREMIEERLKTYAHLFDDKVMKQLKRRRYTGWGRLSRKLINGIRDKQSGKTILDFLKSDGFANRNFMQLIHDDSLTFKEDIQKAQVSGQGDSLHEHIANLAGSPAIKKGILQTVKVVDELVKVMGRHKPENIVIEMARENQTTQKGQKNSRERMKRIEEGIKELGSQILKEHPVENTQLQNEKLYLYYLQNGRDMYVDQELDINRLSDYDVDHIVPQSFLKDDSIDNKVLTRSDKARGKSDNVPSEEVVKKMKNYWRQLLNAKLITQRKFDNLTKAERGGLSELDKAGFIKRQLVETRQITKHVAQILDSRMNTKYDENDKLIREVKVITLKSKLVSDFRKDFQFYKVREINNYHHAHDAYLNAVVGTALIKKYPKLESEFVYGDYKVYDVRKMIAKSEQEIGKATAKYFFYSNIMNFFKTEITLANGEIRKRPLIETNGETGEIVWDKGRDFATVRKVLSMPQVNIVKKTEVQTGGFSKESILPKRNSDKLIARKKDWDPKKYGGFDSPTVAYSVLVVAKVEKGKSKKLKSVKELLGITIMERSSFEKNPIDFLEAKGYKEVKKDLIIKLPKYSLFELENGRKRMLASAGELQKGNELALPSKYVNFLYLASHYEKLKGSPEDNEQKQLFVEQHKHYLDEIIEQISEFSKRVILADANLDKVLSAYNKHRDKPIREQAENIIHLFTLTNLGAPAAFKYFDTTIDRKRYTSTKEVLDATLIHQSITGLYETRIDLSQLGGDGGPAPGGGGSSGGTAPLEEEYRLFLEAPIQNVTLLEQWKREIPKVWAEINPPGLASTQAPIHVQLLSTALPVRVRQYPITLEAKRSLRETIRKFRAAGILRPVHSPWNTPLLPVRKSGTSEYRMVQDLREVNKRVETIHPTVPNPYTLLSLLPPDRIWYSVLDLKDAFFCIPLAPESQLIFAFEWADAEEGESGQLTWTRLPQGFKNSPTLFNEALNRDLQGFRLDHPSVSLLQYVDDLLIAADTQAACLSATRDLLMTLAELGYRVSGKKAQLCQEEVTYLGFKIHKGSRSLSNSRTQAILQIPVPKTKRQVREFLGKIGYCRLFIPGFAELAQPLYAATRPGNDPLVWGEKEEEAFQSLKLALTQPPALALPSLDKPFQLFVEETSGAAKGVLTQALGPWKRPVAYLSKRLDPVAAGWPRCLRAIAAAALLTREASKLTFGQDIEITSSHNLESLLRSPPDKWLTNARITQYQVLLLDPPRVRFKQTAALNPATLLPETDDTLPIHHCLDTLDSLTSTRPDLTDQPLAQAEATLFTDGSSYIRDGKRYAGAAVVTLDSVIWAEPLPIGTSAQKAELIALTKALEWSKDKSVNIYTDSRYAFATLHVHGMIYRERGWLTAGGKAIKNAPEILALLTAVWLPKRVAVMHCKGHQKDDAPTSTGNRRADEVAREVAIRPLSTQATISAGKRTADGSEFEKRTADGSEFESPKKKAKVE

SEQ ID NO: 1448 - protein, 2129 aa, synthetic construct
MPAAKRVKLDGGDKKYSIGLDIGTNSVGWAVITDEYKVPSKKFKVLGNTDRHSIKKNLIGALLFDSGETAEATRLKRTARRRYTRRKNRICYLQEIFSNEMAKVDDSFFHRLEESFLVEEDKKHERHPIFGNIVDEVAYHEKYPTIYHLRKKLVDSTDKADLRLIYLALAHMIKFRGHFLIEGDLNPDNSDVDKLFIQLVQTYNQLFEENPINASGVDAKAILSARLSKSRRLENLIAQLPGEKKNGLFGNLIALSLGLTPNFKSNFDLAEDAKLQLSKDTYDDDLDNLLAQIGDQYADLFLAAKNLSDAILLSDILRVNTEITKAPLSASMIKRYDEHHQDLTLLKALVRQQLPEKYKEIFFDQSKNGYAGYIDGGASQEEFYKFIKPILEKMDGTEELLVKLNREDLLRKQRTFDNGSIPHQIHLGELHAILRRQEDFYPFLKDNREKIEKILTFRIPYYVGPLARGNSRFAWMTRKSEETITPWNFEEVVDKGASAQSFIERMTNFDKNLPNEKVLPKHSLLYEYFTVYNELTKVKYVTEGMRKPAFLSGEQKKAIVDLLFKTNRKVTVKQLKEDYFKKIECFDSVEISGVEDRFNASLGTYHDLLKIIKDKDFLDNEENEDILEDIVLTLTLFEDREMIEERLKTYAHLFDDKVMKQLKRRRYTGWGRLSRKLINGIRDKQSGKTILDFLKSDGFANRNFMQLIHDDSLTFKEDIQKAQVSGQGDSLHEHIANLAGSPAIKKGILQTVKVVDELVKVMGRHKPENIVIEMARENQTTQKGQKNSRERMKRIEEGIKELGSQILKEHPVENTQLQNEKLYLYYLQNGRDMYVDQELDINRLSDYDVDHIVPQSFLKDDSIDNKVLTRSDKARGKSDNVPSEEVVKKMKNYWRQLLNAKLITQRKFDNLTKAERGGLSELDKAGFIKRQLVETRQITKHVAQILDSRMNTKYDENDKLIREVKVITLKSKLVSDFRKDFQFYKVREINNYHHAHDAYLNAVVGTALIKKYPKLESEFVYGDYKVYDVRKMIAKSEQEIGKATAKYFFYSNIMNFFKTEITLANGEIRKRPLIETNGETGEIVWDKGRDFATVRKVLSMPQVNIVKKTEVQTGGFSKESILPKRNSDKLIARKKDWDPKKYGGFDSPTVAYSVLVVAKVEKGKSKKLKSVKELLGITIMERSSFEKNPIDFLEAKGYKEVKKDLIIKLPKYSLFELENGRKRMLASAGELQKGNELALPSKYVNFLYLASHYEKLKGSPEDNEQKQLFVEQHKHYLDEIIEQISEFSKRVILADANLDKVLSAYNKHRDKPIREQAENIIHLFTLTNLGAPAAFKYFDTTIDRKRYTSTKEVLDATLIHQSITGLYETRIDLSQLGGDGGAEAAAKEAAAKEAAAKEAAAKALEAEAAAKEAAAKEAAAKEAAAKAGGVLNLEEEYRLHEKPVPSSIDPSWLQLFPTVWAERAGMGLANQVPPVVVELRSGASPVAVRQYPMSKEAREGIRPHIQKFLDLGVLVPCRSPWNTPLLPVKKPGTNDYRPVQDLREINKRVQDIHPTVPNPYNLLSSLPPSYTWYSVLDLKDAFFCLRLHPNSQPLFAFEWKDPEKGNTGQLTWTRLPQGFKNSPTLFNEALHRDLAPFRALNPQVVLLQYVDDLLVAAPTYEDCKKGTQKLLQELSKLGYRVSAKKAQLCQREVTYLGYLLKEGKRWLTPARKATVMKIPVPTTPRQVREFLGKAGFCRLFIPGFASLAAPLYPLTKPSIPFIWTEEHQQAFDHIKKALLSAPALALPDLTKPFTLYIDERAGVARGVLTQTLGPWRRPVAYLSKKLDPVASGWPTCLKAVAAVALLLKDADKLTLGQNVTVIASHSLESIVRQPPDRWMTNARMTHYQSLLLNERVSFAPPAVLNPATLLPVESEATPVHRCSEILAEETGTRRDLEDQPLPGVPTWYTDGSSFITEGKRRAGAPIVDGKRTVWASSLPEGTSAQKAELVALTQALRLAEGKNINIYTDSRYAFATAHIHGAIYKQRGWLTSAGKDIKNKEEILALLEAIHLPRRVAIIHCPGHQRGSNPVATGNRRADEAAKQAALSTRVLAGTTKPAGKRTADGSEFEKRTADGSEFESPKKKAKVE

SEQ ID NO: 1449 - protein, 2092 aa, synthetic construct
MPAAKRVKLDGGDKKYSIGLDIGTNSVGWAVITDEYKVPSKKFKVLGNTDRHSIKKNLIGALLFDSGETAEATRLKRTARRRYTRRKNRICYLQEIFSNEMAKVDDSFFHRLEESFLVEEDKKHERHPIFGNIVDEVAYHEKYPTIYHLRKKLVDSTDKADLRLIYLALAHMIKFRGHFLIEGDLNPDNSDVDKLFIQLVQTYNQLFEENPINASGVDAKAILSARLSKSRRLENLIAQLPGEKKNGLFGNLIALSLGLTPNFKSNFDLAEDAKLQLSKDTYDDDLDNLLAQIGDQYADLFLAAKNLSDAILLSDILRVNTEITKAPLSASMIKRYDEHHQDLTLLKALVRQQLPEKYKEIFFDQSKNGYAGYIDGGASQEEFYKFIKPILEKMDGTEELLVKLNREDLLRKQRTFDNGSIPHQIHLGELHAILRRQEDFYPFLKDNREKIEKILTFRIPYYVGPLARGNSRFAWMTRKSEETITPWNFEEVVDKGASAQSFIERMTNFDKNLPNEKVLPKHSLLYEYFTVYNELTKVKYVTEGMRKPAFLSGEQKKAIVDLLFKTNRKVTVKQLKEDYFKKIECFDSVEISGVEDRFNASLGTYHDLLKIIKDKDFLDNEENEDILEDIVLTLTLFEDREMIEERLKTYAHLFDDKVMKQLKRRRYTGWGRLSRKLINGIRDKQSGKTILDFLKSDGFANRNFMQLIHDDSLTFKEDIQKAQVSGQGDSLHEHIANLAGSPAIKKGILQTVKVVDELVKVMGRHKPENIVIEMARENQTTQKGQKNSRERMKRIEEGIKELGSQILKEHPVENTQLQNEKLYLYYLQNGRDMYVDQELDINRLSDYDVDHIVPQSFLKDDSIDNKVLTRSDKARGKSDNVPSEEVVKKMKNYWRQLLNAKLITQRKFDNLTKAERGGLSELDKAGFIKRQLVETRQITKHVAQILDSRMNTKYDENDKLIREVKVITLKSKLVSDFRKDFQFYKVREINNYHHAHDAYLNAVVGTALIKKYPKLESEFVYGDYKVYDVRKMIAKSEQEIGKATAKYFFYSNIMNFFKTEITLANGEIRKRPLIETNGETGEIVWDKGRDFATVRKVLSMPQVNIVKKTEVQTGGFSKESILPKRNSDKLIARKKDWDPKKYGGFDSPTVAYSVLVVAKVEKGKSKKLKSVKELLGITIMERSSFEKNPIDFLEAKGYKEVKKDLIIKLPKYSLFELENGRKRMLASAGELQKGNELALPSKYVNFLYLASHYEKLKGSPEDNEQKQLFVEQHKHYLDEIIEQISEFSKRVILADANLDKVLSAYNKHRDKPIREQAENIIHLFTLTNLGAPAAFKYFDTTIDRKRYTSTKEVLDATLIHQSITGLYETRIDLSQLGGDGGGGSGGSGGSGGVLNLEEEYRLHEKPVPSSIDPSWLQLFPTVWAERAGMGLANQVPPVVVELRSGASPVAVRQYPMSKEAREGIRPHIQKFLDLGVLVPCRSPWNTPLLPVKKPGTNDYRPVQDLREINKRVQDIHPTVPNPYNLLSSLPPSYTWYSVLDLKDAFFCLRLHPNSQPLFAFEWKDPEKGNTGQLTWTRLPQGFKNSPTLFNEALHRDLAPFRALNPQVVLLQYVDDLLVAAPTYEDCKKGTQKLLQELSKLGYRVSAKKAQLCQREVTYLGYLLKEGKRWLTPARKATVMKIPVPTTPRQVREFLGKAGFCRLFIPGFASLAAPLYPLTKPSIPFIWTEEHQQAFDHIKKALLSAPALALPDLTKPFTLYIDERAGVARGVLTQTLGPWRRPVAYLSKKLDPVASGWPTCLKAVAAVALLLKDADKLTLGQNVTVIASHSLESIVRQPPDRWMTNARMTHYQSLLLNERVSFAPPAVLNPATLLPVESEATPVHRCSEILAEETGTRRDLEDQPLPGVPTWYTDGSSFITEGKRRAGAPIVDGKRTVWASSLPEGTSAQKAELVALTQALRLAEGKNINIYTDSRYAFATAHIHGAIYKQRGWLTSAGKDIKNKEEILALLEAIHLPRRVAIIHCPGHQRGSNPVATGNRRADEAAKQAALSTRVLAGTTKPAGKRTADGSEFEKRTADGSEFESPKKKAKVE

SEQ ID NO: 1450 - protein, 2089 aa, synthetic construct
MPAAKRVKLDGGDKKYSIGLDIGTNSVGWAVITDEYKVPSKKFKVLGNTDRHSIKKNLIGALLFDSGETAEATRLKRTARRRYTRRKNRICYLQEIFSNEMAKVDDSFFHRLEESFLVEEDKKHERHPIFGNIVDEVAYHEKYPTIYHLRKKLVDSTDKADLRLIYLALAHMIKFRGHFLIEGDLNPDNSDVDKLFIQLVQTYNQLFEENPINASGVDAKAILSARLSKSRRLENLIAQLPGEKKNGLFGNLIALSLGLTPNFKSNFDLAEDAKLQLSKDTYDDDLDNLLAQIGDQYADLFLAAKNLSDAILLSDILRVNTEITKAPLSASMIKRYDEHHQDLTLLKALVRQQLPEKYKEIFFDQSKNGYAGYIDGGASQEEFYKFIKPILEKMDGTEELLVKLNREDLLRKQRTFDNGSIPHQIHLGELHAILRRQEDFYPFLKDNREKIEKILTFRIPYYVGPLARGNSRFAWMTRKSEETITPWNFEEVVDKGASAQSFIERMTNFDKNLPNEKVLPKHSLLYEYFTVYNELTKVKYVTEGMRKPAFLSGEQKKAIVDLLFKTNRKVTVKQLKEDYFKKIECFDSVEISGVEDRFNASLGTYHDLLKIIKDKDFLDNEENEDILEDIVLTLTLFEDREMIEERLKTYAHLFDDKVMKQLKRRRYTGWGRLSRKLINGIRDKQSGKTILDFLKSDGFANRNFMQLIHDDSLTFKEDIQKAQVSGQGDSLHEHIANLAGSPAIKKGILQTVKVVDELVKVMGRHKPENIVIEMARENQTTQKGQKNSRERMKRIEEGIKELGSQILKEHPVENTQLQNEKLYLYYLQNGRDMYVDQELDINRLSDYDVDHIVPQSFLKDDSIDNKVLTRSDKARGKSDNVPSEEVVKKMKNYWRQLLNAKLITQRKFDNLTKAERGGLSELDKAGFIKRQLVETRQITKHVAQILDSRMNTKYDENDKLIREVKVITLKSKLVSDFRKDFQFYKVREINNYHHAHDAYLNAVVGTALIKKYPKLESEFVYGDYKVYDVRKMIAKSEQEIGKATAKYFFYSNIMNFFKTEITLANGEIRKRPLIETNGETGEIVWDKGRDFATVRKVLSMPQVNIVKKTEVQTGGFSKESILPKRNSDKLIARKKDWDPKKYGGFDSPTVAYSVLVVAKVEKGKSKKLKSVKELLGITIMERSSFEKNPIDFLEAKGYKEVKKDLIIKLPKYSLFELENGRKRMLASAGELQKGNELALPSKYVNFLYLASHYEKLKGSPEDNEQKQLFVEQHKHYLDEIIEQISEFSKRVILADANLDKVLSAYNKHRDKPIREQAENIIHLFTLTNLGAPAAFKYFDTTIDRKRYTSTKEVLDATLIHQSITGLYETRIDLSQLGGDGGGGSGSSGGVLNLEEEYRLHEKPVPSSIDPSWLQLFPTVWAERAGMGLANQVPPVVVELRSGASPVAVRQYPMSKEAREGIRPHIQKFLDLGVLVPCRSPWNTPLLPVKKPGTNDYRPVQDLREINKRVQDIHPTVPNPYNLLSSLPPSYTWYSVLDLKDAFFCLRLHPNSQPLFAFEWKDPEKGNTGQLTWTRLPQGFKNSPTLFNEALHRDLAPFRALNPQVVLLQYVDDLLVAAPTYEDCKKGTQKLLQELSKLGYRVSAKKAQLCQREVTYLGYLLKEGKRWLTPARKATVMKIPVPTTPRQVREFLGKAGFCRLFIPGFASLAAPLYPLTKPSIPFIWTEEHQQAFDHIKKALLSAPALALPDLTKPFTLYIDERAGVARGVLTQTLGPWRRPVAYLSKKLDPVASGWPTCLKAVAAVALLLKDADKLTLGQNVTVIASHSLESIVRQPPDRWMTNARMTHYQSLLLNERVSFAPPAVLNPATLLPVESEATPVHRCSEILAEETGTRRDLEDQPLPGVPTWYTDGSSFITEGKRRAGAPIVDGKRTVWASSLPEGTSAQKAELVALTQALRLAEGKNINIYTDSRYAFATAHIHGAIYKQRGWLTSAGKDIKNKEEILALLEAIHLPRRVAIIHCPGHQRGSNPVATGNRRADEAAKQAALSTRVLAGTTKPAGKRTADGSEFEKRTADGSEFESPKKKAKVE

SEQ ID NO: 1451 - protein, 2094 aa, synthetic construct
MPAAKRVKLDGGDKKYSIGLDIGTNSVGWAVITDEYKVPSKKFKVLGNTDRHSIKKNLIGALLFDSGETAEATRLKRTARRRYTRRKNRICYLQEIFSNEMAKVDDSFFHRLEESFLVEEDKKHERHPIFGNIVDEVAYHEKYPTIYHLRKKLVDSTDKADLRLIYLALAHMIKFRGHFLIEGDLNPDNSDVDKLFIQLVQTYNQLFEENPINASGVDAKAILSARLSKSRRLENLIAQLPGEKKNGLFGNLIALSLGLTPNFKSNFDLAEDAKLQLSKDTYDDDLDNLLAQIGDQYADLFLAAKNLSDAILLSDILRVNTEITKAPLSASMIKRYDEHHQDLTLLKALVRQQLPEKYKEIFFDQSKNGYAGYIDGGASQEEFYKFIKPILEKMDGTEELLVKLNREDLLRKQRTFDNGSIPHQIHLGELHAILRRQEDFYPFLKDNREKIEKILTFRIPYYVGPLARGNSRFAWMTRKSEETITPWNFEEVVDKGASAQSFIERMTNFDKNLPNEKVLPKHSLLYEYFTVYNELTKVKYVTEGMRKPAFLSGEQKKAIVDLLFKTNRKVTVKQLKEDYFKKIECFDSVEISGVEDRFNASLGTYHDLLKIIKDKDFLDNEENEDILEDIVLTLTLFEDREMIEERLKTYAHLFDDKVMKQLKRRRYTGWGRLSRKLINGIRDKQSGKTILDFLKSDGFANRNFMQLIHDDSLTFKEDIQKAQVSGQGDSLHEHIANLAGSPAIKKGILQTVKVVDELVKVMGRHKPENIVIEMARENQTTQKGQKNSRERMKRIEEGIKELGSQILKEHPVENTQLQNEKLYLYYLQNGRDMYVDQELDINRLSDYDVDHIVPQSFLKDDSIDNKVLTRSDKARGKSDNVPSEEVVKKMKNYWRQLLNAKLITQRKFDNLTKAERGGLSELDKAGFIKRQLVETRQITKHVAQILDSRMNTKYDENDKLIREVKVITLKSKLVSDFRKDFQFYKVREINNYHHAHDAYLNAVVGTALIKKYPKLESEFVYGDYKVYDVRKMIAKSEQEIGKATAKYFFYSNIMNFFKTEITLANGEIRKRPLIETNGETGEIVWDKGRDFATVRKVLSMPQVNIVKKTEVQTGGFSKESILPKRNSDKLIARKKDWDPKKYGGFDSPTVAYSVLVVAKVEKGKSKKLKSVKELLGITIMERSSFEKNPIDFLEAKGYKEVKKDLIIKLPKYSLFELENGRKRMLASAGELQKGNELALPSKYVNFLYLASHYEKLKGSPEDNEQKQLFVEQHKHYLDEIIEQISEFSKRVILADANLDKVLSAYNKHRDKPIREQAENIIHLFTLTNLGAPAAFKYFDTTIDRKRYTSTKEVLDATLIHQSITGLYETRIDLSQLGGDGGEAAAKGGGGGSGGVLNLEEEYRLHEKPVPSSIDPSWLQLFPTVWAERAGMGLANQVPPVVVELRSGASPVAVRQYPMSKEAREGIRPHIQKFLDLGVLVPCRSPWNTPLLPVKKPGTNDYRPVQDLREINKRVQDIHPTVPNPYNLLSSLPPSYTWYSVLDLKDAFFCLRLHPNSQPLFAFEWKDPEKGNTGQLTWTRLPQGFKNSPTLFNEALHRDLAPFRALNPQVVLLQYVDDLLVAAPTYEDCKKGTQKLLQELSKLGYRVSAKKAQLCQREVTYLGYLLKEGKRWLTPARKATVMKIPVPTTPRQVREFLGKAGFCRLFIPGFASLAAPLYPLTKPSIPFIWTEEHQQAFDHIKKALLSAPALALPDLTKPFTLYIDERAGVARGVLTQTLGPWRRPVAYLSKKLDPVASGWPTCLKAVAAVALLLKDADKLTLGQNVTVIASHSLESIVRQPPDRWMTNARMTHYQSLLLNERVSFAPPAVLNPATLLPVESEATPVHRCSEILAEETGTRRDLEDQPLPGVPTWYTDGSSFITEGKRRAGAPIVDGKRTVWASSLPEGTSAQKAELVALTQALRLAEGKNINIYTDSRYAFATAHIHGAIYKQRGWLTSAGKDIKNKEEILALLEAIHLPRRVAIIHCPGHQRGSNPVATGNRRADEAAKQAALSTRVLAGTTKPAGKRTADGSEFEKRTADGSEFESPKKKAKVE

SEQ ID NO: 1452 - protein, 2098 aa, synthetic construct
MPAAKRVKLDGGDKKYSIGLDIGTNSVGWAVITDEYKVPSKKFKVLGNTDRHSIKKNLIGALLFDSGETAEATRLKRTARRRYTRRKNRICYLQEIFSNEMAKVDDSFFHRLEESFLVEEDKKHERHPIFGNIVDEVAYHEKYPTIYHLRKKLVDSTDKADLRLIYLALAHMIKFRGHFLIEGDLNPDNSDVDKLFIQLVQTYNQLFEENPINASGVDAKAILSARLSKSRRLENLIAQLPGEKKNGLFGNLIALSLGLTPNFKSNFDLAEDAKLQLSKDTYDDDLDNLLAQIGDQYADLFLAAKNLSDAILLSDILRVNTEITKAPLSASMIKRYDEHHQDLTLLKALVRQQLPEKYKEIFFDQSKNGYAGYIDGGASQEEFYKFIKPILEKMDGTEELLVKLNREDLLRKQRTFDNGSIPHQIHLGELHAILRRQEDFYPFLKDNREKIEKILTFRIPYYVGPLARGNSRFAWMTRKSEETITPWNFEEVVDKGASAQSFIERMTNFDKNLPNEKVLPKHSLLYEYFTVYNELTKVKYVTEGMRKPAFLSGEQKKAIVDLLFKTNRKVTVKQLKEDYFKKIECFDSVEISGVEDRFNASLGTYHDLLKIIKDKDFLDNEENEDILEDIVLTLTLFEDREMIEERLKTYAHLFDDKVMKQLKRRRYTGWGRLSRKLINGIRDKQSGKTILDFLKSDGFANRNFMQLIHDDSLTFKEDIQKAQVSGQGDSLHEHIANLAGSPAIKKGILQTVKVVDELVKVMGRHKPENIVIEMARENQTTQKGQKNSRERMKRIEEGIKELGSQILKEHPVENTQLQNEKLYLYYLQNGRDMYVDQELDINRLSDYDVDHIVPQSFLKDDSIDNKVLTRSDKARGKSDNVPSEEVVKKMKNYWRQLLNAKLITQRKFDNLTKAERGGLSELDKAGFIKRQLVETRQITKHVAQILDSRMNTKYDENDKLIREVKVITLKSKLVSDFRKDFQFYKVREINNYHHAHDAYLNAVVGTALIKKYPKLESEFVYGDYKVYDVRKMIAKSEQEIGKATAKYFFYSNIMNFFKTEITLANGEIRKRPLIETNGETGEIVWDKGRDFATVRKVLSMPQVNIVKKTEVQTGGFSKESILPKRNSDKLIARKKDWDPKKYGGFDSPTVAYSVLVVAKVEKGKSKKLKSVKELLGITIMERSSFEKNPIDFLEAKGYKEVKKDLIIKLPKYSLFELENGRKRMLASAGELQKGNELALPSKYVNFLYLASHYEKLKGSPEDNEQKQLFVEQHKHYLDEIIEQISEFSKRVILADANLDKVLSAYNKHRDKPIREQAENIIHLFTLTNLGAPAAFKYFDTTIDRKRYTSTKEVLDATLIHQSITGLYETRIDLSQLGGDGGEAAAKEAAAKEAAAKGGVLNLEEEYRLHEKPVPSSIDPSWLQLFPTVWAERAGMGLANQVPPVVVELRSGASPVAVRQYPMSKEAREGIRPHIQKFLDLGVLVPCRSPWNTPLLPVKKPGTNDYRPVQDLREINKRVQDIHPTVPNPYNLLSSLPPSYTWYSVLDLKDAFFCLRLHPNSQPLFAFEWKDPEKGNTGQLTWTRLPQGFKNSPTLFNEALHRDLAPFRALNPQVVLLQYVDDLLVAAPTYEDCKKGTQKLLQELSKLGYRVSAKKAQLCQREVTYLGYLLKEGKRWLTPARKATVMKIPVPTTPRQVREFLGKAGFCRLFIPGFASLAAPLYPLTKPSIPFIWTEEHQQAFDHIKKALLSAPALALPDLTKPFTLYIDERAGVARGVLTQTLGPWRRPVAYLSKKLDPVASGWPTCLKAVAAVALLLKDADKLTLGQNVTVIASHSLESIVRQPPDRWMTNARMTHYQSLLLNERVSFAPPAVLNPATLLPVESEATPVHRCSEILAEETGTRRDLEDQPLPGVPTWYTDGSSFITEGKRRAGAPIVDGKRTVWASSLPEGTSAQKAELVALTQALRLAEGKNINIYTDSRYAFATAHIHGAIYKQRGWLTSAGKDIKNKEEILALLEAIHLPRRVAIIHCPGHQRGSNPVATGNRRADEAAKQAALSTRVLAGTTKPAGKRTADGSEFEKRTADGSEFESPKKKAKVE

SEQ ID NO: 1453 - protein, 2094 aa, synthetic construct
MPAAKRVKLDGGDKKYSIGLDIGTNSVGWAVITDEYKVPSKKFKVLGNTDRHSIKKNLIGALLFDSGETAEATRLKRTARRRYTRRKNRICYLQEIFSNEMAKVDDSFFHRLEESFLVEEDKKHERHPIFGNIVDEVAYHEKYPTIYHLRKKLVDSTDKADLRLIYLALAHMIKFRGHFLIEGDLNPDNSDVDKLFIQLVQTYNQLFEENPINASGVDAKAILSARLSKSRRLENLIAQLPGEKKNGLFGNLIALSLGLTPNFKSNFDLAEDAKLQLSKDTYDDDLDNLLAQIGDQYADLFLAAKNLSDAILLSDILRVNTEITKAPLSASMIKRYDEHHQDLTLLKALVRQQLPEKYKEIFFDQSKNGYAGYIDGGASQEEFYKFIKPILEKMDGTEELLVKLNREDLLRKQRTFDNGSIPHQIHLGELHAILRRQEDFYPFLKDNREKIEKILTFRIPYYVGPLARGNSRFAWMTRKSEETITPWNFEEVVDKGASAQSFIERMTNFDKNLPNEKVLPKHSLLYEYFTVYNELTKVKYVTEGMRKPAFLSGEQKKAIVDLLFKTNRKVTVKQLKEDYFKKIECFDSVEISGVEDRFNASLGTYHDLLKIIKDKDFLDNEENEDILEDIVLTLTLFEDREMIEERLKTYAHLFDDKVMKQLKRRRYTGWGRLSRKLINGIRDKQSGKTILDFLKSDGFANRNFMQLIHDDSLTFKEDIQKAQVSGQGDSLHEHIANLAGSPAIKKGILQTVKVVDELVKVMGRHKPENIVIEMARENQTTQKGQKNSRERMKRIEEGIKELGSQILKEHPVENTQLQNEKLYLYYLQNGRDMYVDQELDINRLSDYDVDHIVPQSFLKDDSIDNKVLTRSDKARGKSDNVPSEEVVKKMKNYWRQLLNAKLITQRKFDNLTKAERGGLSELDKAGFIKRQLVETRQITKHVAQILDSRMNTKYDENDKLIREVKVITLKSKLVSDFRKDFQFYKVREINNYHHAHDAYLNAVVGTALIKKYPKLESEFVYGDYKVYDVRKMIAKSEQEIGKATAKYFFYSNIMNFFKTEITLANGEIRKRPLIETNGETGEIVWDKGRDFATVRKVLSMPQVNIVKKTEVQTGGFSKESILPKRNSDKLIARKKDWDPKKYGGFDSPTVAYSVLVVAKVEKGKSKKLKSVKELLGITIMERSSFEKNPIDFLEAKGYKEVKKDLIIKLPKYSLFELENGRKRMLASAGELQKGNELALPSKYVNFLYLASHYEKLKGSPEDNEQKQLFVEQHKHYLDEIIEQISEFSKRVILADANLDKVLSAYNKHRDKPIREQAENIIHLFTLTNLGAPAAFKYFDTTIDRKRYTSTKEVLDATLIHQSITGLYETRIDLSQLGGDGGPAPAPAPAPAPGGVLNLEEEYRLHEKPVPSSIDPSWLQLFPTVWAERAGMGLANQVPPVVVELRSGASPVAVRQYPMSKEAREGIRPHIQKFLDLGVLVPCRSPWNTPLLPVKKPGTNDYRPVQDLREINKRVQDIHPTVPNPYNLLSSLPPSYTWYSVLDLKDAFFCLRLHPNSQPLFAFEWKDPEKGNTGQLTWTRLPQGFKNSPTLFNEALHRDLAPFRALNPQVVLLQYVDDLLVAAPTYEDCKKGTQKLLQELSKLGYRVSAKKAQLCQREVTYLGYLLKEGKRWLTPARKATVMKIPVPTTPRQVREFLGKAGFCRLFIPGFASLAAPLYPLTKPSIPFIWTEEHQQAFDHIKKALLSAPALALPDLTKPFTLYIDERAGVARGVLTQTLGPWRRPVAYLSKKLDPVASGWPTCLKAVAAVALLLKDADKLTLGQNVTVIASHSLESIVRQPPDRWMTNARMTHYQSLLLNERVSFAPPAVLNPATLLPVESEATPVHRCSEILAEETGTRRDLEDQPLPGVPTWYTDGSSFITEGKRRAGAPIVDGKRTVWASSLPEGTSAQKAELVALTQALRLAEGKNINIYTDSRYAFATAHIHGAIYKQRGWLTSAGKDIKNKEEILALLEAIHLPRRVAIIHCPGHQRGSNPVATGNRRADEAAKQAALSTRVLAGTTKPAGKRTADGSEFEKRTADGSEFESPKKKAKVE

SEQ ID NO: 1454 - protein, 2113 aa, synthetic construct
MPAAKRVKLDGGDKKYSIGLDIGTNSVGWAVITDEYKVPSKKFKVLGNTDRHSIKKNLIGALLFDSGETAEATRLKRTARRRYTRRKNRICYLQEIFSNEMAKVDDSFFHRLEESFLVEEDKKHERHPIFGNIVDEVAYHEKYPTIYHLRKKLVDSTDKADLRLIYLALAHMIKFRGHFLIEGDLNPDNSDVDKLFIQLVQTYNQLFEENPINASGVDAKAILSARLSKSRRLENLIAQLPGEKKNGLFGNLIALSLGLTPNFKSNFDLAEDAKLQLSKDTYDDDLDNLLAQIGDQYADLFLAAKNLSDAILLSDILRVNTEITKAPLSASMIKRYDEHHQDLTLLKALVRQQLPEKYKEIFFDQSKNGYAGYIDGGASQEEFYKFIKPILEKMDGTEELLVKLNREDLLRKQRTFDNGSIPHQIHLGELHAILRRQEDFYPFLKDNREKIEKILTFRIPYYVGPLARGNSRFAWMTRKSEETITPWNFEEVVDKGASAQSFIERMTNFDKNLPNEKVLPKHSLLYEYFTVYNELTKVKYVTEGMRKPAFLSGEQKKAIVDLLFKTNRKVTVKQLKEDYFKKIECFDSVEISGVEDRFNASLGTYHDLLKIIKDKDFLDNEENEDILEDIVLTLTLFEDREMIEERLKTYAHLFDDKVMKQLKRRRYTGWGRLSRKLINGIRDKQSGKTILDFLKSDGFANRNFMQLIHDDSLTFKEDIQKAQVSGQGDSLHEHIANLAGSPAIKKGILQTVKVVDELVKVMGRHKPENIVIEMARENQTTQKGQKNSRERMKRIEEGIKELGSQILKEHPVENTQLQNEKLYLYYLQNGRDMYVDQELDINRLSDYDVDHIVPQSFLKDDSIDNKVLTRSDKARGKSDNVPSEEVVKKMKNYWRQLLNAKLITQRKFDNLTKAERGGLSELDKAGFIKRQLVETRQITKHVAQILDSRMNTKYDENDKLIREVKVITLKSKLVSDFRKDFQFYKVREINNYHHAHDAYLNAVVGTALIKKYPKLESEFVYGDYKVYDVRKMIAKSEQEIGKATAKYFFYSNIMNFFKTEITLANGEIRKRPLIETNGETGEIVWDKGRDFATVRKVLSMPQVNIVKKTEVQTGGFSKESILPKRNSDKLIARKKDWDPKKYGGFDSPTVAYSVLVVAKVEKGKSKKLKSVKELLGITIMERSSFEKNPIDFLEAKGYKEVKKDLIIKLPKYSLFELENGRKRMLASAGELQKGNELALPSKYVNFLYLASHYEKLKGSPEDNEQKQLFVEQHKHYLDEIIEQISEFSKRVILADANLDKVLSAYNKHRDKPIREQAENIIHLFTLTNLGAPAAFKYFDTTIDRKRYTSTKEVLDATLIHQSITGLYETRIDLSQLGGDGGEAAAKEAAAKEAAAKEAAAKEAAAKEAAAKGGVLNLEEEYRLHEKPVPSSIDPSWLQLFPTVWAERAGMGLANQVPPVVVELRSGASPVAVRQYPMSKEAREGIRPHIQKFLDLGVLVPCRSPWNTPLLPVKKPGTNDYRPVQDLREINKRVQDIHPTVPNPYNLLSSLPPSYTWYSVLDLKDAFFCLRLHPNSQPLFAFEWKDPEKGNTGQLTWTRLPQGFKNSPTLFNEALHRDLAPFRALNPQVVLLQYVDDLLVAAPTYEDCKKGTQKLLQELSKLGYRVSAKKAQLCQREVTYLGYLLKEGKRWLTPARKATVMKIPVPTTPRQVREFLGKAGFCRLFIPGFASLAAPLYPLTKPSIPFIWTEEHQQAFDHIKKALLSAPALALPDLTKPFTLYIDERAGVARGVLTQTLGPWRRPVAYLSKKLDPVASGWPTCLKAVAAVALLLKDADKLTLGQNVTVIASHSLESIVRQPPDRWMTNARMTHYQSLLLNERVSFAPPAVLNPATLLPVESEATPVHRCSEILAEETGTRRDLEDQPLPGVPTWYTDGSSFITEGKRRAGAPIVDGKRTVWASSLPEGTSAQKAELVALTQALRLAEGKNINIYTDSRYAFATAHIHGAIYKQRGWLTSAGKDIKNKEEILALLEAIHLPRRVAIIHCPGHQRGSNPVATGNRRADEAAKQAALSTRVLAGTTKPAGKRTADGSEFEKRTADGSEFESPKKKAKVE

SEQ ID NO: 1455 - protein, 2094 aa, synthetic construct
MPAAKRVKLDGGDKKYSIGLDIGTNSVGWAVITDEYKVPSKKFKVLGNTDRHSIKKNLIGALLFDSGETAEATRLKRTARRRYTRRKNRICYLQEIFSNEMAKVDDSFFHRLEESFLVEEDKKHERHPIFGNIVDEVAYHEKYPTIYHLRKKLVDSTDKADLRLIYLALAHMIKFRGHFLIEGDLNPDNSDVDKLFIQLVQTYNQLFEENPINASGVDAKAILSARLSKSRRLENLIAQLPGEKKNGLFGNLIALSLGLTPNFKSNFDLAEDAKLQLSKDTYDDDLDNLLAQIGDQYADLFLAAKNLSDAILLSDILRVNTEITKAPLSASMIKRYDEHHQDLTLLKALVRQQLPEKYKEIFFDQSKNGYAGYIDGGASQEEFYKFIKPILEKMDGTEELLVKLNREDLLRKQRTFDNGSIPHQIHLGELHAILRRQEDFYPFLKDNREKIEKILTFRIPYYVGPLARGNSRFAWMTRKSEETITPWNFEEVVDKGASAQSFIERMTNFDKNLPNEKVLPKHSLLYEYFTVYNELTKVKYVTEGMRKPAFLSGEQKKAIVDLLFKTNRKVTVKQLKEDYFKKIECFDSVEISGVEDRFNASLGTYHDLLKIIKDKDFLDNEENEDILEDIVLTLTLFEDREMIEERLKTYAHLFDDKVMKQLKRRRYTGWGRLSRKLINGIRDKQSGKTILDFLKSDGFANRNFMQLIHDDSLTFKEDIQKAQVSGQGDSLHEHIANLAGSPAIKKGILQTVKVVDELVKVMGRHKPENIVIEMARENQTTQKGQKNSRERMKRIEEGIKELGSQILKEHPVENTQLQNEKLYLYYLQNGRDMYVDQELDINRLSDYDVDHIVPQSFLKDDSIDNKVLTRSDKARGKSDNVPSEEVVKKMKNYWRQLLNAKLITQRKFDNLTKAERGGLSELDKAGFIKRQLVETRQITKHVAQILDSRMNTKYDENDKLIREVKVITLKSKLVSDFRKDFQFYKVREINNYHHAHDAYLNAVVGTALIKKYPKLESEFVYGDYKVYDVRKMIAKSEQEIGKATAKYFFYSNIMNFFKTEITLANGEIRKRPLIETNGETGEIVWDKGRDFATVRKVLSMPQVNIVKKTEVQTGGFSKESILPKRNSDKLIARKKDWDPKKYGGFDSPTVAYSVLVVAKVEKGKSKKLKSVKELLGITIMERSSFEKNPIDFLEAKGYKEVKKDLIIKLPKYSLFELENGRKRMLASAGELQKGNELALPSKYVNFLYLASHYEKLKGSPEDNEQKQLFVEQHKHYLDEIIEQISEFSKRVILADANLDKVLSAYNKHRDKPIREQAENIIHLFTLTNLGAPAAFKYFDTTIDRKRYTSTKEVLDATLIHQSITGLYETRIDLSQLGGDGGEAAAKGGGGSSGGVLNLEEEYRLHEKPVPSSIDPSWLQLFPTVWAERAGMGLANQVPPVVVELRSGASPVAVRQYPMSKEAREGIRPHIQKFLDLGVLVPCRSPWNTPLLPVKKPGTNDYRPVQDLREINKRVQDIHPTVPNPYNLLSSLPPSYTWYSVLDLKDAFFCLRLHPNSQPLFAFEWKDPEKGNTGQLTWTRLPQGFKNSPTLFNEALHRDLAPFRALNPQVVLLQYVDDLLVAAPTYEDCKKGTQKLLQELSKLGYRVSAKKAQLCQREVTYLGYLLKEGKRWLTPARKATVMKIPVPTTPRQVREFLGKAGFCRLFIPGFASLAAPLYPLTKPSIPFIWTEEHQQAFDHIKKALLSAPALALPDLTKPFTLYIDERAGVARGVLTQTLGPWRRPVAYLSKKLDPVASGWPTCLKAVAAVALLLKDADKLTLGQNVTVIASHSLESIVRQPPDRWMTNARMTHYQSLLLNERVSFAPPAVLNPATLLPVESEATPVHRCSEILAEETGTRRDLEDQPLPGVPTWYTDGSSFITEGKRRAGAPIVDGKRTVWASSLPEGTSAQKAELVALTQALRLAEGKNINIYTDSRYAFATAHIHGAIYKQRGWLTSAGKDIKNKEEILALLEAIHLPRRVAIIHCPGHQRGSNPVATGNRRADEAAKQAALSTRVLAGTTKPAGKRTADGSEFEKRTADGSEFESPKKKAKVE

SEQ ID NO: 1456 - protein, 2094 aa, synthetic construct
MPAAKRVKLDGGDKKYSIGLDIGTNSVGWAVITDEYKVPSKKFKVLGNTDRHSIKKNLIGALLFDSGETAEATRLKRTARRRYTRRKNRICYLQEIFSNEMAKVDDSFFHRLEESFLVEEDKKHERHPIFGNIVDEVAYHEKYPTIYHLRKKLVDSTDKADLRLIYLALAHMIKFRGHFLIEGDLNPDNSDVDKLFIQLVQTYNQLFEENPINASGVDAKAILSARLSKSRRLENLIAQLPGEKKNGLFGNLIALSLGLTPNFKSNFDLAEDAKLQLSKDTYDDDLDNLLAQIGDQYADLFLAAKNLSDAILLSDILRVNTEITKAPLSASMIKRYDEHHQDLTLLKALVRQQLPEKYKEIFFDQSKNGYAGYIDGGASQEEFYKFIKPILEKMDGTEELLVKLNREDLLRKQRTFDNGSIPHQIHLGELHAILRRQEDFYPFLKDNREKIEKILTFRIPYYVGPLARGNSRFAWMTRKSEETITPWNFEEVVDKGASAQSFIERMTNFDKNLPNEKVLPKHSLLYEYFTVYNELTKVKYVTEGMRKPAFLSGEQKKAIVDLLFKTNRKVTVKQLKEDYFKKIECFDSVEISGVEDRFNASLGTYHDLLKIIKDKDFLDNEENEDILEDIVLTLTLFEDREMIEERLKTYAHLFDDKVMKQLKRRRYTGWGRLSRKLINGIRDKQSGKTILDFLKSDGFANRNFMQLIHDDSLTFKEDIQKAQVSGQGDSLHEHIANLAGSPAIKKGILQTVKVVDELVKVMGRHKPENIVIEMARENQTTQKGQKNSRERMKRIEEGIKELGSQILKEHPVENTQLQNEKLYLYYLQNGRDMYVDQELDINRLSDYDVDHIVPQSFLKDDSIDNKVLTRSDKARGKSDNVPSEEVVKKMKNYWRQLLNAKLITQRKFDNLTKAERGGLSELDKAGFIKRQLVETRQITKHVAQILDSRMNTKYDENDKLIREVKVITLKSKLVSDFRKDFQFYKVREINNYHHAHDAYLNAVVGTALIKKYPKLESEFVYGDYKVYDVRKMIAKSEQEIGKATAKYFFYSNIMNFFKTEITLANGEIRKRPLIETNGETGEIVWDKGRDFATVRKVLSMPQVNIVKKTEVQTGGFSKESILPKRNSDKLIARKKDWDPKKYGGFDSPTVAYSVLVVAKVEKGKSKKLKSVKELLGITIMERSSFEKNPIDFLEAKGYKEVKKDLIIKLPKYSLFELENGRKRMLASAGELQKGNELALPSKYVNFLYLASHYEKLKGSPEDNEQKQLFVEQHKHYLDEIIEQISEFSKRVILADANLDKVLSAYNKHRDKPIREQAENIIHLFTLTNLGAPAAFKYFDTTIDRKRYTSTKEVLDATLIHQSITGLYETRIDLSQLGGDGGGGGGGSEAAAKGGVLNLEEEYRLHEKPVPSSIDPSWLQLFPTVWAERAGMGLANQVPPVVVELRSGASPVAVRQYPMSKEAREGIRPHIQKFLDLGVLVPCRSPWNTPLLPVKKPGTNDYRPVQDLREINKRVQDIHPTVPNPYNLLSSLPPSYTWYSVLDLKDAFFCLRLHPNSQPLFAFEWKDPEKGNTGQLTWTRLPQGFKNSPTLFNEALHRDLAPFRALNPQVVLLQYVDDLLVAAPTYEDCKKGTQKLLQELSKLGYRVSAKKAQLCQREVTYLGYLLKEGKRWLTPARKATVMKIPVPTTPRQVREFLGKAGFCRLFIPGFASLAAPLYPLTKPSIPFIWTEEHQQAFDHIKKALLSAPALALPDLTKPFTLYIDERAGVARGVLTQTLGPWRRPVAYLSKKLDPVASGWPTCLKAVAAVALLLKDADKLTLGQNVTVIASHSLESIVRQPPDRWMTNARMTHYQSLLLNERVSFAPPAVLNPATLLPVESEATPVHRCSEILAEETGTRRDLEDQPLPGVPTWYTDGSSFITEGKRRAGAPIVDGKRTVWASSLPEGTSAQKAELVALTQALRLAEGKNINIYTDSRYAFATAHIHGAIYKQRGWLTSAGKDIKNKEEILALLEAIHLPRRVAIIHCPGHQRGSNPVATGNRRADEAAKQAALSTRVLAGTTKPAGKRTADGSEFEKRTADGSEFESPKKKAKVE

SEQ ID NO: 1457 - protein, 2094 aa, synthetic construct
MPAAKRVKLDGGDKKYSIGLDIGTNSVGWAVITDEYKVPSKKFKVLGNTDRHSIKKNLIGALLFDSGETAEATRLKRTARRRYTRRKNRICYLQEIFSNEMAKVDDSFFHRLEESFLVEEDKKHERHPIFGNIVDEVAYHEKYPTIYHLRKKLVDSTDKADLRLIYLALAHMIKFRGHFLIEGDLNPDNSDVDKLFIQLVQTYNQLFEENPINASGVDAKAILSARLSKSRRLENLIAQLPGEKKNGLFGNLIALSLGLTPNFKSNFDLAEDAKLQLSKDTYDDDLDNLLAQIGDQYADLFLAAKNLSDAILLSDILRVNTEITKAPLSASMIKRYDEHHQDLTLLKALVRQQLPEKYKEIFFDQSKNGYAGYIDGGASQEEFYKFIKPILEKMDGTEELLVKLNREDLLRKQRTFDNGSIPHQIHLGELHAILRRQEDFYPFLKDNREKIEKILTFRIPYYVGPLARGNSRFAWMTRKSEETITPWNFEEVVDKGASAQSFIERMTNFDKNLPNEKVLPKHSLLYEYFTVYNELTKVKYVTEGMRKPAFLSGEQKKAIVDLLFKTNRKVTVKQLKEDYFKKIECFDSVEISGVEDRFNASLGTYHDLLKIIKDKDFLDNEENEDILEDIVLTLTLFEDREMIEERLKTYAHLFDDKVMKQLKRRRYTGWGRLSRKLINGIRDKQSGKTILDFLKSDGFANRNFMQLIHDDSLTFKEDIQKAQVSGQGDSLHEHIANLAGSPAIKKGILQTVKVVDELVKVMGRHKPENIVIEMARENQTTQKGQKNSRERMKRIEEGIKELGSQILKEHPVENTQLQNEKLYLYYLQNGRDMYVDQELDINRLSDYDVDHIVPQSFLKDDSIDNKVLTRSDKARGKSDNVPSEEVVKKMKNYWRQLLNAKLITQRKFDNLTKAERGGLSELDKAGFIKRQLVETRQITKHVAQILDSRMNTKYDENDKLIREVKVITLKSKLVSDFRKDFQFYKVREINNYHHAHDAYLNAVVGTALIKKYPKLESEFVYGDYKVYDVRKMIAKSEQEIGKATAKYFFYSNIMNFFKTEITLANGEIRKRPLIETNGETGEIVWDKGRDFATVRKVLSMPQVNIVKKTEVQTGGFSKESILPKRNSDKLIARKKDWDPKKYGGFDSPTVAYSVLVVAKVEKGKSKKLKSVKELLGITIMERSSFEKNPIDFLEAKGYKEVKKDLIIKLPKYSLFELENGRKRMLASAGELQKGNELALPSKYVNFLYLASHYEKLKGSPEDNEQKQLFVEQHKHYLDEIIEQISEFSKRVILADANLDKVLSAYNKHRDKPIREQAENIIHLFTLTNLGAPAAFKYFDTTIDRKRYTSTKEVLDATLIHQSITGLYETRIDLSQLGGDGGGSSPAPEAAAKGGVLNLEEEYRLHEKPVPSSIDPSWLQLFPTVWAERAGMGLANQVPPVVVELRSGASPVAVRQYPMSKEAREGIRPHIQKFLDLGVLVPCRSPWNTPLLPVKKPGTNDYRPVQDLREINKRVQDIHPTVPNPYNLLSSLPPSYTWYSVLDLKDAFFCLRLHPNSQPLFAFEWKDPEKGNTGQLTWTRLPQGFKNSPTLFNEALHRDLAPFRALNPQVVLLQYVDDLLVAAPTYEDCKKGTQKLLQELSKLGYRVSAKKAQLCQREVTYLGYLLKEGKRWLTPARKATVMKIPVPTTPRQVREFLGKAGFCRLFIPGFASLAAPLYPLTKPSIPFIWTEEHQQAFDHIKKALLSAPALALPDLTKPFTLYIDERAGVARGVLTQTLGPWRRPVAYLSKKLDPVASGWPTCLKAVAAVALLLKDADKLTLGQNVTVIASHSLESIVRQPPDRWMTNARMTHYQSLLLNERVSFAPPAVLNPATLLPVESEATPVHRCSEILAEETGTRRDLEDQPLPGVPTWYTDGSSFITEGKRRAGAPIVDGKRTVWASSLPEGTSAQKAELVALTQALRLAEGKNINIYTDSRYAFATAHIHGAIYKQRGWLTSAGKDIKNKEEILALLEAIHLPRRVAIIHCPGHQRGSNPVATGNRRADEAAKQAALSTRVLAGTTKPAGKRTADGSEFEKRTADGSEFESPKKKAKVE

SEQ ID NO: 1458 - protein, 2098 aa, synthetic construct
MPAAKRVKLDGGDKKYSIGLDIGTNSVGWAVITDEYKVPSKKFKVLGNTDRHSIKKNLIGALLFDSGETAEATRLKRTARRRYTRRKNRICYLQEIFSNEMAKVDDSFFHRLEESFLVEEDKKHERHPIFGNIVDEVAYHEKYPTIYHLRKKLVDSTDKADLRLIYLALAHMIKFRGHFLIEGDLNPDNSDVDKLFIQLVQTYNQLFEENPINASGVDAKAILSARLSKSRRLENLIAQLPGEKKNGLFGNLIALSLGLTPNFKSNFDLAEDAKLQLSKDTYDDDLDNLLAQIGDQYADLFLAAKNLSDAILLSDILRVNTEITKAPLSASMIKRYDEHHQDLTLLKALVRQQLPEKYKEIFFDQSKNGYAGYIDGGASQEEFYKFIKPILEKMDGTEELLVKLNREDLLRKQRTFDNGSIPHQIHLGELHAILRRQEDFYPFLKDNREKIEKILTFRIPYYVGPLARGNSRFAWMTRKSEETITPWNFEEVVDKGASAQSFIERMTNFDKNLPNEKVLPKHSLLYEYFTVYNELTKVKYVTEGMRKPAFLSGEQKKAIVDLLFKTNRKVTVKQLKEDYFKKIECFDSVEISGVEDRFNASLGTYHDLLKIIKDKDFLDNEENEDILEDIVLTLTLFEDREMIEERLKTYAHLFDDKVMKQLKRRRYTGWGRLSRKLINGIRDKQSGKTILDFLKSDGFANRNFMQLIHDDSLTFKEDIQKAQVSGQGDSLHEHIANLAGSPAIKKGILQTVKVVDELVKVMGRHKPENIVIEMARENQTTQKGQKNSRERMKRIEEGIKELGSQILKEHPVENTQLQNEKLYLYYLQNGRDMYVDQELDINRLSDYDVDHIVPQSFLKDDSIDNKVLTRSDKARGKSDNVPSEEVVKKMKNYWRQLLNAKLITQRKFDNLTKAERGGLSELDKAGFIKRQLVETRQITKHVAQILDSRMNTKYDENDKLIREVKVITLKSKLVSDFRKDFQFYKVREINNYHHAHDAYLNAVVGTALIKKYPKLESEFVYGDYKVYDVRKMIAKSEQEIGKATAKYFFYSNIMNFFKTEITLANGEIRKRPLIETNGETGEIVWDKGRDFATVRKVLSMPQVNIVKKTEVQTGGFSKESILPKRNSDKLIARKKDWDPKKYGGFDSPTVAYSVLVVAKVEKGKSKKLKSVKELLGITIMERSSFEKNPIDFLEAKGYKEVKKDLIIKLPKYSLFELENGRKRMLASAGELQKGNELALPSKYVNFLYLASHYEKLKGSPEDNEQKQLFVEQHKHYLDEIIEQISEFSKRVILADANLDKVLSAYNKHRDKPIREQAENIIHLFTLTNLGAPAAFKYFDTTIDRKRYTSTKEVLDATLIHQSITGLYETRIDLSQLGGDGGGGGGSGGGGSGGGGSGGVLNLEEEYRLHEKPVPSSIDPSWLQLFPTVWAERAGMGLANQVPPVVVELRSGASPVAVRQYPMSKEAREGIRPHIQKFLDLGVLVPCRSPWNTPLLPVKKPGTNDYRPVQDLREINKRVQDIHPTVPNPYNLLSSLPPSYTWYSVLDLKDAFFCLRLHPNSQPLFAFEWKDPEKGNTGQLTWTRLPQGFKNSPTLFNEALHRDLAPFRALNPQVVLLQYVDDLLVAAPTYEDCKKGTQKLLQELSKLGYRVSAKKAQLCQREVTYLGYLLKEGKRWLTPARKATVMKIPVPTTPRQVREFLGKAGFCRLFIPGFASLAAPLYPLTKPSIPFIWTEEHQQAFDHIKKALLSAPALALPDLTKPFTLYIDERAGVARGVLTQTLGPWRRPVAYLSKKLDPVASGWPTCLKAVAAVALLLKDADKLTLGQNVTVIASHSLESIVRQPPDRWMTNARMTHYQSLLLNERVSFAPPAVLNPATLLPVESEATPVHRCSEILAEETGTRRDLEDQPLPGVPTWYTDGSSFITEGKRRAGAPIVDGKRTVWASSLPEGTSAQKAELVALTQALRLAEGKNINIYTDSRYAFATAHIHGAIYKQRGWLTSAGKDIKNKEEILALLEAIHLPRRVAIIHCPGHQRGSNPVATGNRRADEAAKQAALSTRVLAGTTKPAGKRTADGSEFEKRTADGSEFESPKKKAKVE

SEQ ID NO: 1459 - protein, 2094 aa, synthetic construct
MPAAKRVKLDGGDKKYSIGLDIGTNSVGWAVITDEYKVPSKKFKVLGNTDRHSIKKNLIGALLFDSGETAEATRLKRTARRRYTRRKNRICYLQEIFSNEMAKVDDSFFHRLEESFLVEEDKKHERHPIFGNIVDEVAYHEKYPTIYHLRKKLVDSTDKADLRLIYLALAHMIKFRGHFLIEGDLNPDNSDVDKLFIQLVQTYNQLFEENPINASGVDAKAILSARLSKSRRLENLIAQLPGEKKNGLFGNLIALSLGLTPNFKSNFDLAEDAKLQLSKDTYDDDLDNLLAQIGDQYADLFLAAKNLSDAILLSDILRVNTEITKAPLSASMIKRYDEHHQDLTLLKALVRQQLPEKYKEIFFDQSKNGYAGYIDGGASQEEFYKFIKPILEKMDGTEELLVKLNREDLLRKQRTFDNGSIPHQIHLGELHAILRRQEDFYPFLKDNREKIEKILTFRIPYYVGPLARGNSRFAWMTRKSEETITPWNFEEVVDKGASAQSFIERMTNFDKNLPNEKVLPKHSLLYEYFTVYNELTKVKYVTEGMRKPAFLSGEQKKAIVDLLFKTNRKVTVKQLKEDYFKKIECFDSVEISGVEDRFNASLGTYHDLLKIIKDKDFLDNEENEDILEDIVLTLTLFEDREMIEERLKTYAHLFDDKVMKQLKRRRYTGWGRLSRKLINGIRDKQSGKTILDFLKSDGFANRNFMQLIHDDSLTFKEDIQKAQVSGQGDSLHEHIANLAGSPAIKKGILQTVKVVDELVKVMGRHKPENIVIEMARENQTTQKGQKNSRERMKRIEEGIKELGSQILKEHPVENTQLQNEKLYLYYLQNGRDMYVDQELDINRLSDYDVDHIVPQSFLKDDSIDNKVLTRSDKARGKSDNVPSEEVVKKMKNYWRQLLNAKLITQRKFDNLTKAERGGLSELDKAGFIKRQLVETRQITKHVAQILDSRMNTKYDENDKLIREVKVITLKSKLVSDFRKDFQFYKVREINNYHHAHDAYLNAVVGTALIKKYPKLESEFVYGDYKVYDVRKMIAKSEQEIGKATAKYFFYSNIMNFFKTEITLANGEIRKRPLIETNGETGEIVWDKGRDFATVRKVLSMPQVNIVKKTEVQTGGFSKESILPKRNSDKLIARKKDWDPKKYGGFDSPTVAYSVLVVAKVEKGKSKKLKSVKELLGITIMERSSFEKNPIDFLEAKGYKEVKKDLIIKLPKYSLFELENGRKRMLASAGELQKGNELALPSKYVNFLYLASHYEKLKGSPEDNEQKQLFVEQHKHYLDEIIEQISEFSKRVILADANLDKVLSAYNKHRDKPIREQAENIIHLFTLTNLGAPAAFKYFDTTIDRKRYTSTKEVLDATLIHQSITGLYETRIDLSQLGGDGGPAPGGGEAAAKGGVLNLEEEYRLHEKPVPSSIDPSWLQLFPTVWAERAGMGLANQVPPVVVELRSGASPVAVRQYPMSKEAREGIRPHIQKFLDLGVLVPCRSPWNTPLLPVKKPGTNDYRPVQDLREINKRVQDIHPTVPNPYNLLSSLPPSYTWYSVLDLKDAFFCLRLHPNSQPLFAFEWKDPEKGNTGQLTWTRLPQGFKNSPTLFNEALHRDLAPFRALNPQVVLLQYVDDLLVAAPTYEDCKKGTQKLLQELSKLGYRVSAKKAQLCQREVTYLGYLLKEGKRWLTPARKATVMKIPVPTTPRQVREFLGKAGFCRLFIPGFASLAAPLYPLTKPSIPFIWTEEHQQAFDHIKKALLSAPALALPDLTKPFTLYIDERAGVARGVLTQTLGPWRRPVAYLSKKLDPVASGWPTCLKAVAAVALLLKDADKLTLGQNVTVIASHSLESIVRQPPDRWMTNARMTHYQSLLLNERVSFAPPAVLNPATLLPVESEATPVHRCSEILAEETGTRRDLEDQPLPGVPTWYTDGSSFITEGKRRAGAPIVDGKRTVWASSLPEGTSAQKAELVALTQALRLAEGKNINIYTDSRYAFATAHIHGAIYKQRGWLTSAGKDIKNKEEILALLEAIHLPRRVAIIHCPGHQRGSNPVATGNRRADEAAKQAALSTRVLAGTTKPAGKRTADGSEFEKRTADGSEFESPKKKAKVE

SEQ ID NO: 1460 - protein, 2092 aa, synthetic construct
MPAAKRVKLDGGDKKYSIGLDIGTNSVGWAVITDEYKVPSKKFKVLGNTDRHSIKKNLIGALLFDSGETAEATRLKRTARRRYTRRKNRICYLQEIFSNEMAKVDDSFFHRLEESFLVEEDKKHERHPIFGNIVDEVAYHEKYPTIYHLRKKLVDSTDKADLRLIYLALAHMIKFRGHFLIEGDLNPDNSDVDKLFIQLVQTYNQLFEENPINASGVDAKAILSARLSKSRRLENLIAQLPGEKKNGLFGNLIALSLGLTPNFKSNFDLAEDAKLQLSKDTYDDDLDNLLAQIGDQYADLFLAAKNLSDAILLSDILRVNTEITKAPLSASMIKRYDEHHQDLTLLKALVRQQLPEKYKEIFFDQSKNGYAGYIDGGASQEEFYKFIKPILEKMDGTEELLVKLNREDLLRKQRTFDNGSIPHQIHLGELHAILRRQEDFYPFLKDNREKIEKILTFRIPYYVGPLARGNSRFAWMTRKSEETITPWNFEEVVDKGASAQSFIERMTNFDKNLPNEKVLPKHSLLYEYFTVYNELTKVKYVTEGMRKPAFLSGEQKKAIVDLLFKTNRKVTVKQLKEDYFKKIECFDSVEISGVEDRFNASLGTYHDLLKIIKDKDFLDNEENEDILEDIVLTLTLFEDREMIEERLKTYAHLFDDKVMKQLKRRRYTGWGRLSRKLINGIRDKQSGKTILDFLKSDGFANRNFMQLIHDDSLTFKEDIQKAQVSGQGDSLHEHIANLAGSPAIKKGILQTVKVVDELVKVMGRHKPENIVIEMARENQTTQKGQKNSRERMKRIEEGIKELGSQILKEHPVENTQLQNEKLYLYYLQNGRDMYVDQELDINRLSDYDVDHIVPQSFLKDDSIDNKVLTRSDKARGKSDNVPSEEVVKKMKNYWRQLLNAKLITQRKFDNLTKAERGGLSELDKAGFIKRQLVETRQITKHVAQILDSRMNTKYDENDKLIREVKVITLKSKLVSDFRKDFQFYKVREINNYHHAHDAYLNAVVGTALIKKYPKLESEFVYGDYKVYDVRKMIAKSEQEIGKATAKYFFYSNIMNFFKTEITLANGEIRKRPLIETNGETGEIVWDKGRDFATVRKVLSMPQVNIVKKTEVQTGGFSKESILPKRNSDKLIARKKDWDPKKYGGFDSPTVAYSVLVVAKVEKGKSKKLKSVKELLGITIMERSSFEKNPIDFLEAKGYKEVKKDLIIKLPKYSLFELENGRKRMLASAGELQKGNELALPSKYVNFLYLASHYEKLKGSPEDNEQKQLFVEQHKHYLDEIIEQISEFSKRVILADANLDKVLSAYNKHRDKPIREQAENIIHLFTLTNLGAPAAFKYFDTTIDRKRYTSTKEVLDATLIHQSITGLYETRIDLSQLGGDGGPAPGGGGGSGGVLNLEEEYRLHEKPVPSSIDPSWLQLFPTVWAERAGMGLANQVPPVVVELRSGASPVAVRQYPMSKEAREGIRPHIQKFLDLGVLVPCRSPWNTPLLPVKKPGTNDYRPVQDLREINKRVQDIHPTVPNPYNLLSSLPPSYTWYSVLDLKDAFFCLRLHPNSQPLFAFEWKDPEKGNTGQLTWTRLPQGFKNSPTLFNEALHRDLAPFRALNPQVVLLQYVDDLLVAAPTYEDCKKGTQKLLQELSKLGYRVSAKKAQLCQREVTYLGYLLKEGKRWLTPARKATVMKIPVPTTPRQVREFLGKAGFCRLFIPGFASLAAPLYPLTKPSIPFIWTEEHQQAFDHIKKALLSAPALALPDLTKPFTLYIDERAGVARGVLTQTLGPWRRPVAYLSKKLDPVASGWPTCLKAVAAVALLLKDADKLTLGQNVTVIASHSLESIVRQPPDRWMTNARMTHYQSLLLNERVSFAPPAVLNPATLLPVESEATPVHRCSEILAEETGTRRDLEDQPLPGVPTWYTDGSSFITEGKRRAGAPIVDGKRTVWASSLPEGTSAQKAELVALTQALRLAEGKNINIYTDSRYAFATAHIHGAIYKQRGWLTSAGKDIKNKEEILALLEAIHLPRRVAIIHCPGHQRGSNPVATGNRRADEAAKQAALSTRVLAGTTKPAGKRTADGSEFEKRTADGSEFESPKKKAKVE

SEQ ID NO: 1461 - protein, 2094 aa, synthetic construct
MPAAKRVKLDGGDKKYSIGLDIGTNSVGWAVITDEYKVPSKKFKVLGNTDRHSIKKNLIGALLFDSGETAEATRLKRTARRRYTRRKNRICYLQEIFSNEMAKVDDSFFHRLEESFLVEEDKKHERHPIFGNIVDEVAYHEKYPTIYHLRKKLVDSTDKADLRLIYLALAHMIKFRGHFLIEGDLNPDNSDVDKLFIQLVQTYNQLFEENPINASGVDAKAILSARLSKSRRLENLIAQLPGEKKNGLFGNLIALSLGLTPNFKSNFDLAEDAKLQLSKDTYDDDLDNLLAQIGDQYADLFLAAKNLSDAILLSDILRVNTEITKAPLSASMIKRYDEHHQDLTLLKALVRQQLPEKYKEIFFDQSKNGYAGYIDGGASQEEFYKFIKPILEKMDGTEELLVKLNREDLLRKQRTFDNGSIPHQIHLGELHAILRRQEDFYPFLKDNREKIEKILTFRIPYYVGPLARGNSRFAWMTRKSEETITPWNFEEVVDKGASAQSFIERMTNFDKNLPNEKVLPKHSLLYEYFTVYNELTKVKYVTEGMRKPAFLSGEQKKAIVDLLFKTNRKVTVKQLKEDYFKKIECFDSVEISGVEDRFNASLGTYHDLLKIIKDKDFLDNEENEDILEDIVLTLTLFEDREMIEERLKTYAHLFDDKVMKQLKRRRYTGWGRLSRKLINGIRDKQSGKTILDFLKSDGFANRNFMQLIHDDSLTFKEDIQKAQVSGQGDSLHEHIANLAGSPAIKKGILQTVKVVDELVKVMGRHKPENIVIEMARENQTTQKGQKNSRERMKRIEEGIKELGSQILKEHPVENTQLQNEKLYLYYLQNGRDMYVDQELDINRLSDYDVDHIVPQSFLKDDSIDNKVLTRSDKARGKSDNVPSEEVVKKMKNYWRQLLNAKLITQRKFDNLTKAERGGLSELDKAGFIKRQLVETRQITKHVAQILDSRMNTKYDENDKLIREVKVITLKSKLVSDFRKDFQFYKVREINNYHHAHDAYLNAVVGTALIKKYPKLESEFVYGDYKVYDVRKMIAKSEQEIGKATAKYFFYSNIMNFFKTEITLANGEIRKRPLIETNGETGEIVWDKGRDFATVRKVLSMPQVNIVKKTEVQTGGFSKESILPKRNSDKLIARKKDWDPKKYGGFDSPTVAYSVLVVAKVEKGKSKKLKSVKELLGITIMERSSFEKNPIDFLEAKGYKEVKKDLIIKLPKYSLFELENGRKRMLASAGELQKGNELALPSKYVNFLYLASHYEKLKGSPEDNEQKQLFVEQHKHYLDEIIEQISEFSKRVILADANLDKVLSAYNKHRDKPIREQAENIIHLFTLTNLGAPAAFKYFDTTIDRKRYTSTKEVLDATLIHQSITGLYETRIDLSQLGGDGGGGGEAAAKGSSGGVLNLEEEYRLHEKPVPSSIDPSWLQLFPTVWAERAGMGLANQVPPVVVELRSGASPVAVRQYPMSKEAREGIRPHIQKFLDLGVLVPCRSPWNTPLLPVKKPGTNDYRPVQDLREINKRVQDIHPTVPNPYNLLSSLPPSYTWYSVLDLKDAFFCLRLHPNSQPLFAFEWKDPEKGNTGQLTWTRLPQGFKNSPTLFNEALHRDLAPFRALNPQVVLLQYVDDLLVAAPTYEDCKKGTQKLLQELSKLGYRVSAKKAQLCQREVTYLGYLLKEGKRWLTPARKATVMKIPVPTTPRQVREFLGKAGFCRLFIPGFASLAAPLYPLTKPSIPFIWTEEHQQAFDHIKKALLSAPALALPDLTKPFTLYIDERAGVARGVLTQTLGPWRRPVAYLSKKLDPVASGWPTCLKAVAAVALLLKDADKLTLGQNVTVIASHSLESIVRQPPDRWMTNARMTHYQSLLLNERVSFAPPAVLNPATLLPVESEATPVHRCSEILAEETGTRRDLEDQPLPGVPTWYTDGSSFITEGKRRAGAPIVDGKRTVWASSLPEGTSAQKAELVALTQALRLAEGKNINIYTDSRYAFATAHIHGAIYKQRGWLTSAGKDIKNKEEILALLEAIHLPRRVAIIHCPGHQRGSNPVATGNRRADEAAKQAALSTRVLAGTTKPAGKRTADGSEFEKRTADGSEFESPKKKAKVE

SEQ ID NO: 1462 - protein, 2088 aa, synthetic construct
MPAAKRVKLDGGDKKYSIGLDIGTNSVGWAVITDEYKVPSKKFKVLGNTDRHSIKKNLIGALLFDSGETAEATRLKRTARRRYTRRKNRICYLQEIFSNEMAKVDDSFFHRLEESFLVEEDKKHERHPIFGNIVDEVAYHEKYPTIYHLRKKLVDSTDKADLRLIYLALAHMIKFRGHFLIEGDLNPDNSDVDKLFIQLVQTYNQLFEENPINASGVDAKAILSARLSKSRRLENLIAQLPGEKKNGLFGNLIALSLGLTPNFKSNFDLAEDAKLQLSKDTYDDDLDNLLAQIGDQYADLFLAAKNLSDAILLSDILRVNTEITKAPLSASMIKRYDEHHQDLTLLKALVRQQLPEKYKEIFFDQSKNGYAGYIDGGASQEEFYKFIKPILEKMDGTEELLVKLNREDLLRKQRTFDNGSIPHQIHLGELHAILRRQEDFYPFLKDNREKIEKILTFRIPYYVGPLARGNSRFAWMTRKSEETITPWNFEEVVDKGASAQSFIERMTNFDKNLPNEKVLPKHSLLYEYFTVYNELTKVKYVTEGMRKPAFLSGEQKKAIVDLLFKTNRKVTVKQLKEDYFKKIECFDSVEISGVEDRFNASLGTYHDLLKIIKDKDFLDNEENEDILEDIVLTLTLFEDREMIEERLKTYAHLFDDKVMKQLKRRRYTGWGRLSRKLINGIRDKQSGKTILDFLKSDGFANRNFMQLIHDDSLTFKEDIQKAQVSGQGDSLHEHIANLAGSPAIKKGILQTVKVVDELVKVMGRHKPENIVIEMARENQTTQKGQKNSRERMKRIEEGIKELGSQILKEHPVENTQLQNEKLYLYYLQNGRDMYVDQELDINRLSDYDVDHIVPQSFLKDDSIDNKVLTRSDKARGKSDNVPSEEVVKKMKNYWRQLLNAKLITQRKFDNLTKAERGGLSELDKAGFIKRQLVETRQITKHVAQILDSRMNTKYDENDKLIREVKVITLKSKLVSDFRKDFQFYKVREINNYHHAHDAYLNAVVGTALIKKYPKLESEFVYGDYKVYDVRKMIAKSEQEIGKATAKYFFYSNIMNFFKTEITLANGEIRKRPLIETNGETGEIVWDKGRDFATVRKVLSMPQVNIVKKTEVQTGGFSKESILPKRNSDKLIARKKDWDPKKYGGFDSPTVAYSVLVVAKVEKGKSKKLKSVKELLGITIMERSSFEKNPIDFLEAKGYKEVKKDLIIKLPKYSLFELENGRKRMLASAGELQKGNELALPSKYVNFLYLASHYEKLKGSPEDNEQKQLFVEQHKHYLDEIIEQISEFSKRVILADANLDKVLSAYNKHRDKPIREQAENIIHLFTLTNLGAPAAFKYFDTTIDRKRYTSTKEVLDATLIHQSITGLYETRIDLSQLGGDGGGGGGSGGVLNLEEEYRLHEKPVPSSIDPSWLQLFPTVWAERAGMGLANQVPPVVVELRSGASPVAVRQYPMSKEAREGIRPHIQKFLDLGVLVPCRSPWNTPLLPVKKPGTNDYRPVQDLREINKRVQDIHPTVPNPYNLLSSLPPSYTWYSVLDLKDAFFCLRLHPNSQPLFAFEWKDPEKGNTGQLTWTRLPQGFKNSPTLFNEALHRDLAPFRALNPQVVLLQYVDDLLVAAPTYEDCKKGTQKLLQELSKLGYRVSAKKAQLCQREVTYLGYLLKEGKRWLTPARKATVMKIPVPTTPRQVREFLGKAGFCRLFIPGFASLAAPLYPLTKPSIPFIWTEEHQQAFDHIKKALLSAPALALPDLTKPFTLYIDERAGVARGVLTQTLGPWRRPVAYLSKKLDPVASGWPTCLKAVAAVALLLKDADKLTLGQNVTVIASHSLESIVRQPPDRWMTNARMTHYQSLLLNERVSFAPPAVLNPATLLPVESEATPVHRCSEILAEETGTRRDLEDQPLPGVPTWYTDGSSFITEGKRRAGAPIVDGKRTVWASSLPEGTSAQKAELVALTQALRLAEGKNINIYTDSRYAFATAHIHGAIYKQRGWLTSAGKDIKNKEEILALLEAIHLPRRVAIIHCPGHQRGSNPVATGNRRADEAAKQAALSTRVLAGTTKPAGKRTADGSEFEKRTADGSEFESPKKKAKVE

SEQ ID NO: 1463 - protein, 2094 aa, synthetic construct
MPAAKRVKLDGGDKKYSIGLDIGTNSVGWAVITDEYKVPSKKFKVLGNTDRHSIKKNLIGALLFDSGETAEATRLKRTARRRYTRRKNRICYLQEIFSNEMAKVDDSFFHRLEESFLVEEDKKHERHPIFGNIVDEVAYHEKYPTIYHLRKKLVDSTDKADLRLIYLALAHMIKFRGHFLIEGDLNPDNSDVDKLFIQLVQTYNQLFEENPINASGVDAKAILSARLSKSRRLENLIAQLPGEKKNGLFGNLIALSLGLTPNFKSNFDLAEDAKLQLSKDTYDDDLDNLLAQIGDQYADLFLAAKNLSDAILLSDILRVNTEITKAPLSASMIKRYDEHHQDLTLLKALVRQQLPEKYKEIFFDQSKNGYAGYIDGGASQEEFYKFIKPILEKMDGTEELLVKLNREDLLRKQRTFDNGSIPHQIHLGELHAILRRQEDFYPFLKDNREKIEKILTFRIPYYVGPLARGNSRFAWMTRKSEETITPWNFEEVVDKGASAQSFIERMTNFDKNLPNEKVLPKHSLLYEYFTVYNELTKVKYVTEGMRKPAFLSGEQKKAIVDLLFKTNRKVTVKQLKEDYFKKIECFDSVEISGVEDRFNASLGTYHDLLKIIKDKDFLDNEENEDILEDIVLTLTLFEDREMIEERLKTYAHLFDDKVMKQLKRRRYTGWGRLSRKLINGIRDKQSGKTILDFLKSDGFANRNFMQLIHDDSLTFKEDIQKAQVSGQGDSLHEHIANLAGSPAIKKGILQTVKVVDELVKVMGRHKPENIVIEMARENQTTQKGQKNSRERMKRIEEGIKELGSQILKEHPVENTQLQNEKLYLYYLQNGRDMYVDQELDINRLSDYDVDHIVPQSFLKDDSIDNKVLTRSDKARGKSDNVPSEEVVKKMKNYWRQLLNAKLITQRKFDNLTKAERGGLSELDKAGFIKRQLVETRQITKHVAQILDSRMNTKYDENDKLIREVKVITLKSKLVSDFRKDFQFYKVREINNYHHAHDAYLNAVVGTALIKKYPKLESEFVYGDYKVYDVRKMIAKSEQEIGKATAKYFFYSNIMNFFKTEITLANGEIRKRPLIETNGETGEIVWDKGRDFATVRKVLSMPQVNIVKKTEVQTGGFSKESILPKRNSDKLIARKKDWDPKKYGGFDSPTVAYSVLVVAKVEKGKSKKLKSVKELLGITIMERSSFEKNPIDFLEAKGYKEVKKDLIIKLPKYSLFELENGRKRMLASAGELQKGNELALPSKYVNFLYLASHYEKLKGSPEDNEQKQLFVEQHKHYLDEIIEQISEFSKRVILADANLDKVLSAYNKHRDKPIREQAENIIHLFTLTNLGAPAAFKYFDTTIDRKRYTSTKEVLDATLIHQSITGLYETRIDLSQLGGDGGGGSEAAAKGGGGGVLNLEEEYRLHEKPVPSSIDPSWLQLFPTVWAERAGMGLANQVPPVVVELRSGASPVAVRQYPMSKEAREGIRPHIQKFLDLGVLVPCRSPWNTPLLPVKKPGTNDYRPVQDLREINKRVQDIHPTVPNPYNLLSSLPPSYTWYSVLDLKDAFFCLRLHPNSQPLFAFEWKDPEKGNTGQLTWTRLPQGFKNSPTLFNEALHRDLAPFRALNPQVVLLQYVDDLLVAAPTYEDCKKGTQKLLQELSKLGYRVSAKKAQLCQREVTYLGYLLKEGKRWLTPARKATVMKIPVPTTPRQVREFLGKAGFCRLFIPGFASLAAPLYPLTKPSIPFIWTEEHQQAFDHIKKALLSAPALALPDLTKPFTLYIDERAGVARGVLTQTLGPWRRPVAYLSKKLDPVASGWPTCLKAVAAVALLLKDADKLTLGQNVTVIASHSLESIVRQPPDRWMTNARMTHYQSLLLNERVSFAPPAVLNPATLLPVESEATPVHRCSEILAEETGTRRDLEDQPLPGVPTWYTDGSSFITEGKRRAGAPIVDGKRTVWASSLPEGTSAQKAELVALTQALRLAEGKNINIYTDSRYAFATAHIHGAIYKQRGWLTSAGKDIKNKEEILALLEAIHLPRRVAIIHCPGHQRGSNPVATGNRRADEAAKQAALSTRVLAGTTKPAGKRTADGSEFEKRTADGSEFESPKKKAKVE

SEQ ID NO: 1464 - protein, 2086 aa, synthetic construct
MPAAKRVKLDGGDKKYSIGLDIGTNSVGWAVITDEYKVPSKKFKVLGNTDRHSIKKNLIGALLFDSGETAEATRLKRTARRRYTRRKNRICYLQEIFSNEMAKVDDSFFHRLEESFLVEEDKKHERHPIFGNIVDEVAYHEKYPTIYHLRKKLVDSTDKADLRLIYLALAHMIKFRGHFLIEGDLNPDNSDVDKLFIQLVQTYNQLFEENPINASGVDAKAILSARLSKSRRLENLIAQLPGEKKNGLFGNLIALSLGLTPNFKSNFDLAEDAKLQLSKDTYDDDLDNLLAQIGDQYADLFLAAKNLSDAILLSDILRVNTEITKAPLSASMIKRYDEHHQDLTLLKALVRQQLPEKYKEIFFDQSKNGYAGYIDGGASQEEFYKFIKPILEKMDGTEELLVKLNREDLLRKQRTFDNGSIPHQIHLGELHAILRRQEDFYPFLKDNREKIEKILTFRIPYYVGPLARGNSRFAWMTRKSEETITPWNFEEVVDKGASAQSFIERMTNFDKNLPNEKVLPKHSLLYEYFTVYNELTKVKYVTEGMRKPAFLSGEQKKAIVDLLFKTNRKVTVKQLKEDYFKKIECFDSVEISGVEDRFNASLGTYHDLLKIIKDKDFLDNEENEDILEDIVLTLTLFEDREMIEERLKTYAHLFDDKVMKQLKRRRYTGWGRLSRKLINGIRDKQSGKTILDFLKSDGFANRNFMQLIHDDSLTFKEDIQKAQVSGQGDSLHEHIANLAGSPAIKKGILQTVKVVDELVKVMGRHKPENIVIEMARENQTTQKGQKNSRERMKRIEEGIKELGSQILKEHPVENTQLQNEKLYLYYLQNGRDMYVDQELDINRLSDYDVDHIVPQSFLKDDSIDNKVLTRSDKARGKSDNVPSEEVVKKMKNYWRQLLNAKLITQRKFDNLTKAERGGLSELDKAGFIKRQLVETRQITKHVAQILDSRMNTKYDENDKLIREVKVITLKSKLVSDFRKDFQFYKVREINNYHHAHDAYLNAVVGTALIKKYPKLESEFVYGDYKVYDVRKMIAKSEQEIGKATAKYFFYSNIMNFFKTEITLANGEIRKRPLIETNGETGEIVWDKGRDFATVRKVLSMPQVNIVKKTEVQTGGFSKESILPKRNSDKLIARKKDWDPKKYGGFDSPTVAYSVLVVAKVEKGKSKKLKSVKELLGITIMERSSFEKNPIDFLEAKGYKEVKKDLIIKLPKYSLFELENGRKRMLASAGELQKGNELALPSKYVNFLYLASHYEKLKGSPEDNEQKQLFVEQHKHYLDEIIEQISEFSKRVILADANLDKVLSAYNKHRDKPIREQAENIIHLFTLTNLGAPAAFKYFDTTIDRKRYTSTKEVLDATLIHQSITGLYETRIDLSQLGGDGGGGSGGVLNLEEEYRLHEKPVPSSIDPSWLQLFPTVWAERAGMGLANQVPPVVVELRSGASPVAVRQYPMSKEAREGIRPHIQKFLDLGVLVPCRSPWNTPLLPVKKPGTNDYRPVQDLREINKRVQDIHPTVPNPYNLLSSLPPSYTWYSVLDLKDAFFCLRLHPNSQPLFAFEWKDPEKGNTGQLTWTRLPQGFKNSPTLFNEALHRDLAPFRALNPQVVLLQYVDDLLVAAPTYEDCKKGTQKLLQELSKLGYRVSAKKAQLCQREVTYLGYLLKEGKRWLTPARKATVMKIPVPTTPRQVREFLGKAGFCRLFIPGFASLAAPLYPLTKPSIPFIWTEEHQQAFDHIKKALLSAPALALPDLTKPFTLYIDERAGVARGVLTQTLGPWRRPVAYLSKKLDPVASGWPTCLKAVAAVALLLKDADKLTLGQNVTVIASHSLESIVRQPPDRWMTNARMTHYQSLLLNERVSFAPPAVLNPATLLPVESEATPVHRCSEILAEETGTRRDLEDQPLPGVPTWYTDGSSFITEGKRRAGAPIVDGKRTVWASSLPEGTSAQKAELVALTQALRLAEGKNINIYTDSRYAFATAHIHGAIYKQRGWLTSAGKDIKNKEEILALLEAIHLPRRVAIIHCPGHQRGSNPVATGNRRADEAAKQAALSTRVLAGTTKPAGKRTADGSEFEKRTADGSEFESPKKKAKVE

SEQ ID NO: 1465 - protein, 2091 aa, synthetic construct
MPAAKRVKLDGGDKKYSIGLDIGTNSVGWAVITDEYKVPSKKFKVLGNTDRHSIKKNLIGALLFDSGETAEATRLKRTARRRYTRRKNRICYLQEIFSNEMAKVDDSFFHRLEESFLVEEDKKHERHPIFGNIVDEVAYHEKYPTIYHLRKKLVDSTDKADLRLIYLALAHMIKFRGHFLIEGDLNPDNSDVDKLFIQLVQTYNQLFEENPINASGVDAKAILSARLSKSRRLENLIAQLPGEKKNGLFGNLIALSLGLTPNFKSNFDLAEDAKLQLSKDTYDDDLDNLLAQIGDQYADLFLAAKNLSDAILLSDILRVNTEITKAPLSASMIKRYDEHHQDLTLLKALVRQQLPEKYKEIFFDQSKNGYAGYIDGGASQEEFYKFIKPILEKMDGTEELLVKLNREDLLRKQRTFDNGSIPHQIHLGELHAILRRQEDFYPFLKDNREKIEKILTFRIPYYVGPLARGNSRFAWMTRKSEETITPWNFEEVVDKGASAQSFIERMTNFDKNLPNEKVLPKHSLLYEYFTVYNELTKVKYVTEGMRKPAFLSGEQKKAIVDLLFKTNRKVTVKQLKEDYFKKIECFDSVEISGVEDRFNASLGTYHDLLKIIKDKDFLDNEENEDILEDIVLTLTLFEDREMIEERLKTYAHLFDDKVMKQLKRRRYTGWGRLSRKLINGIRDKQSGKTILDFLKSDGFANRNFMQLIHDDSLTFKEDIQKAQVSGQGDSLHEHIANLAGSPAIKKGILQTVKVVDELVKVMGRHKPENIVIEMARENQTTQKGQKNSRERMKRIEEGIKELGSQILKEHPVENTQLQNEKLYLYYLQNGRDMYVDQELDINRLSDYDVDHIVPQSFLKDDSIDNKVLTRSDKARGKSDNVPSEEVVKKMKNYWRQLLNAKLITQRKFDNLTKAERGGLSELDKAGFIKRQLVETRQITKHVAQILDSRMNTKYDENDKLIREVKVITLKSKLVSDFRKDFQFYKVREINNYHHAHDAYLNAVVGTALIKKYPKLESEFVYGDYKVYDVRKMIAKSEQEIGKATAKYFFYSNIMNFFKTEITLANGEIRKRPLIETNGETGEIVWDKGRDFATVRKVLSMPQVNIVKKTEVQTGGFSKESILPKRNSDKLIARKKDWDPKKYGGFDSPTVAYSVLVVAKVEKGKSKKLKSVKELLGITIMERSSFEKNPIDFLEAKGYKEVKKDLIIKLPKYSLFELENGRKRMLASAGELQKGNELALPSKYVNFLYLASHYEKLKGSPEDNEQKQLFVEQHKHYLDEIIEQISEFSKRVILADANLDKVLSAYNKHRDKPIREQAENIIHLFTLTNLGAPAAFKYFDTTIDRKRYTSTKEVLDATLIHQSITGLYETRIDLSQLGGDGGGGGGGGGGGGVLNLEEEYRLHEKPVPSSIDPSWLQLFPTVWAERAGMGLANQVPPVVVELRSGASPVAVRQYPMSKEAREGIRPHIQKFLDLGVLVPCRSPWNTPLLPVKKPGTNDYRPVQDLREINKRVQDIHPTVPNPYNLLSSLPPSYTWYSVLDLKDAFFCLRLHPNSQPLFAFEWKDPEKGNTGQLTWTRLPQGFKNSPTLFNEALHRDLAPFRALNPQVVLLQYVDDLLVAAPTYEDCKKGTQKLLQELSKLGYRVSAKKAQLCQREVTYLGYLLKEGKRWLTPARKATVMKIPVPTTPRQVREFLGKAGFCRLFIPGFASLAAPLYPLTKPSIPFIWTEEHQQAFDHIKKALLSAPALALPDLTKPFTLYIDERAGVARGVLTQTLGPWRRPVAYLSKKLDPVASGWPTCLKAVAAVALLLKDADKLTLGQNVTVIASHSLESIVRQPPDRWMTNARMTHYQSLLLNERVSFAPPAVLNPATLLPVESEATPVHRCSEILAEETGTRRDLEDQPLPGVPTWYTDGSSFITEGKRRAGAPIVDGKRTVWASSLPEGTSAQKAELVALTQALRLAEGKNINIYTDSRYAFATAHIHGAIYKQRGWLTSAGKDIKNKEEILALLEAIHLPRRVAIIHCPGHQRGSNPVATGNRRADEAAKQAALSTRVLAGTTKPAGKRTADGSEFEKRTADGSEFESPKKKAKVE

SEQ ID NO: 1466 - protein, 2094 aa, synthetic construct
MPAAKRVKLDGGDKKYSIGLDIGTNSVGWAVITDEYKVPSKKFKVLGNTDRHSIKKNLIGALLFDSGETAEATRLKRTARRRYTRRKNRICYLQEIFSNEMAKVDDSFFHRLEESFLVEEDKKHERHPIFGNIVDEVAYHEKYPTIYHLRKKLVDSTDKADLRLIYLALAHMIKFRGHFLIEGDLNPDNSDVDKLFIQLVQTYNQLFEENPINASGVDAKAILSARLSKSRRLENLIAQLPGEKKNGLFGNLIALSLGLTPNFKSNFDLAEDAKLQLSKDTYDDDLDNLLAQIGDQYADLFLAAKNLSDAILLSDILRVNTEITKAPLSASMIKRYDEHHQDLTLLKALVRQQLPEKYKEIFFDQSKNGYAGYIDGGASQEEFYKFIKPILEKMDGTEELLVKLNREDLLRKQRTFDNGSIPHQIHLGELHAILRRQEDFYPFLKDNREKIEKILTFRIPYYVGPLARGNSRFAWMTRKSEETITPWNFEEVVDKGASAQSFIERMTNFDKNLPNEKVLPKHSLLYEYFTVYNELTKVKYVTEGMRKPAFLSGEQKKAIVDLLFKTNRKVTVKQLKEDYFKKIECFDSVEISGVEDRFNASLGTYHDLLKIIKDKDFLDNEENEDILEDIVLTLTLFEDREMIEERLKTYAHLFDDKVMKQLKRRRYTGWGRLSRKLINGIRDKQSGKTILDFLKSDGFANRNFMQLIHDDSLTFKEDIQKAQVSGQGDSLHEHIANLAGSPAIKKGILQTVKVVDELVKVMGRHKPENIVIEMARENQTTQKGQKNSRERMKRIEEGIKELGSQILKEHPVENTQLQNEKLYLYYLQNGRDMYVDQELDINRLSDYDVDHIVPQSFLKDDSIDNKVLTRSDKARGKSDNVPSEEVVKKMKNYWRQLLNAKLITQRKFDNLTKAERGGLSELDKAGFIKRQLVETRQITKHVAQILDSRMNTKYDENDKLIREVKVITLKSKLVSDFRKDFQFYKVREINNYHHAHDAYLNAVVGTALIKKYPKLESEFVYGDYKVYDVRKMIAKSEQEIGKATAKYFFYSNIMNFFKTEITLANGEIRKRPLIETNGETGEIVWDKGRDFATVRKVLSMPQVNIVKKTEVQTGGFSKESILPKRNSDKLIARKKDWDPKKYGGFDSPTVAYSVLVVAKVEKGKSKKLKSVKELLGITIMERSSFEKNPIDFLEAKGYKEVKKDLIIKLPKYSLFELENGRKRMLASAGELQKGNELALPSKYVNFLYLASHYEKLKGSPEDNEQKQLFVEQHKHYLDEIIEQISEFSKRVILADANLDKVLSAYNKHRDKPIREQAENIIHLFTLTNLGAPAAFKYFDTTIDRKRYTSTKEVLDATLIHQSITGLYETRIDLSQLGGDGGGSSGGGEAAAKGGVLNLEEEYRLHEKPVPSSIDPSWLQLFPTVWAERAGMGLANQVPPVVVELRSGASPVAVRQYPMSKEAREGIRPHIQKFLDLGVLVPCRSPWNTPLLPVKKPGTNDYRPVQDLREINKRVQDIHPTVPNPYNLLSSLPPSYTWYSVLDLKDAFFCLRLHPNSQPLFAFEWKDPEKGNTGQLTWTRLPQGFKNSPTLFNEALHRDLAPFRALNPQVVLLQYVDDLLVAAPTYEDCKKGTQKLLQELSKLGYRVSAKKAQLCQREVTYLGYLLKEGKRWLTPARKATVMKIPVPTTPRQVREFLGKAGFCRLFIPGFASLAAPLYPLTKPSIPFIWTEEHQQAFDHIKKALLSAPALALPDLTKPFTLYIDERAGVARGVLTQTLGPWRRPVAYLSKKLDPVASGWPTCLKAVAAVALLLKDADKLTLGQNVTVIASHSLESIVRQPPDRWMTNARMTHYQSLLLNERVSFAPPAVLNPATLLPVESEATPVHRCSEILAEETGTRRDLEDQPLPGVPTWYTDGSSFITEGKRRAGAPIVDGKRTVWASSLPEGTSAQKAELVALTQALRLAEGKNINIYTDSRYAFATAHIHGAIYKQRGWLTSAGKDIKNKEEILALLEAIHLPRRVAIIHCPGHQRGSNPVATGNRRADEAAKQAALSTRVLAGTTKPAGKRTADGSEFEKRTADGSEFESPKKKAKVE

SEQ ID NO: 1467 - protein, 2094 aa, synthetic construct
MPAAKRVKLDGGDKKYSIGLDIGTNSVGWAVITDEYKVPSKKFKVLGNTDRHSIKKNLIGALLFDSGETAEATRLKRTARRRYTRRKNRICYLQEIFSNEMAKVDDSFFHRLEESFLVEEDKKHERHPIFGNIVDEVAYHEKYPTIYHLRKKLVDSTDKADLRLIYLALAHMIKFRGHFLIEGDLNPDNSDVDKLFIQLVQTYNQLFEENPINASGVDAKAILSARLSKSRRLENLIAQLPGEKKNGLFGNLIALSLGLTPNFKSNFDLAEDAKLQLSKDTYDDDLDNLLAQIGDQYADLFLAAKNLSDAILLSDILRVNTEITKAPLSASMIKRYDEHHQDLTLLKALVRQQLPEKYKEIFFDQSKNGYAGYIDGGASQEEFYKFIKPILEKMDGTEELLVKLNREDLLRKQRTFDNGSIPHQIHLGELHAILRRQEDFYPFLKDNREKIEKILTFRIPYYVGPLARGNSRFAWMTRKSEETITPWNFEEVVDKGASAQSFIERMTNFDKNLPNEKVLPKHSLLYEYFTVYNELTKVKYVTEGMRKPAFLSGEQKKAIVDLLFKTNRKVTVKQLKEDYFKKIECFDSVEISGVEDRFNASLGTYHDLLKIIKDKDFLDNEENEDILEDIVLTLTLFEDREMIEERLKTYAHLFDDKVMKQLKRRRYTGWGRLSRKLINGIRDKQSGKTILDFLKSDGFANRNFMQLIHDDSLTFKEDIQKAQVSGQGDSLHEHIANLAGSPAIKKGILQTVKVVDELVKVMGRHKPENIVIEMARENQTTQKGQKNSRERMKRIEEGIKELGSQILKEHPVENTQLQNEKLYLYYLQNGRDMYVDQELDINRLSDYDVDHIVPQSFLKDDSIDNKVLTRSDKARGKSDNVPSEEVVKKMKNYWRQLLNAKLITQRKFDNLTKAERGGLSELDKAGFIKRQLVETRQITKHVAQILDSRMNTKYDENDKLIREVKVITLKSKLVSDFRKDFQFYKVREINNYHHAHDAYLNAVVGTALIKKYPKLESEFVYGDYKVYDVRKMIAKSEQEIGKATAKYFFYSNIMNFFKTEITLANGEIRKRPLIETNGETGEIVWDKGRDFATVRKVLSMPQVNIVKKTEVQTGGFSKESILPKRNSDKLIARKKDWDPKKYGGFDSPTVAYSVLVVAKVEKGKSKKLKSVKELLGITIMERSSFEKNPIDFLEAKGYKEVKKDLIIKLPKYSLFELENGRKRMLASAGELQKGNELALPSKYVNFLYLASHYEKLKGSPEDNEQKQLFVEQHKHYLDEIIEQISEFSKRVILADANLDKVLSAYNKHRDKPIREQAENIIHLFTLTNLGAPAAFKYFDTTIDRKRYTSTKEVLDATLIHQSITGLYETRIDLSQLGGDGGEAAAKGSSPAPGGVLNLEEEYRLHEKPVPSSIDPSWLQLFPTVWAERAGMGLANQVPPVVVELRSGASPVAVRQYPMSKEAREGIRPHIQKFLDLGVLVPCRSPWNTPLLPVKKPGTNDYRPVQDLREINKRVQDIHPTVPNPYNLLSSLPPSYTWYSVLDLKDAFFCLRLHPNSQPLFAFEWKDPEKGNTGQLTWTRLPQGFKNSPTLFNEALHRDLAPFRALNPQVVLLQYVDDLLVAAPTYEDCKKGTQKLLQELSKLGYRVSAKKAQLCQREVTYLGYLLKEGKRWLTPARKATVMKIPVPTTPRQVREFLGKAGFCRLFIPGFASLAAPLYPLTKPSIPFIWTEEHQQAFDHIKKALLSAPALALPDLTKPFTLYIDERAGVARGVLTQTLGPWRRPVAYLSKKLDPVASGWPTCLKAVAAVALLLKDADKLTLGQNVTVIASHSLESIVRQPPDRWMTNARMTHYQSLLLNERVSFAPPAVLNPATLLPVESEATPVHRCSEILAEETGTRRDLEDQPLPGVPTWYTDGSSFITEGKRRAGAPIVDGKRTVWASSLPEGTSAQKAELVALTQALRLAEGKNINIYTDSRYAFATAHIHGAIYKQRGWLTSAGKDIKNKEEILALLEAIHLPRRVAIIHCPGHQRGSNPVATGNRRADEAAKQAALSTRVLAGTTKPAGKRTADGSEFEKRTADGSEFESPKKKAKVE

SEQ ID NO: 1468 - protein, 2094 aa, synthetic construct
MPAAKRVKLDGGDKKYSIGLDIGTNSVGWAVITDEYKVPSKKFKVLGNTDRHSIKKNLIGALLFDSGETAEATRLKRTARRRYTRRKNRICYLQEIFSNEMAKVDDSFFHRLEESFLVEEDKKHERHPIFGNIVDEVAYHEKYPTIYHLRKKLVDSTDKADLRLIYLALAHMIKFRGHFLIEGDLNPDNSDVDKLFIQLVQTYNQLFEENPINASGVDAKAILSARLSKSRRLENLIAQLPGEKKNGLFGNLIALSLGLTPNFKSNFDLAEDAKLQLSKDTYDDDLDNLLAQIGDQYADLFLAAKNLSDAILLSDILRVNTEITKAPLSASMIKRYDEHHQDLTLLKALVRQQLPEKYKEIFFDQSKNGYAGYIDGGASQEEFYKFIKPILEKMDGTEELLVKLNREDLLRKQRTFDNGSIPHQIHLGELHAILRRQEDFYPFLKDNREKIEKILTFRIPYYVGPLARGNSRFAWMTRKSEETITPWNFEEVVDKGASAQSFIERMTNFDKNLPNEKVLPKHSLLYEYFTVYNELTKVKYVTEGMRKPAFLSGEQKKAIVDLLFKTNRKVTVKQLKEDYFKKIECFDSVEISGVEDRFNASLGTYHDLLKIIKDKDFLDNEENEDILEDIVLTLTLFEDREMIEERLKTYAHLFDDKVMKQLKRRRYTGWGRLSRKLINGIRDKQSGKTILDFLKSDGFANRNFMQLIHDDSLTFKEDIQKAQVSGQGDSLHEHIANLAGSPAIKKGILQTVKVVDELVKVMGRHKPENIVIEMARENQTTQKGQKNSRERMKRIEEGIKELGSQILKEHPVENTQLQNEKLYLYYLQNGRDMYVDQELDINRLSDYDVDHIVPQSFLKDDSIDNKVLTRSDKARGKSDNVPSEEVVKKMKNYWRQLLNAKLITQRKFDNLTKAERGGLSELDKAGFIKRQLVETRQITKHVAQILDSRMNTKYDENDKLIREVKVITLKSKLVSDFRKDFQFYKVREINNYHHAHDAYLNAVVGTALIKKYPKLESEFVYGDYKVYDVRKMIAKSEQEIGKATAKYFFYSNIMNFFKTEITLANGEIRKRPLIETNGETGEIVWDKGRDFATVRKVLSMPQVNIVKKTEVQTGGFSKESILPKRNSDKLIARKKDWDPKKYGGFDSPTVAYSVLVVAKVEKGKSKKLKSVKELLGITIMERSSFEKNPIDFLEAKGYKEVKKDLIIKLPKYSLFELENGRKRMLASAGELQKGNELALPSKYVNFLYLASHYEKLKGSPEDNEQKQLFVEQHKHYLDEIIEQISEFSKRVILADANLDKVLSAYNKHRDKPIREQAENIIHLFTLTNLGAPAAFKYFDTTIDRKRYTSTKEVLDATLIHQSITGLYETRIDLSQLGGDGGGGSEAAAKPAPGGVLNLEEEYRLHEKPVPSSIDPSWLQLFPTVWAERAGMGLANQVPPVVVELRSGASPVAVRQYPMSKEAREGIRPHIQKFLDLGVLVPCRSPWNTPLLPVKKPGTNDYRPVQDLREINKRVQDIHPTVPNPYNLLSSLPPSYTWYSVLDLKDAFFCLRLHPNSQPLFAFEWKDPEKGNTGQLTWTRLPQGFKNSPTLFNEALHRDLAPFRALNPQVVLLQYVDDLLVAAPTYEDCKKGTQKLLQELSKLGYRVSAKKAQLCQREVTYLGYLLKEGKRWLTPARKATVMKIPVPTTPRQVREFLGKAGFCRLFIPGFASLAAPLYPLTKPSIPFIWTEEHQQAFDHIKKALLSAPALALPDLTKPFTLYIDERAGVARGVLTQTLGPWRRPVAYLSKKLDPVASGWPTCLKAVAAVALLLKDADKLTLGQNVTVIASHSLESIVRQPPDRWMTNARMTHYQSLLLNERVSFAPPAVLNPATLLPVESEATPVHRCSEILAEETGTRRDLEDQPLPGVPTWYTDGSSFITEGKRRAGAPIVDGKRTVWASSLPEGTSAQKAELVALTQALRLAEGKNINIYTDSRYAFATAHIHGAIYKQRGWLTSAGKDIKNKEEILALLEAIHLPRRVAIIHCPGHQRGSNPVATGNRRADEAAKQAALSTRVLAGTTKPAGKRTADGSEFEKRTADGSEFESPKKKAKVE

SEQ ID NO: 1469 - protein, 2094 aa, synthetic construct
MPAAKRVKLDGGDKKYSIGLDIGTNSVGWAVITDEYKVPSKKFKVLGNTDRHSIKKNLIGALLFDSGETAEATRLKRTARRRYTRRKNRICYLQEIFSNEMAKVDDSFFHRLEESFLVEEDKKHERHPIFGNIVDEVAYHEKYPTIYHLRKKLVDSTDKADLRLIYLALAHMIKFRGHFLIEGDLNPDNSDVDKLFIQLVQTYNQLFEENPINASGVDAKAILSARLSKSRRLENLIAQLPGEKKNGLFGNLIALSLGLTPNFKSNFDLAEDAKLQLSKDTYDDDLDNLLAQIGDQYADLFLAAKNLSDAILLSDILRVNTEITKAPLSASMIKRYDEHHQDLTLLKALVRQQLPEKYKEIFFDQSKNGYAGYIDGGASQEEFYKFIKPILEKMDGTEELLVKLNREDLLRKQRTFDNGSIPHQIHLGELHAILRRQEDFYPFLKDNREKIEKILTFRIPYYVGPLARGNSRFAWMTRKSEETITPWNFEEVVDKGASAQSFIERMTNFDKNLPNEKVLPKHSLLYEYFTVYNELTKVKYVTEGMRKPAFLSGEQKKAIVDLLFKTNRKVTVKQLKEDYFKKIECFDSVEISGVEDRFNASLGTYHDLLKIIKDKDFLDNEENEDILEDIVLTLTLFEDREMIEERLKTYAHLFDDKVMKQLKRRRYTGWGRLSRKLINGIRDKQSGKTILDFLKSDGFANRNFMQLIHDDSLTFKEDIQKAQVSGQGDSLHEHIANLAGSPAIKKGILQTVKVVDELVKVMGRHKPENIVIEMARENQTTQKGQKNSRERMKRIEEGIKELGSQILKEHPVENTQLQNEKLYLYYLQNGRDMYVDQELDINRLSDYDVDHIVPQSFLKDDSIDNKVLTRSDKARGKSDNVPSEEVVKKMKNYWRQLLNAKLITQRKFDNLTKAERGGLSELDKAGFIKRQLVETRQITKHVAQILDSRMNTKYDENDKLIREVKVITLKSKLVSDFRKDFQFYKVREINNYHHAHDAYLNAVVGTALIKKYPKLESEFVYGDYKVYDVRKMIAKSEQEIGKATAKYFFYSNIMNFFKTEITLANGEIRKRPLIETNGETGEIVWDKGRDFATVRKVLSMPQVNIVKKTEVQTGGFSKESILPKRNSDKLIARKKDWDPKKYGGFDSPTVAYSVLVVAKVEKGKSKKLKSVKELLGITIMERSSFEKNPIDFLEAKGYKEVKKDLIIKLPKYSLFELENGRKRMLASAGELQKGNELALPSKYVNFLYLASHYEKLKGSPEDNEQKQLFVEQHKHYLDEIIEQISEFSKRVILADANLDKVLSAYNKHRDKPIREQAENIIHLFTLTNLGAPAAFKYFDTTIDRKRYTSTKEVLDATLIHQSITGLYETRIDLSQLGGDGGEAAAKPAPGGSGGVLNLEEEYRLHEKPVPSSIDPSWLQLFPTVWAERAGMGLANQVPPVVVELRSGASPVAVRQYPMSKEAREGIRPHIQKFLDLGVLVPCRSPWNTPLLPVKKPGTNDYRPVQDLREINKRVQDIHPTVPNPYNLLSSLPPSYTWYSVLDLKDAFFCLRLHPNSQPLFAFEWKDPEKGNTGQLTWTRLPQGFKNSPTLFNEALHRDLAPFRALNPQVVLLQYVDDLLVAAPTYEDCKKGTQKLLQELSKLGYRVSAKKAQLCQREVTYLGYLLKEGKRWLTPARKATVMKIPVPTTPRQVREFLGKAGFCRLFIPGFASLAAPLYPLTKPSIPFIWTEEHQQAFDHIKKALLSAPALALPDLTKPFTLYIDERAGVARGVLTQTLGPWRRPVAYLSKKLDPVASGWPTCLKAVAAVALLLKDADKLTLGQNVTVIASHSLESIVRQPPDRWMTNARMTHYQSLLLNERVSFAPPAVLNPATLLPVESEATPVHRCSEILAEETGTRRDLEDQPLPGVPTWYTDGSSFITEGKRRAGAPIVDGKRTVWASSLPEGTSAQKAELVALTQALRLAEGKNINIYTDSRYAFATAHIHGAIYKQRGWLTSAGKDIKNKEEILALLEAIHLPRRVAIIHCPGHQRGSNPVATGNRRADEAAKQAALSTRVLAGTTKPAGKRTADGSEFEKRTADGSEFESPKKKAKVE

SEQ ID NO: 1470 - protein, 2089 aa, synthetic construct
MPAAKRVKLDGGDKKYSIGLDIGTNSVGWAVITDEYKVPSKKFKVLGNTDRHSIKKNLIGALLFDSGETAEATRLKRTARRRYTRRKNRICYLQEIFSNEMAKVDDSFFHRLEESFLVEEDKKHERHPIFGNIVDEVAYHEKYPTIYHLRKKLVDSTDKADLRLIYLALAHMIKFRGHFLIEGDLNPDNSDVDKLFIQLVQTYNQLFEENPINASGVDAKAILSARLSKSRRLENLIAQLPGEKKNGLFGNLIALSLGLTPNFKSNFDLAEDAKLQLSKDTYDDDLDNLLAQIGDQYADLFLAAKNLSDAILLSDILRVNTEITKAPLSASMIKRYDEHHQDLTLLKALVRQQLPEKYKEIFFDQSKNGYAGYIDGGASQEEFYKFIKPILEKMDGTEELLVKLNREDLLRKQRTFDNGSIPHQIHLGELHAILRRQEDFYPFLKDNREKIEKILTFRIPYYVGPLARGNSRFAWMTRKSEETITPWNFEEVVDKGASAQSFIERMTNFDKNLPNEKVLPKHSLLYEYFTVYNELTKVKYVTEGMRKPAFLSGEQKKAIVDLLFKTNRKVTVKQLKEDYFKKIECFDSVEISGVEDRFNASLGTYHDLLKIIKDKDFLDNEENEDILEDIVLTLTLFEDREMIEERLKTYAHLFDDKVMKQLKRRRYTGWGRLSRKLINGIRDKQSGKTILDFLKSDGFANRNFMQLIHDDSLTFKEDIQKAQVSGQGDSLHEHIANLAGSPAIKKGILQTVKVVDELVKVMGRHKPENIVIEMARENQTTQKGQKNSRERMKRIEEGIKELGSQILKEHPVENTQLQNEKLYLYYLQNGRDMYVDQELDINRLSDYDVDHIVPQSFLKDDSIDNKVLTRSDKARGKSDNVPSEEVVKKMKNYWRQLLNAKLITQRKFDNLTKAERGGLSELDKAGFIKRQLVETRQITKHVAQILDSRMNTKYDENDKLIREVKVITLKSKLVSDFRKDFQFYKVREINNYHHAHDAYLNAVVGTALIKKYPKLESEFVYGDYKVYDVRKMIAKSEQEIGKATAKYFFYSNIMNFFKTEITLANGEIRKRPLIETNGETGEIVWDKGRDFATVRKVLSMPQVNIVKKTEVQTGGFSKESILPKRNSDKLIARKKDWDPKKYGGFDSPTVAYSVLVVAKVEKGKSKKLKSVKELLGITIMERSSFEKNPIDFLEAKGYKEVKKDLIIKLPKYSLFELENGRKRMLASAGELQKGNELALPSKYVNFLYLASHYEKLKGSPEDNEQKQLFVEQHKHYLDEIIEQISEFSKRVILADANLDKVLSAYNKHRDKPIREQAENIIHLFTLTNLGAPAAFKYFDTTIDRKRYTSTKEVLDATLIHQSITGLYETRIDLSQLGGDGGGGSPAPGGVLNLEEEYRLHEKPVPSSIDPSWLQLFPTVWAERAGMGLANQVPPVVVELRSGASPVAVRQYPMSKEAREGIRPHIQKFLDLGVLVPCRSPWNTPLLPVKKPGTNDYRPVQDLREINKRVQDIHPTVPNPYNLLSSLPPSYTWYSVLDLKDAFFCLRLHPNSQPLFAFEWKDPEKGNTGQLTWTRLPQGFKNSPTLFNEALHRDLAPFRALNPQVVLLQYVDDLLVAAPTYEDCKKGTQKLLQELSKLGYRVSAKKAQLCQREVTYLGYLLKEGKRWLTPARKATVMKIPVPTTPRQVREFLGKAGFCRLFIPGFASLAAPLYPLTKPSIPFIWTEEHQQAFDHIKKALLSAPALALPDLTKPFTLYIDERAGVARGVLTQTLGPWRRPVAYLSKKLDPVASGWPTCLKAVAAVALLLKDADKLTLGQNVTVIASHSLESIVRQPPDRWMTNARMTHYQSLLLNERVSFAPPAVLNPATLLPVESEATPVHRCSEILAEETGTRRDLEDQPLPGVPTWYTDGSSFITEGKRRAGAPIVDGKRTVWASSLPEGTSAQKAELVALTQALRLAEGKNINIYTDSRYAFATAHIHGAIYKQRGWLTSAGKDIKNKEEILALLEAIHLPRRVAIIHCPGHQRGSNPVATGNRRADEAAKQAALSTRVLAGTTKPAGKRTADGSEFEKRTADGSEFESPKKKAKVE

SEQ ID NO: 1471 - protein, 2092 aa, synthetic construct
MPAAKRVKLDGGDKKYSIGLDIGTNSVGWAVITDEYKVPSKKFKVLGNTDRHSIKKNLIGALLFDSGETAEATRLKRTARRRYTRRKNRICYLQEIFSNEMAKVDDSFFHRLEESFLVEEDKKHERHPIFGNIVDEVAYHEKYPTIYHLRKKLVDSTDKADLRLIYLALAHMIKFRGHFLIEGDLNPDNSDVDKLFIQLVQTYNQLFEENPINASGVDAKAILSARLSKSRRLENLIAQLPGEKKNGLFGNLIALSLGLTPNFKSNFDLAEDAKLQLSKDTYDDDLDNLLAQIGDQYADLFLAAKNLSDAILLSDILRVNTEITKAPLSASMIKRYDEHHQDLTLLKALVRQQLPEKYKEIFFDQSKNGYAGYIDGGASQEEFYKFIKPILEKMDGTEELLVKLNREDLLRKQRTFDNGSIPHQIHLGELHAILRRQEDFYPFLKDNREKIEKILTFRIPYYVGPLARGNSRFAWMTRKSEETITPWNFEEVVDKGASAQSFIERMTNFDKNLPNEKVLPKHSLLYEYFTVYNELTKVKYVTEGMRKPAFLSGEQKKAIVDLLFKTNRKVTVKQLKEDYFKKIECFDSVEISGVEDRFNASLGTYHDLLKIIKDKDFLDNEENEDILEDIVLTLTLFEDREMIEERLKTYAHLFDDKVMKQLKRRRYTGWGRLSRKLINGIRDKQSGKTILDFLKSDGFANRNFMQLIHDDSLTFKEDIQKAQVSGQGDSLHEHIANLAGSPAIKKGILQTVKVVDELVKVMGRHKPENIVIEMARENQTTQKGQKNSRERMKRIEEGIKELGSQILKEHPVENTQLQNEKLYLYYLQNGRDMYVDQELDINRLSDYDVDHIVPQSFLKDDSIDNKVLTRSDKARGKSDNVPSEEVVKKMKNYWRQLLNAKLITQRKFDNLTKAERGGLSELDKAGFIKRQLVETRQITKHVAQILDSRMNTKYDENDKLIREVKVITLKSKLVSDFRKDFQFYKVREINNYHHAHDAYLNAVVGTALIKKYPKLESEFVYGDYKVYDVRKMIAKSEQEIGKATAKYFFYSNIMNFFKTEITLANGEIRKRPLIETNGETGEIVWDKGRDFATVRKVLSMPQVNIVKKTEVQTGGFSKESILPKRNSDKLIARKKDWDPKKYGGFDSPTVAYSVLVVAKVEKGKSKKLKSVKELLGITIMERSSFEKNPIDFLEAKGYKEVKKDLIIKLPKYSLFELENGRKRMLASAGELQKGNELALPSKYVNFLYLASHYEKLKGSPEDNEQKQLFVEQHKHYLDEIIEQISEFSKRVILADANLDKVLSAYNKHRDKPIREQAENIIHLFTLTNLGAPAAFKYFDTTIDRKRYTSTKEVLDATLIHQSITGLYETRIDLSQLGGDGGGGGGSSGGSGGVLNLEEEYRLHEKPVPSSIDPSWLQLFPTVWAERAGMGLANQVPPVVVELRSGASPVAVRQYPMSKEAREGIRPHIQKFLDLGVLVPCRSPWNTPLLPVKKPGTNDYRPVQDLREINKRVQDIHPTVPNPYNLLSSLPPSYTWYSVLDLKDAFFCLRLHPNSQPLFAFEWKDPEKGNTGQLTWTRLPQGFKNSPTLFNEALHRDLAPFRALNPQVVLLQYVDDLLVAAPTYEDCKKGTQKLLQELSKLGYRVSAKKAQLCQREVTYLGYLLKEGKRWLTPARKATVMKIPVPTTPRQVREFLGKAGFCRLFIPGFASLAAPLYPLTKPSIPFIWTEEHQQAFDHIKKALLSAPALALPDLTKPFTLYIDERAGVARGVLTQTLGPWRRPVAYLSKKLDPVASGWPTCLKAVAAVALLLKDADKLTLGQNVTVIASHSLESIVRQPPDRWMTNARMTHYQSLLLNERVSFAPPAVLNPATLLPVESEATPVHRCSEILAEETGTRRDLEDQPLPGVPTWYTDGSSFITEGKRRAGAPIVDGKRTVWASSLPEGTSAQKAELVALTQALRLAEGKNINIYTDSRYAFATAHIHGAIYKQRGWLTSAGKDIKNKEEILALLEAIHLPRRVAIIHCPGHQRGSNPVATGNRRADEAAKQAALSTRVLAGTTKPAGKRTADGSEFEKRTADGSEFESPKKKAKVE

SEQ ID NO: 1472 - protein, 2092 aa, synthetic construct
MPAAKRVKLDGGDKKYSIGLDIGTNSVGWAVITDEYKVPSKKFKVLGNTDRHSIKKNLIGALLFDSGETAEATRLKRTARRRYTRRKNRICYLQEIFSNEMAKVDDSFFHRLEESFLVEEDKKHERHPIFGNIVDEVAYHEKYPTIYHLRKKLVDSTDKADLRLIYLALAHMIKFRGHFLIEGDLNPDNSDVDKLFIQLVQTYNQLFEENPINASGVDAKAILSARLSKSRRLENLIAQLPGEKKNGLFGNLIALSLGLTPNFKSNFDLAEDAKLQLSKDTYDDDLDNLLAQIGDQYADLFLAAKNLSDAILLSDILRVNTEITKAPLSASMIKRYDEHHQDLTLLKALVRQQLPEKYKEIFFDQSKNGYAGYIDGGASQEEFYKFIKPILEKMDGTEELLVKLNREDLLRKQRTFDNGSIPHQIHLGELHAILRRQEDFYPFLKDNREKIEKILTFRIPYYVGPLARGNSRFAWMTRKSEETITPWNFEEVVDKGASAQSFIERMTNFDKNLPNEKVLPKHSLLYEYFTVYNELTKVKYVTEGMRKPAFLSGEQKKAIVDLLFKTNRKVTVKQLKEDYFKKIECFDSVEISGVEDRFNASLGTYHDLLKIIKDKDFLDNEENEDILEDIVLTLTLFEDREMIEERLKTYAHLFDDKVMKQLKRRRYTGWGRLSRKLINGIRDKQSGKTILDFLKSDGFANRNFMQLIHDDSLTFKEDIQKAQVSGQGDSLHEHIANLAGSPAIKKGILQTVKVVDELVKVMGRHKPENIVIEMARENQTTQKGQKNSRERMKRIEEGIKELGSQILKEHPVENTQLQNEKLYLYYLQNGRDMYVDQELDINRLSDYDVDHIVPQSFLKDDSIDNKVLTRSDKARGKSDNVPSEEVVKKMKNYWRQLLNAKLITQRKFDNLTKAERGGLSELDKAGFIKRQLVETRQITKHVAQILDSRMNTKYDENDKLIREVKVITLKSKLVSDFRKDFQFYKVREINNYHHAHDAYLNAVVGTALIKKYPKLESEFVYGDYKVYDVRKMIAKSEQEIGKATAKYFFYSNIMNFFKTEITLANGEIRKRPLIETNGETGEIVWDKGRDFATVRKVLSMPQVNIVKKTEVQTGGFSKESILPKRNSDKLIARKKDWDPKKYGGFDSPTVAYSVLVVAKVEKGKSKKLKSVKELLGITIMERSSFEKNPIDFLEAKGYKEVKKDLIIKLPKYSLFELENGRKRMLASAGELQKGNELALPSKYVNFLYLASHYEKLKGSPEDNEQKQLFVEQHKHYLDEIIEQISEFSKRVILADANLDKVLSAYNKHRDKPIREQAENIIHLFTLTNLGAPAAFKYFDTTIDRKRYTSTKEVLDATLIHQSITGLYETRIDLSQLGGDGGGGSGGGGSSGGVLNLEEEYRLHEKPVPSSIDPSWLQLFPTVWAERAGMGLANQVPPVVVELRSGASPVAVRQYPMSKEAREGIRPHIQKFLDLGVLVPCRSPWNTPLLPVKKPGTNDYRPVQDLREINKRVQDIHPTVPNPYNLLSSLPPSYTWYSVLDLKDAFFCLRLHPNSQPLFAFEWKDPEKGNTGQLTWTRLPQGFKNSPTLFNEALHRDLAPFRALNPQVVLLQYVDDLLVAAPTYEDCKKGTQKLLQELSKLGYRVSAKKAQLCQREVTYLGYLLKEGKRWLTPARKATVMKIPVPTTPRQVREFLGKAGFCRLFIPGFASLAAPLYPLTKPSIPFIWTEEHQQAFDHIKKALLSAPALALPDLTKPFTLYIDERAGVARGVLTQTLGPWRRPVAYLSKKLDPVASGWPTCLKAVAAVALLLKDADKLTLGQNVTVIASHSLESIVRQPPDRWMTNARMTHYQSLLLNERVSFAPPAVLNPATLLPVESEATPVHRCSEILAEETGTRRDLEDQPLPGVPTWYTDGSSFITEGKRRAGAPIVDGKRTVWASSLPEGTSAQKAELVALTQALRLAEGKNINIYTDSRYAFATAHIHGAIYKQRGWLTSAGKDIKNKEEILALLEAIHLPRRVAIIHCPGHQRGSNPVATGNRRADEAAKQAALSTRVLAGTTKPAGKRTADGSEFEKRTADGSEFESPKKKAKVE

SEQ ID NO: 1473 - protein, 2094 aa, synthetic construct
MPAAKRVKLDGGDKKYSIGLDIGTNSVGWAVITDEYKVPSKKFKVLGNTDRHSIKKNLIGALLFDSGETAEATRLKRTARRRYTRRKNRICYLQEIFSNEMAKVDDSFFHRLEESFLVEEDKKHERHPIFGNIVDEVAYHEKYPTIYHLRKKLVDSTDKADLRLIYLALAHMIKFRGHFLIEGDLNPDNSDVDKLFIQLVQTYNQLFEENPINASGVDAKAILSARLSKSRRLENLIAQLPGEKKNGLFGNLIALSLGLTPNFKSNFDLAEDAKLQLSKDTYDDDLDNLLAQIGDQYADLFLAAKNLSDAILLSDILRVNTEITKAPLSASMIKRYDEHHQDLTLLKALVRQQLPEKYKEIFFDQSKNGYAGYIDGGASQEEFYKFIKPILEKMDGTEELLVKLNREDLLRKQRTFDNGSIPHQIHLGELHAILRRQEDFYPFLKDNREKIEKILTFRIPYYVGPLARGNSRFAWMTRKSEETITPWNFEEVVDKGASAQSFIERMTNFDKNLPNEKVLPKHSLLYEYFTVYNELTKVKYVTEGMRKPAFLSGEQKKAIVDLLFKTNRKVTVKQLKEDYFKKIECFDSVEISGVEDRFNASLGTYHDLLKIIKDKDFLDNEENEDILEDIVLTLTLFEDREMIEERLKTYAHLFDDKVMKQLKRRRYTGWGRLSRKLINGIRDKQSGKTILDFLKSDGFANRNFMQLIHDDSLTFKEDIQKAQVSGQGDSLHEHIANLAGSPAIKKGILQTVKVVDELVKVMGRHKPENIVIEMARENQTTQKGQKNSRERMKRIEEGIKELGSQILKEHPVENTQLQNEKLYLYYLQNGRDMYVDQELDINRLSDYDVDHIVPQSFLKDDSIDNKVLTRSDKARGKSDNVPSEEVVKKMKNYWRQLLNAKLITQRKFDNLTKAERGGLSELDKAGFIKRQLVETRQITKHVAQILDSRMNTKYDENDKLIREVKVITLKSKLVSDFRKDFQFYKVREINNYHHAHDAYLNAVVGTALIKKYPKLESEFVYGDYKVYDVRKMIAKSEQEIGKATAKYFFYSNIMNFFKTEITLANGEIRKRPLIETNGETGEIVWDKGRDFATVRKVLSMPQVNIVKKTEVQTGGFSKESILPKRNSDKLIARKKDWDPKKYGGFDSPTVAYSVLVVAKVEKGKSKKLKSVKELLGITIMERSSFEKNPIDFLEAKGYKEVKKDLIIKLPKYSLFELENGRKRMLASAGELQKGNELALPSKYVNFLYLASHYEKLKGSPEDNEQKQLFVEQHKHYLDEIIEQISEFSKRVILADANLDKVLSAYNKHRDKPIREQAENIIHLFTLTNLGAPAAFKYFDTTIDRKRYTSTKEVLDATLIHQSITGLYETRIDLSQLGGDGGGGSEAAAKGSSGGVLNLEEEYRLHEKPVPSSIDPSWLQLFPTVWAERAGMGLANQVPPVVVELRSGASPVAVRQYPMSKEAREGIRPHIQKFLDLGVLVPCRSPWNTPLLPVKKPGTNDYRPVQDLREINKRVQDIHPTVPNPYNLLSSLPPSYTWYSVLDLKDAFFCLRLHPNSQPLFAFEWKDPEKGNTGQLTWTRLPQGFKNSPTLFNEALHRDLAPFRALNPQVVLLQYVDDLLVAAPTYEDCKKGTQKLLQELSKLGYRVSAKKAQLCQREVTYLGYLLKEGKRWLTPARKATVMKIPVPTTPRQVREFLGKAGFCRLFIPGFASLAAPLYPLTKPSIPFIWTEEHQQAFDHIKKALLSAPALALPDLTKPFTLYIDERAGVARGVLTQTLGPWRRPVAYLSKKLDPVASGWPTCLKAVAAVALLLKDADKLTLGQNVTVIASHSLESIVRQPPDRWMTNARMTHYQSLLLNERVSFAPPAVLNPATLLPVESEATPVHRCSEILAEETGTRRDLEDQPLPGVPTWYTDGSSFITEGKRRAGAPIVDGKRTVWASSLPEGTSAQKAELVALTQALRLAEGKNINIYTDSRYAFATAHIHGAIYKQRGWLTSAGKDIKNKEEILALLEAIHLPRRVAIIHCPGHQRGSNPVATGNRRADEAAKQAALSTRVLAGTTKPAGKRTADGSEFEKRTADGSEFESPKKKAKVE

SEQ ID NO: 1474 - protein, 2094 aa, synthetic construct
MPAAKRVKLDGGDKKYSIGLDIGTNSVGWAVITDEYKVPSKKFKVLGNTDRHSIKKNLIGALLFDSGETAEATRLKRTARRRYTRRKNRICYLQEIFSNEMAKVDDSFFHRLEESFLVEEDKKHERHPIFGNIVDEVAYHEKYPTIYHLRKKLVDSTDKADLRLIYLALAHMIKFRGHFLIEGDLNPDNSDVDKLFIQLVQTYNQLFEENPINASGVDAKAILSARLSKSRRLENLIAQLPGEKKNGLFGNLIALSLGLTPNFKSNFDLAEDAKLQLSKDTYDDDLDNLLAQIGDQYADLFLAAKNLSDAILLSDILRVNTEITKAPLSASMIKRYDEHHQDLTLLKALVRQQLPEKYKEIFFDQSKNGYAGYIDGGASQEEFYKFIKPILEKMDGTEELLVKLNREDLLRKQRTFDNGSIPHQIHLGELHAILRRQEDFYPFLKDNREKIEKILTFRIPYYVGPLARGNSRFAWMTRKSEETITPWNFEEVVDKGASAQSFIERMTNFDKNLPNEKVLPKHSLLYEYFTVYNELTKVKYVTEGMRKPAFLSGEQKKAIVDLLFKTNRKVTVKQLKEDYFKKIECFDSVEISGVEDRFNASLGTYHDLLKIIKDKDFLDNEENEDILEDIVLTLTLFEDREMIEERLKTYAHLFDDKVMKQLKRRRYTGWGRLSRKLINGIRDKQSGKTILDFLKSDGFANRNFMQLIHDDSLTFKEDIQKAQVSGQGDSLHEHIANLAGSPAIKKGILQTVKVVDELVKVMGRHKPENIVIEMARENQTTQKGQKNSRERMKRIEEGIKELGSQILKEHPVENTQLQNEKLYLYYLQNGRDMYVDQELDINRLSDYDVDHIVPQSFLKDDSIDNKVLTRSDKARGKSDNVPSEEVVKKMKNYWRQLLNAKLITQRKFDNLTKAERGGLSELDKAGFIKRQLVETRQITKHVAQILDSRMNTKYDENDKLIREVKVITLKSKLVSDFRKDFQFYKVREINNYHHAHDAYLNAVVGTALIKKYPKLESEFVYGDYKVYDVRKMIAKSEQEIGKATAKYFFYSNIMNFFKTEITLANGEIRKRPLIETNGETGEIVWDKGRDFATVRKVLSMPQVNIVKKTEVQTGGFSKESILPKRNSDKLIARKKDWDPKKYGGFDSPTVAYSVLVVAKVEKGKSKKLKSVKELLGITIMERSSFEKNPIDFLEAKGYKEVKKDLIIKLPKYSLFELENGRKRMLASAGELQKGNELALPSKYVNFLYLASHYEKLKGSPEDNEQKQLFVEQHKHYLDEIIEQISEFSKRVILADANLDKVLSAYNKHRDKPIREQAENIIHLFTLTNLGAPAAFKYFDTTIDRKRYTSTKEVLDATLIHQSITGLYETRIDLSQLGGDGGGSSEAAAKGGSGGVLNLEEEYRLHEKPVPSSIDPSWLQLFPTVWAERAGMGLANQVPPVVVELRSGASPVAVRQYPMSKEAREGIRPHIQKFLDLGVLVPCRSPWNTPLLPVKKPGTNDYRPVQDLREINKRVQDIHPTVPNPYNLLSSLPPSYTWYSVLDLKDAFFCLRLHPNSQPLFAFEWKDPEKGNTGQLTWTRLPQGFKNSPTLFNEALHRDLAPFRALNPQVVLLQYVDDLLVAAPTYEDCKKGTQKLLQELSKLGYRVSAKKAQLCQREVTYLGYLLKEGKRWLTPARKATVMKIPVPTTPRQVREFLGKAGFCRLFIPGFASLAAPLYPLTKPSIPFIWTEEHQQAFDHIKKALLSAPALALPDLTKPFTLYIDERAGVARGVLTQTLGPWRRPVAYLSKKLDPVASGWPTCLKAVAAVALLLKDADKLTLGQNVTVIASHSLESIVRQPPDRWMTNARMTHYQSLLLNERVSFAPPAVLNPATLLPVESEATPVHRCSEILAEETGTRRDLEDQPLPGVPTWYTDGSSFITEGKRRAGAPIVDGKRTVWASSLPEGTSAQKAELVALTQALRLAEGKNINIYTDSRYAFATAHIHGAIYKQRGWLTSAGKDIKNKEEILALLEAIHLPRRVAIIHCPGHQRGSNPVATGNRRADEAAKQAALSTRVLAGTTKPAGKRTADGSEFEKRTADGSEFESPKKKAKVE

SEQ ID NO: 1475 - protein, 2089 aa, synthetic construct
MPAAKRVKLDGGDKKYSIGLDIGTNSVGWAVITDEYKVPSKKFKVLGNTDRHSIKKNLIGALLFDSGETAEATRLKRTARRRYTRRKNRICYLQEIFSNEMAKVDDSFFHRLEESFLVEEDKKHERHPIFGNIVDEVAYHEKYPTIYHLRKKLVDSTDKADLRLIYLALAHMIKFRGHFLIEGDLNPDNSDVDKLFIQLVQTYNQLFEENPINASGVDAKAILSARLSKSRRLENLIAQLPGEKKNGLFGNLIALSLGLTPNFKSNFDLAEDAKLQLSKDTYDDDLDNLLAQIGDQYADLFLAAKNLSDAILLSDILRVNTEITKAPLSASMIKRYDEHHQDLTLLKALVRQQLPEKYKEIFFDQSKNGYAGYIDGGASQEEFYKFIKPILEKMDGTEELLVKLNREDLLRKQRTFDNGSIPHQIHLGELHAILRRQEDFYPFLKDNREKIEKILTFRIPYYVGPLARGNSRFAWMTRKSEETITPWNFEEVVDKGASAQSFIERMTNFDKNLPNEKVLPKHSLLYEYFTVYNELTKVKYVTEGMRKPAFLSGEQKKAIVDLLFKTNRKVTVKQLKEDYFKKIECFDSVEISGVEDRFNASLGTYHDLLKIIKDKDFLDNEENEDILEDIVLTLTLFEDREMIEERLKTYAHLFDDKVMKQLKRRRYTGWGRLSRKLINGIRDKQSGKTILDFLKSDGFANRNFMQLIHDDSLTFKEDIQKAQVSGQGDSLHEHIANLAGSPAIKKGILQTVKVVDELVKVMGRHKPENIVIEMARENQTTQKGQKNSRERMKRIEEGIKELGSQILKEHPVENTQLQNEKLYLYYLQNGRDMYVDQELDINRLSDYDVDHIVPQSFLKDDSIDNKVLTRSDKARGKSDNVPSEEVVKKMKNYWRQLLNAKLITQRKFDNLTKAERGGLSELDKAGFIKRQLVETRQITKHVAQILDSRMNTKYDENDKLIREVKVITLKSKLVSDFRKDFQFYKVREINNYHHAHDAYLNAVVGTALIKKYPKLESEFVYGDYKVYDVRKMIAKSEQEIGKATAKYFFYSNIMNFFKTEITLANGEIRKRPLIETNGETGEIVWDKGRDFATVRKVLSMPQVNIVKKTEVQTGGFSKESILPKRNSDKLIARKKDWDPKKYGGFDSPTVAYSVLVVAKVEKGKSKKLKSVKELLGITIMERSSFEKNPIDFLEAKGYKEVKKDLIIKLPKYSLFELENGRKRMLASAGELQKGNELALPSKYVNFLYLASHYEKLKGSPEDNEQKQLFVEQHKHYLDEIIEQISEFSKRVILADANLDKVLSAYNKHRDKPIREQAENIIHLFTLTNLGAPAAFKYFDTTIDRKRYTSTKEVLDATLIHQSITGLYETRIDLSQLGGDGGGGSGGSGGVLNLEEEYRLHEKPVPSSIDPSWLQLFPTVWAERAGMGLANQVPPVVVELRSGASPVAVRQYPMSKEAREGIRPHIQKFLDLGVLVPCRSPWNTPLLPVKKPGTNDYRPVQDLREINKRVQDIHPTVPNPYNLLSSLPPSYTWYSVLDLKDAFFCLRLHPNSQPLFAFEWKDPEKGNTGQLTWTRLPQGFKNSPTLFNEALHRDLAPFRALNPQVVLLQYVDDLLVAAPTYEDCKKGTQKLLQELSKLGYRVSAKKAQLCQREVTYLGYLLKEGKRWLTPARKATVMKIPVPTTPRQVREFLGKAGFCRLFIPGFASLAAPLYPLTKPSIPFIWTEEHQQAFDHIKKALLSAPALALPDLTKPFTLYIDERAGVARGVLTQTLGPWRRPVAYLSKKLDPVASGWPTCLKAVAAVALLLKDADKLTLGQNVTVIASHSLESIVRQPPDRWMTNARMTHYQSLLLNERVSFAPPAVLNPATLLPVESEATPVHRCSEILAEETGTRRDLEDQPLPGVPTWYTDGSSFITEGKRRAGAPIVDGKRTVWASSLPEGTSAQKAELVALTQALRLAEGKNINIYTDSRYAFATAHIHGAIYKQRGWLTSAGKDIKNKEEILALLEAIHLPRRVAIIHCPGHQRGSNPVATGNRRADEAAKQAALSTRVLAGTTKPAGKRTADGSEFEKRTADGSEFESPKKKAKVE

SEQ ID NO: 1476 - protein, 2092 aa, synthetic construct
MPAAKRVKLDGGDKKYSIGLDIGTNSVGWAVITDEYKVPSKKFKVLGNTDRHSIKKNLIGALLFDSGETAEATRLKRTARRRYTRRKNRICYLQEIFSNEMAKVDDSFFHRLEESFLVEEDKKHERHPIFGNIVDEVAYHEKYPTIYHLRKKLVDSTDKADLRLIYLALAHMIKFRGHFLIEGDLNPDNSDVDKLFIQLVQTYNQLFEENPINASGVDAKAILSARLSKSRRLENLIAQLPGEKKNGLFGNLIALSLGLTPNFKSNFDLAEDAKLQLSKDTYDDDLDNLLAQIGDQYADLFLAAKNLSDAILLSDILRVNTEITKAPLSASMIKRYDEHHQDLTLLKALVRQQLPEKYKEIFFDQSKNGYAGYIDGGASQEEFYKFIKPILEKMDGTEELLVKLNREDLLRKQRTFDNGSIPHQIHLGELHAILRRQEDFYPFLKDNREKIEKILTFRIPYYVGPLARGNSRFAWMTRKSEETITPWNFEEVVDKGASAQSFIERMTNFDKNLPNEKVLPKHSLLYEYFTVYNELTKVKYVTEGMRKPAFLSGEQKKAIVDLLFKTNRKVTVKQLKEDYFKKIECFDSVEISGVEDRFNASLGTYHDLLKIIKDKDFLDNEENEDILEDIVLTLTLFEDREMIEERLKTYAHLFDDKVMKQLKRRRYTGWGRLSRKLINGIRDKQSGKTILDFLKSDGFANRNFMQLIHDDSLTFKEDIQKAQVSGQGDSLHEHIANLAGSPAIKKGILQTVKVVDELVKVMGRHKPENIVIEMARENQTTQKGQKNSRERMKRIEEGIKELGSQILKEHPVENTQLQNEKLYLYYLQNGRDMYVDQELDINRLSDYDVDHIVPQSFLKDDSIDNKVLTRSDKARGKSDNVPSEEVVKKMKNYWRQLLNAKLITQRKFDNLTKAERGGLSELDKAGFIKRQLVETRQITKHVAQILDSRMNTKYDENDKLIREVKVITLKSKLVSDFRKDFQFYKVREINNYHHAHDAYLNAVVGTALIKKYPKLESEFVYGDYKVYDVRKMIAKSEQEIGKATAKYFFYSNIMNFFKTEITLANGEIRKRPLIETNGETGEIVWDKGRDFATVRKVLSMPQVNIVKKTEVQTGGFSKESILPKRNSDKLIARKKDWDPKKYGGFDSPTVAYSVLVVAKVEKGKSKKLKSVKELLGITIMERSSFEKNPIDFLEAKGYKEVKKDLIIKLPKYSLFELENGRKRMLASAGELQKGNELALPSKYVNFLYLASHYEKLKGSPEDNEQKQLFVEQHKHYLDEIIEQISEFSKRVILADANLDKVLSAYNKHRDKPIREQAENIIHLFTLTNLGAPAAFKYFDTTIDRKRYTSTKEVLDATLIHQSITGLYETRIDLSQLGGDGGGGSGSSPAPGGVLNLEEEYRLHEKPVPSSIDPSWLQLFPTVWAERAGMGLANQVPPVVVELRSGASPVAVRQYPMSKEAREGIRPHIQKFLDLGVLVPCRSPWNTPLLPVKKPGTNDYRPVQDLREINKRVQDIHPTVPNPYNLLSSLPPSYTWYSVLDLKDAFFCLRLHPNSQPLFAFEWKDPEKGNTGQLTWTRLPQGFKNSPTLFNEALHRDLAPFRALNPQVVLLQYVDDLLVAAPTYEDCKKGTQKLLQELSKLGYRVSAKKAQLCQREVTYLGYLLKEGKRWLTPARKATVMKIPVPTTPRQVREFLGKAGFCRLFIPGFASLAAPLYPLTKPSIPFIWTEEHQQAFDHIKKALLSAPALALPDLTKPFTLYIDERAGVARGVLTQTLGPWRRPVAYLSKKLDPVASGWPTCLKAVAAVALLLKDADKLTLGQNVTVIASHSLESIVRQPPDRWMTNARMTHYQSLLLNERVSFAPPAVLNPATLLPVESEATPVHRCSEILAEETGTRRDLEDQPLPGVPTWYTDGSSFITEGKRRAGAPIVDGKRTVWASSLPEGTSAQKAELVALTQALRLAEGKNINIYTDSRYAFATAHIHGAIYKQRGWLTSAGKDIKNKEEILALLEAIHLPRRVAIIHCPGHQRGSNPVATGNRRADEAAKQAALSTRVLAGTTKPAGKRTADGSEFEKRTADGSEFESPKKKAKVE

SEQ ID NO: 1477 - protein, 2092 aa, synthetic construct
MPAAKRVKLDGGDKKYSIGLDIGTNSVGWAVITDEYKVPSKKFKVLGNTDRHSIKKNLIGALLFDSGETAEATRLKRTARRRYTRRKNRICYLQEIFSNEMAKVDDSFFHRLEESFLVEEDKKHERHPIFGNIVDEVAYHEKYPTIYHLRKKLVDSTDKADLRLIYLALAHMIKFRGHFLIEGDLNPDNSDVDKLFIQLVQTYNQLFEENPINASGVDAKAILSARLSKSRRLENLIAQLPGEKKNGLFGNLIALSLGLTPNFKSNFDLAEDAKLQLSKDTYDDDLDNLLAQIGDQYADLFLAAKNLSDAILLSDILRVNTEITKAPLSASMIKRYDEHHQDLTLLKALVRQQLPEKYKEIFFDQSKNGYAGYIDGGASQEEFYKFIKPILEKMDGTEELLVKLNREDLLRKQRTFDNGSIPHQIHLGELHAILRRQEDFYPFLKDNREKIEKILTFRIPYYVGPLARGNSRFAWMTRKSEETITPWNFEEVVDKGASAQSFIERMTNFDKNLPNEKVLPKHSLLYEYFTVYNELTKVKYVTEGMRKPAFLSGEQKKAIVDLLFKTNRKVTVKQLKEDYFKKIECFDSVEISGVEDRFNASLGTYHDLLKIIKDKDFLDNEENEDILEDIVLTLTLFEDREMIEERLKTYAHLFDDKVMKQLKRRRYTGWGRLSRKLINGIRDKQSGKTILDFLKSDGFANRNFMQLIHDDSLTFKEDIQKAQVSGQGDSLHEHIANLAGSPAIKKGILQTVKVVDELVKVMGRHKPENIVIEMARENQTTQKGQKNSRERMKRIEEGIKELGSQILKEHPVENTQLQNEKLYLYYLQNGRDMYVDQELDINRLSDYDVDHIVPQSFLKDDSIDNKVLTRSDKARGKSDNVPSEEVVKKMKNYWRQLLNAKLITQRKFDNLTKAERGGLSELDKAGFIKRQLVETRQITKHVAQILDSRMNTKYDENDKLIREVKVITLKSKLVSDFRKDFQFYKVREINNYHHAHDAYLNAVVGTALIKKYPKLESEFVYGDYKVYDVRKMIAKSEQEIGKATAKYFFYSNIMNFFKTEITLANGEIRKRPLIETNGETGEIVWDKGRDFATVRKVLSMPQVNIVKKTEVQTGGFSKESILPKRNSDKLIARKKDWDPKKYGGFDSPTVAYSVLVVAKVEKGKSKKLKSVKELLGITIMERSSFEKNPIDFLEAKGYKEVKKDLIIKLPKYSLFELENGRKRMLASAGELQKGNELALPSKYVNFLYLASHYEKLKGSPEDNEQKQLFVEQHKHYLDEIIEQISEFSKRVILADANLDKVLSAYNKHRDKPIREQAENIIHLFTLTNLGAPAAFKYFDTTIDRKRYTSTKEVLDATLIHQSITGLYETRIDLSQLGGDGGGSSGGGGGSGGVLNLEEEYRLHEKPVPSSIDPSWLQLFPTVWAERAGMGLANQVPPVVVELRSGASPVAVRQYPMSKEAREGIRPHIQKFLDLGVLVPCRSPWNTPLLPVKKPGTNDYRPVQDLREINKRVQDIHPTVPNPYNLLSSLPPSYTWYSVLDLKDAFFCLRLHPNSQPLFAFEWKDPEKGNTGQLTWTRLPQGFKNSPTLFNEALHRDLAPFRALNPQVVLLQYVDDLLVAAPTYEDCKKGTQKLLQELSKLGYRVSAKKAQLCQREVTYLGYLLKEGKRWLTPARKATVMKIPVPTTPRQVREFLGKAGFCRLFIPGFASLAAPLYPLTKPSIPFIWTEEHQQAFDHIKKALLSAPALALPDLTKPFTLYIDERAGVARGVLTQTLGPWRRPVAYLSKKLDPVASGWPTCLKAVAAVALLLKDADKLTLGQNVTVIASHSLESIVRQPPDRWMTNARMTHYQSLLLNERVSFAPPAVLNPATLLPVESEATPVHRCSEILAEETGTRRDLEDQPLPGVPTWYTDGSSFITEGKRRAGAPIVDGKRTVWASSLPEGTSAQKAELVALTQALRLAEGKNINIYTDSRYAFATAHIHGAIYKQRGWLTSAGKDIKNKEEILALLEAIHLPRRVAIIHCPGHQRGSNPVATGNRRADEAAKQAALSTRVLAGTTKPAGKRTADGSEFEKRTADGSEFESPKKKAKVE

SEQ ID NO: 1478 - protein, 2007 aa, synthetic construct
MPAAKRVKLDGGDKKYSIGLDIGTNSVGWAVITDEYKVPSKKFKVLGNTDRHSIKKNLIGALLFDSGETAEATRLKRTARRRYTRRKNRICYLQEIFSNEMAKVDDSFFHRLEESFLVEEDKKHERHPIFGNIVDEVAYHEKYPTIYHLRKKLVDSTDKADLRLIYLALAHMIKFRGHFLIEGDLNPDNSDVDKLFIQLVQTYNQLFEENPINASGVDAKAILSARLSKSRRLENLIAQLPGEKKNGLFGNLIALSLGLTPNFKSNFDLAEDAKLQLSKDTYDDDLDNLLAQIGDQYADLFLAAKNLSDAILLSDILRVNTEITKAPLSASMIKRYDEHHQDLTLLKALVRQQLPEKYKEIFFDQSKNGYAGYIDGGASQEEFYKFIKPILEKMDGTEELLVKLNREDLLRKQRTFDNGSIPHQIHLGELHAILRRQEDFYPFLKDNREKIEKILTFRIPYYVGPLARGNSRFAWMTRKSEETITPWNFEEVVDKGASAQSFIERMTNFDKNLPNEKVLPKHSLLYEYFTVYNELTKVKYVTEGMRKPAFLSGEQKKAIVDLLFKTNRKVTVKQLKEDYFKKIECFDSVEISGVEDRFNASLGTYHDLLKIIKDKDFLDNEENEDILEDIVLTLTLFEDREMIEERLKTYAHLFDDKVMKQLKRRRYTGWGRLSRKLINGIRDKQSGKTILDFLKSDGFANRNFMQLIHDDSLTFKEDIQKAQVSGQGDSLHEHIANLAGSPAIKKGILQTVKVVDELVKVMGRHKPENIVIEMARENQTTQKGQKNSRERMKRIEEGIKELGSQILKEHPVENTQLQNEKLYLYYLQNGRDMYVDQELDINRLSDYDVDHIVPQSFLKDDSIDNKVLTRSDKARGKSDNVPSEEVVKKMKNYWRQLLNAKLITQRKFDNLTKAERGGLSELDKAGFIKRQLVETRQITKHVAQILDSRMNTKYDENDKLIREVKVITLKSKLVSDFRKDFQFYKVREINNYHHAHDAYLNAVVGTALIKKYPKLESEFVYGDYKVYDVRKMIAKSEQEIGKATAKYFFYSNIMNFFKTEITLANGEIRKRPLIETNGETGEIVWDKGRDFATVRKVLSMPQVNIVKKTEVQTGGFSKESILPKRNSDKLIARKKDWDPKKYGGFDSPTVAYSVLVVAKVEKGKSKKLKSVKELLGITIMERSSFEKNPIDFLEAKGYKEVKKDLIIKLPKYSLFELENGRKRMLASAGELQKGNELALPSKYVNFLYLASHYEKLKGSPEDNEQKQLFVEQHKHYLDEIIEQISEFSKRVILADANLDKVLSAYNKHRDKPIREQAENIIHLFTLTNLGAPAAFKYFDTTIDRKRYTSTKEVLDATLIHQSITGLYETRIDLSQLGGDGGGGGGGGGAVLGLEHLPRPPQISQFPLNPERLQALQHLVRKALEAGHIEPYTGPGNNPVFPVKKANGTWRFIHDLRATNSLTIDLSSSSPGPPDLSSLPTTLAHLQTIDLRDAFFQIPLPKQFQPYFAFTVPQQCNYGPGTRYAWKVLPQGFKNSPTLFEMQLAHILQPIRQAFPQCTILQYMDDILLASPSHEDLLLLSEATMASLISHGLPVSENKTQQTPGTIKFLGQIISPNHLTYDAVPTVPIRSRWALPELQALLGEIQWVSKGTPTLRQPLHSLYCALQRHTDPRDQIYLNPSQVQSLVQLRQALSQNCRSRLVQTLPLLGAIMLTLTGTTTVVFQSKEQWPLVWLHAPLPHTSQCPWGQLLASAVLLLDKYTLQSYGLLCQTIHHNISTQTFNQFIQTSDHPSVPILLHHSHRFKNLGAQTGELWNTFLKTAAPLAPVKALMPVFTLSPVIINTAPCLFSDGSTSRAAYILWDKQILSQRSFPLPPPHKSAQRAELLGLLHGLSSARSWRCLNIFLDSKYLYHYLRTLALGTFQGRSSQAPFQALLPRLLSRKVVYLHHVRSHTNLPDPISRLNALTDALLITPVLQLAGKRTADGSEFEKRTADGSEFESPKKKAKVE

SEQ ID NO: 1479 - protein, 2013 aa, synthetic construct
MPAAKRVKLDGGDKKYSIGLDIGTNSVGWAVITDEYKVPSKKFKVLGNTDRHSIKKNLIGALLFDSGETAEATRLKRTARRRYTRRKNRICYLQEIFSNEMAKVDDSFFHRLEESFLVEEDKKHERHPIFGNIVDEVAYHEKYPTIYHLRKKLVDSTDKADLRLIYLALAHMIKFRGHFLIEGDLNPDNSDVDKLFIQLVQTYNQLFEENPINASGVDAKAILSARLSKSRRLENLIAQLPGEKKNGLFGNLIALSLGLTPNFKSNFDLAEDAKLQLSKDTYDDDLDNLLAQIGDQYADLFLAAKNLSDAILLSDILRVNTEITKAPLSASMIKRYDEHHQDLTLLKALVRQQLPEKYKEIFFDQSKNGYAGYIDGGASQEEFYKFIKPILEKMDGTEELLVKLNREDLLRKQRTFDNGSIPHQIHLGELHAILRRQEDFYPFLKDNREKIEKILTFRIPYYVGPLARGNSRFAWMTRKSEETITPWNFEEVVDKGASAQSFIERMTNFDKNLPNEKVLPKHSLLYEYFTVYNELTKVKYVTEGMRKPAFLSGEQKKAIVDLLFKTNRKVTVKQLKEDYFKKIECFDSVEISGVEDRFNASLGTYHDLLKIIKDKDFLDNEENEDILEDIVLTLTLFEDREMIEERLKTYAHLFDDKVMKQLKRRRYTGWGRLSRKLINGIRDKQSGKTILDFLKSDGFANRNFMQLIHDDSLTFKEDIQKAQVSGQGDSLHEHIANLAGSPAIKKGILQTVKVVDELVKVMGRHKPENIVIEMARENQTTQKGQKNSRERMKRIEEGIKELGSQILKEHPVENTQLQNEKLYLYYLQNGRDMYVDQELDINRLSDYDVDHIVPQSFLKDDSIDNKVLTRSDKARGKSDNVPSEEVVKKMKNYWRQLLNAKLITQRKFDNLTKAERGGLSELDKAGFIKRQLVETRQITKHVAQILDSRMNTKYDENDKLIREVKVITLKSKLVSDFRKDFQFYKVREINNYHHAHDAYLNAVVGTALIKKYPKLESEFVYGDYKVYDVRKMIAKSEQEIGKATAKYFFYSNIMNFFKTEITLANGEIRKRPLIETNGETGEIVWDKGRDFATVRKVLSMPQVNIVKKTEVQTGGFSKESILPKRNSDKLIARKKDWDPKKYGGFDSPTVAYSVLVVAKVEKGKSKKLKSVKELLGITIMERSSFEKNPIDFLEAKGYKEVKKDLIIKLPKYSLFELENGRKRMLASAGELQKGNELALPSKYVNFLYLASHYEKLKGSPEDNEQKQLFVEQHKHYLDEIIEQISEFSKRVILADANLDKVLSAYNKHRDKPIREQAENIIHLFTLTNLGAPAAFKYFDTTIDRKRYTSTKEVLDATLIHQSITGLYETRIDLSQLGGDGGPAPAPAPAPAPGGAVLGLEHLPRPPQISQFPLNPERLQALQHLVRKALEAGHIEPYTGPGNNPVFPVKKANGTWRFIHDLRATNSLTIDLSSSSPGPPDLSSLPTTLAHLQTIDLRDAFFQIPLPKQFQPYFAFTVPQQCNYGPGTRYAWKVLPQGFKNSPTLFEMQLAHILQPIRQAFPQCTILQYMDDILLASPSHEDLLLLSEATMASLISHGLPVSENKTQQTPGTIKFLGQIISPNHLTYDAVPTVPIRSRWALPELQALLGEIQWVSKGTPTLRQPLHSLYCALQRHTDPRDQIYLNPSQVQSLVQLRQALSQNCRSRLVQTLPLLGAIMLTLTGTTTVVFQSKEQWPLVWLHAPLPHTSQCPWGQLLASAVLLLDKYTLQSYGLLCQTIHHNISTQTFNQFIQTSDHPSVPILLHHSHRFKNLGAQTGELWNTFLKTAAPLAPVKALMPVFTLSPVIINTAPCLFSDGSTSRAAYILWDKQILSQRSFPLPPPHKSAQRAELLGLLHGLSSARSWRCLNIFLDSKYLYHYLRTLALGTFQGRSSQAPFQALLPRLLSRKVVYLHHVRSHTNLPDPISRLNALTDALLITPVLQLAGKRTADGSEFEKRTADGSEFESPKKKAKVE

SEQ ID NO: 1480 - protein, 2013 aa, synthetic construct
MPAAKRVKLDGGDKKYSIGLDIGTNSVGWAVITDEYKVPSKKFKVLGNTDRHSIKKNLIGALLFDSGETAEATRLKRTARRRYTRRKNRICYLQEIFSNEMAKVDDSFFHRLEESFLVEEDKKHERHPIFGNIVDEVAYHEKYPTIYHLRKKLVDSTDKADLRLIYLALAHMIKFRGHFLIEGDLNPDNSDVDKLFIQLVQTYNQLFEENPINASGVDAKAILSARLSKSRRLENLIAQLPGEKKNGLFGNLIALSLGLTPNFKSNFDLAEDAKLQLSKDTYDDDLDNLLAQIGDQYADLFLAAKNLSDAILLSDILRVNTEITKAPLSASMIKRYDEHHQDLTLLKALVRQQLPEKYKEIFFDQSKNGYAGYIDGGASQEEFYKFIKPILEKMDGTEELLVKLNREDLLRKQRTFDNGSIPHQIHLGELHAILRRQEDFYPFLKDNREKIEKILTFRIPYYVGPLARGNSRFAWMTRKSEETITPWNFEEVVDKGASAQSFIERMTNFDKNLPNEKVLPKHSLLYEYFTVYNELTKVKYVTEGMRKPAFLSGEQKKAIVDLLFKTNRKVTVKQLKEDYFKKIECFDSVEISGVEDRFNASLGTYHDLLKIIKDKDFLDNEENEDILEDIVLTLTLFEDREMIEERLKTYAHLFDDKVMKQLKRRRYTGWGRLSRKLINGIRDKQSGKTILDFLKSDGFANRNFMQLIHDDSLTFKEDIQKAQVSGQGDSLHEHIANLAGSPAIKKGILQTVKVVDELVKVMGRHKPENIVIEMARENQTTQKGQKNSRERMKRIEEGIKELGSQILKEHPVENTQLQNEKLYLYYLQNGRDMYVDQELDINRLSDYDVDHIVPQSFLKDDSIDNKVLTRSDKARGKSDNVPSEEVVKKMKNYWRQLLNAKLITQRKFDNLTKAERGGLSELDKAGFIKRQLVETRQITKHVAQILDSRMNTKYDENDKLIREVKVITLKSKLVSDFRKDFQFYKVREINNYHHAHDAYLNAVVGTALIKKYPKLESEFVYGDYKVYDVRKMIAKSEQEIGKATAKYFFYSNIMNFFKTEITLANGEIRKRPLIETNGETGEIVWDKGRDFATVRKVLSMPQVNIVKKTEVQTGGFSKESILPKRNSDKLIARKKDWDPKKYGGFDSPTVAYSVLVVAKVEKGKSKKLKSVKELLGITIMERSSFEKNPIDFLEAKGYKEVKKDLIIKLPKYSLFELENGRKRMLASAGELQKGNELALPSKYVNFLYLASHYEKLKGSPEDNEQKQLFVEQHKHYLDEIIEQISEFSKRVILADANLDKVLSAYNKHRDKPIREQAENIIHLFTLTNLGAPAAFKYFDTTIDRKRYTSTKEVLDATLIHQSITGLYETRIDLSQLGGDGGPAPEAAAKGGSGGAVLGLEHLPRPPQISQFPLNPERLQALQHLVRKALEAGHIEPYTGPGNNPVFPVKKANGTWRFIHDLRATNSLTIDLSSSSPGPPDLSSLPTTLAHLQTIDLRDAFFQIPLPKQFQPYFAFTVPQQCNYGPGTRYAWKVLPQGFKNSPTLFEMQLAHILQPIRQAFPQCTILQYMDDILLASPSHEDLLLLSEATMASLISHGLPVSENKTQQTPGTIKFLGQIISPNHLTYDAVPTVPIRSRWALPELQALLGEIQWVSKGTPTLRQPLHSLYCALQRHTDPRDQIYLNPSQVQSLVQLRQALSQNCRSRLVQTLPLLGAIMLTLTGTTTVVFQSKEQWPLVWLHAPLPHTSQCPWGQLLASAVLLLDKYTLQSYGLLCQTIHHNISTQTFNQFIQTSDHPSVPILLHHSHRFKNLGAQTGELWNTFLKTAAPLAPVKALMPVFTLSPVIINTAPCLFSDGSTSRAAYILWDKQILSQRSFPLPPPHKSAQRAELLGLLHGLSSARSWRCLNIFLDSKYLYHYLRTLALGTFQGRSSQAPFQALLPRLLSRKVVYLHHVRSHTNLPDPISRLNALTDALLITPVLQLAGKRTADGSEFEKRTADGSEFESPKKKAKVE

SEQ ID NO: 1481 - protein, 2011 aa, synthetic construct
MPAAKRVKLDGGDKKYSIGLDIGTNSVGWAVITDEYKVPSKKFKVLGNTDRHSIKKNLIGALLFDSGETAEATRLKRTARRRYTRRKNRICYLQEIFSNEMAKVDDSFFHRLEESFLVEEDKKHERHPIFGNIVDEVAYHEKYPTIYHLRKKLVDSTDKADLRLIYLALAHMIKFRGHFLIEGDLNPDNSDVDKLFIQLVQTYNQLFEENPINASGVDAKAILSARLSKSRRLENLIAQLPGEKKNGLFGNLIALSLGLTPNFKSNFDLAEDAKLQLSKDTYDDDLDNLLAQIGDQYADLFLAAKNLSDAILLSDILRVNTEITKAPLSASMIKRYDEHHQDLTLLKALVRQQLPEKYKEIFFDQSKNGYAGYIDGGASQEEFYKFIKPILEKMDGTEELLVKLNREDLLRKQRTFDNGSIPHQIHLGELHAILRRQEDFYPFLKDNREKIEKILTFRIPYYVGPLARGNSRFAWMTRKSEETITPWNFEEVVDKGASAQSFIERMTNFDKNLPNEKVLPKHSLLYEYFTVYNELTKVKYVTEGMRKPAFLSGEQKKAIVDLLFKTNRKVTVKQLKEDYFKKIECFDSVEISGVEDRFNASLGTYHDLLKIIKDKDFLDNEENEDILEDIVLTLTLFEDREMIEERLKTYAHLFDDKVMKQLKRRRYTGWGRLSRKLINGIRDKQSGKTILDFLKSDGFANRNFMQLIHDDSLTFKEDIQKAQVSGQGDSLHEHIANLAGSPAIKKGILQTVKVVDELVKVMGRHKPENIVIEMARENQTTQKGQKNSRERMKRIEEGIKELGSQILKEHPVENTQLQNEKLYLYYLQNGRDMYVDQELDINRLSDYDVDHIVPQSFLKDDSIDNKVLTRSDKARGKSDNVPSEEVVKKMKNYWRQLLNAKLITQRKFDNLTKAERGGLSELDKAGFIKRQLVETRQITKHVAQILDSRMNTKYDENDKLIREVKVITLKSKLVSDFRKDFQFYKVREINNYHHAHDAYLNAVVGTALIKKYPKLESEFVYGDYKVYDVRKMIAKSEQEIGKATAKYFFYSNIMNFFKTEITLANGEIRKRPLIETNGETGEIVWDKGRDFATVRKVLSMPQVNIVKKTEVQTGGFSKESILPKRNSDKLIARKKDWDPKKYGGFDSPTVAYSVLVVAKVEKGKSKKLKSVKELLGITIMERSSFEKNPIDFLEAKGYKEVKKDLIIKLPKYSLFELENGRKRMLASAGELQKGNELALPSKYVNFLYLASHYEKLKGSPEDNEQKQLFVEQHKHYLDEIIEQISEFSKRVILADANLDKVLSAYNKHRDKPIREQAENIIHLFTLTNLGAPAAFKYFDTTIDRKRYTSTKEVLDATLIHQSITGLYETRIDLSQLGGDGGPAPGSSGGGGGAVLGLEHLPRPPQISQFPLNPERLQALQHLVRKALEAGHIEPYTGPGNNPVFPVKKANGTWRFIHDLRATNSLTIDLSSSSPGPPDLSSLPTTLAHLQTIDLRDAFFQIPLPKQFQPYFAFTVPQQCNYGPGTRYAWKVLPQGFKNSPTLFEMQLAHILQPIRQAFPQCTILQYMDDILLASPSHEDLLLLSEATMASLISHGLPVSENKTQQTPGTIKFLGQIISPNHLTYDAVPTVPIRSRWALPELQALLGEIQWVSKGTPTLRQPLHSLYCALQRHTDPRDQIYLNPSQVQSLVQLRQALSQNCRSRLVQTLPLLGAIMLTLTGTTTVVFQSKEQWPLVWLHAPLPHTSQCPWGQLLASAVLLLDKYTLQSYGLLCQTIHHNISTQTFNQFIQTSDHPSVPILLHHSHRFKNLGAQTGELWNTFLKTAAPLAPVKALMPVFTLSPVIINTAPCLFSDGSTSRAAYILWDKQILSQRSFPLPPPHKSAQRAELLGLLHGLSSARSWRCLNIFLDSKYLYHYLRTLALGTFQGRSSQAPFQALLPRLLSRKVVYLHHVRSHTNLPDPISRLNALTDALLITPVLQLAGKRTADGSEFEKRTADGSEFESPKKKAKVE

SEQ ID NO: 1482 - protein, 2013 aa, synthetic construct
MPAAKRVKLDGGDKKYSIGLDIGTNSVGWAVITDEYKVPSKKFKVLGNTDRHSIKKNLIGALLFDSGETAEATRLKRTARRRYTRRKNRICYLQEIFSNEMAKVDDSFFHRLEESFLVEEDKKHERHPIFGNIVDEVAYHEKYPTIYHLRKKLVDSTDKADLRLIYLALAHMIKFRGHFLIEGDLNPDNSDVDKLFIQLVQTYNQLFEENPINASGVDAKAILSARLSKSRRLENLIAQLPGEKKNGLFGNLIALSLGLTPNFKSNFDLAEDAKLQLSKDTYDDDLDNLLAQIGDQYADLFLAAKNLSDAILLSDILRVNTEITKAPLSASMIKRYDEHHQDLTLLKALVRQQLPEKYKEIFFDQSKNGYAGYIDGGASQEEFYKFIKPILEKMDGTEELLVKLNREDLLRKQRTFDNGSIPHQIHLGELHAILRRQEDFYPFLKDNREKIEKILTFRIPYYVGPLARGNSRFAWMTRKSEETITPWNFEEVVDKGASAQSFIERMTNFDKNLPNEKVLPKHSLLYEYFTVYNELTKVKYVTEGMRKPAFLSGEQKKAIVDLLFKTNRKVTVKQLKEDYFKKIECFDSVEISGVEDRFNASLGTYHDLLKIIKDKDFLDNEENEDILEDIVLTLTLFEDREMIEERLKTYAHLFDDKVMKQLKRRRYTGWGRLSRKLINGIRDKQSGKTILDFLKSDGFANRNFMQLIHDDSLTFKEDIQKAQVSGQGDSLHEHIANLAGSPAIKKGILQTVKVVDELVKVMGRHKPENIVIEMARENQTTQKGQKNSRERMKRIEEGIKELGSQILKEHPVENTQLQNEKLYLYYLQNGRDMYVDQELDINRLSDYDVDHIVPQSFLKDDSIDNKVLTRSDKARGKSDNVPSEEVVKKMKNYWRQLLNAKLITQRKFDNLTKAERGGLSELDKAGFIKRQLVETRQITKHVAQILDSRMNTKYDENDKLIREVKVITLKSKLVSDFRKDFQFYKVREINNYHHAHDAYLNAVVGTALIKKYPKLESEFVYGDYKVYDVRKMIAKSEQEIGKATAKYFFYSNIMNFFKTEITLANGEIRKRPLIETNGETGEIVWDKGRDFATVRKVLSMPQVNIVKKTEVQTGGFSKESILPKRNSDKLIARKKDWDPKKYGGFDSPTVAYSVLVVAKVEKGKSKKLKSVKELLGITIMERSSFEKNPIDFLEAKGYKEVKKDLIIKLPKYSLFELENGRKRMLASAGELQKGNELALPSKYVNFLYLASHYEKLKGSPEDNEQKQLFVEQHKHYLDEIIEQISEFSKRVILADANLDKVLSAYNKHRDKPIREQAENIIHLFTLTNLGAPAAFKYFDTTIDRKRYTSTKEVLDATLIHQSITGLYETRIDLSQLGGDGGEAAAKGSSGGSGGAVLGLEHLPRPPQISQFPLNPERLQALQHLVRKALEAGHIEPYTGPGNNPVFPVKKANGTWRFIHDLRATNSLTIDLSSSSPGPPDLSSLPTTLAHLQTIDLRDAFFQIPLPKQFQPYFAFTVPQQCNYGPGTRYAWKVLPQGFKNSPTLFQMQLAHILQPIRQAFPQCTILQYMDDILLASPSHEDLLLLSEATMASLISHGLPVSENKTQQTPGTIKFLGQIISPNHLTYDAVPTVPIRSRWALPELQALLGEIQWVSKGTPTLRQPLHSLYCALQPHTDPRDQIYLNPSQVQSLVQLRQALSQNCRSRLVQTLPLLGAIMLTLTGTTTVVFQSKEQWPLVWLHAPLPHTSQCPWGQLLASAVLLLDKYTLQSYGLLCQTIHHNISTQTFNQFIQTSDHPSVPILLHHSHRFKNLGAQTGELWNTFLKTAAPLAPVKALMPVFTLSPVIINTAPCLFSDGSTSRAAYILWDKQILSQRSFPLPPPHKSAQRAELLGLLHGLSSARSWRCLNIFLDSKYLYHYLRTLALGTFQGRSSQAPFQALLPRLLSRKVVYLHHVRSHTNLPDPISRLNALTDALLITPVLQLAGKRTADGSEFEKRTADGSEFESPKKKAKVE

SEQ ID NO: 1483 - protein, 2010 aa, synthetic construct
MPAAKRVKLDGGDKKYSIGLDIGTNSVGWAVITDEYKVPSKKFKVLGNTDRHSIKKNLIGALLFDSGETAEATRLKRTARRRYTRRKNRICYLQEIFSNEMAKVDDSFFHRLEESFLVEEDKKHERHPIFGNIVDEVAYHEKYPTIYHLRKKLVDSTDKADLRLIYLALAHMIKFRGHFLIEGDLNPDNSDVDKLFIQLVQTYNQLFEENPINASGVDAKAILSARLSKSRRLENLIAQLPGEKKNGLFGNLIALSLGLTPNFKSNFDLAEDAKLQLSKDTYDDDLDNLLAQIGDQYADLFLAAKNLSDAILLSDILRVNTEITKAPLSASMIKRYDEHHQDLTLLKALVRQQLPEKYKEIFFDQSKNGYAGYIDGGASQEEFYKFIKPILEKMDGTEELLVKLNREDLLRKQRTFDNGSIPHQIHLGELHAILRRQEDFYPFLKDNREKIEKILTFRIPYYVGPLARGNSRFAWMTRKSEETITPWNFEEVVDKGASAQSFIERMTNFDKNLPNEKVLPKHSLLYEYFTVYNELTKVKYVTEGMRKPAFLSGEQKKAIVDLLFKTNRKVTVKQLKEDYFKKIECFDSVEISGVEDRFNASLGTYHDLLKIIKDKDFLDNEENEDILEDIVLTLTLFEDREMIEERLKTYAHLFDDKVMKQLKRRRYTGWGRLSRKLINGIRDKQSGKTILDFLKSDGFANRNFMQLIHDDSLTFKEDIQKAQVSGQGDSLHEHIANLAGSPAIKKGILQTVKVVDELVKVMGRHKPENIVIEMARENQTTQKGQKNSRERMKRIEEGIKELGSQILKEHPVENTQLQNEKLYLYYLQNGRDMYVDQELDINRLSDYDVDHIVPQSFLKDDSIDNKVLTRSDKARGKSDNVPSEEVVKKMKNYWRQLLNAKLITQRKFDNLTKAERGGLSELDKAGFIKRQLVETRQITKHVAQILDSRMNTKYDENDKLIREVKVITLKSKLVSDFRKDFQFYKVREINNYHHAHDAYLNAVVGTALIKKYPKLESEFVYGDYKVYDVRKMIAKSEQEIGKATAKYFFYSNIMNFFKTEITLANGEIRKRPLIETNGETGEIVWDKGRDFATVRKVLSMPQVNIVKKTEVQTGGFSKESILPKRNSDKLIARKKDWDPKKYGGFDSPTVAYSVLVVAKVEKGKSKKLKSVKELLGITIMERSSFEKNPIDFLEAKGYKEVKKDLIIKLPKYSLFELENGRKRMLASAGELQKGNELALPSKYVNFLYLASHYEKLKGSPEDNEQKQLFVEQHKHYLDEIIEQISEFSKRVILADANLDKVLSAYNKHRDKPIREQAENIIHLFTLTNLGAPAAFKYFDTTIDRKRYTSTKEVLDATLIHQSITGLYETRIDLSQLGGDGGEAAAKGGSGGAVLGLEHLPRPPQISQFPLNPERLQALQHLVRKALEAGHIEPYTGPGNNPVFPVKKANGTWRFIHDLRATNSLTIDLSSSSPGPPDLSSLPTTLAHLQTIDLRDAFFQIPLPKQFQPYFAFTVPQQCNYGPGTRYAWKVLPQGFKNSPTLFQMQLAHILQPIRQAFPQCTILQYMDDILLASPSHEDLLLLSEATMASLISHGLPVSENKTQQTPGTIKFLGQIISPNHLTYDAVPTVPIRSRWALPELQALLGEIQWVSKGTPTLRQPLHSLYCALQPHTDPRDQIYLNPSQVQSLVQLRQALSQNCRSRLVQTLPLLGAIMLTLTGTTTVVFQSKEQWPLVWLHAPLPHTSQCPWGQLLASAVLLLDKYTLQSYGLLCQTIHHNISTQTFNQFIQTSDHPSVPILLHHSHRFKNLGAQTGELWNTFLKTAAPLAPVKALMPVFTLSPVIINTAPCLFSDGSTSRAAYILWDKQILSQRSFPLPPPHKSAQRAELLGLLHGLSSARSWRCLNIFLDSKYLYHYLRTLALGTFQGRSSQAPFQALLPRLLSRKVVYLHHVRSHTNLPDPISRLNALTDALLITPVLQLAGKRTADGSEFEKRTADGSEFESPKKKAKVE

SEQ ID NO: 1484 - protein, 2013 aa, synthetic construct
MPAAKRVKLDGGDKKYSIGLDIGTNSVGWAVITDEYKVPSKKFKVLGNTDRHSIKKNLIGALLFDSGETAEATRLKRTARRRYTRRKNRICYLQEIFSNEMAKVDDSFFHRLEESFLVEEDKKHERHPIFGNIVDEVAYHEKYPTIYHLRKKLVDSTDKADLRLIYLALAHMIKFRGHFLIEGDLNPDNSDVDKLFIQLVQTYNQLFEENPINASGVDAKAILSARLSKSRRLENLIAQLPGEKKNGLFGNLIALSLGLTPNFKSNFDLAEDAKLQLSKDTYDDDLDNLLAQIGDQYADLFLAAKNLSDAILLSDILRVNTEITKAPLSASMIKRYDEHHQDLTLLKALVRQQLPEKYKEIFFDQSKNGYAGYIDGGASQEEFYKFIKPILEKMDGTEELLVKLNREDLLRKQRTFDNGSIPHQIHLGELHAILRRQEDFYPFLKDNREKIEKILTFRIPYYVGPLARGNSRFAWMTRKSEETITPWNFEEVVDKGASAQSFIERMTNFDKNLPNEKVLPKHSLLYEYFTVYNELTKVKYVTEGMRKPAFLSGEQKKAIVDLLFKTNRKVTVKQLKEDYFKKIECFDSVEISGVEDRFNASLGTYHDLLKIIKDKDFLDNEENEDILEDIVLTLTLFEDREMIEERLKTYAHLFDDKVMKQLKRRRYTGWGRLSRKLINGIRDKQSGKTILDFLKSDGFANRNFMQLIHDDSLTFKEDIQKAQVSGQGDSLHEHIANLAGSPAIKKGILQTVKVVDELVKVMGRHKPENIVIEMARENQTTQKGQKNSRERMKRIEEGIKELGSQILKEHPVENTQLQNEKLYLYYLQNGRDMYVDQELDINRLSDYDVDHIVPQSFLKDDSIDNKVLTRSDKARGKSDNVPSEEVVKKMKNYWRQLLNAKLITQRKFDNLTKAERGGLSELDKAGFIKRQLVETRQITKHVAQILDSRMNTKYDENDKLIREVKVITLKSKLVSDFRKDFQFYKVREINNYHHAHDAYLNAVVGTALIKKYPKLESEFVYGDYKVYDVRKMIAKSEQEIGKATAKYFFYSNIMNFFKTEITLANGEIRKRPLIETNGETGEIVWDKGRDFATVRKVLSMPQVNIVKKTEVQTGGFSKESILPKRNSDKLIARKKDWDPKKYGGFDSPTVAYSVLVVAKVEKGKSKKLKSVKELLGITIMERSSFEKNPIDFLEAKGYKEVKKDLIIKLPKYSLFELENGRKRMLASAGELQKGNELALPSKYVNFLYLASHYEKLKGSPEDNEQKQLFVEQHKHYLDEIIEQISEFSKRVILADANLDKVLSAYNKHRDKPIREQAENIIHLFTLTNLGAPAAFKYFDTTIDRKRYTSTKEVLDATLIHQSITGLYETRIDLSQLGGDGGGGSEAAAKPAPGGAVLGLEHLPRPPQISQFPLNPERLQALQHLVRKALEAGHIEPYTGPGNNPVFPVKKANGTWRFIHDLRATNSLTIDLSSSSPGPPDLSSLPTTLAHLQTIDLRDAFFQIPLPKQFQPYFAFTVPQQCNYGPGTRYAWKVLPQGFKNSPTLFQMQLAHILQPIRQAFPQCTILQYMDDILLASPSHEDLLLLSEATMASLISHGLPVSENKTQQTPGTIKFLGQIISPNHLTYDAVPTVPIRSRWALPELQALLGEIQWVSKGTPTLRQPLHSLYCALQPHTDPRDQIYLNPSQVQSLVQLRQALSQNCRSRLVQTLPLLGAIMLTLTGTTTVVFQSKEQWPLVWLHAPLPHTSQCPWGQLLASAVLLLDKYTLQSYGLLCQTIHHNISTQTFNQFIQTSDHPSVPILLHHSHRFKNLGAQTGELWNTFLKTAAPLAPVKALMPVFTLSPVIINTAPCLFSDGSTSRAAYILWDKQILSQRSFPLPPPHKSAQRAELLGLLHGLSSARSWRCLNIFLDSKYLYHYLRTLALGTFQGRSSQAPFQALLPRLLSRKVVYLHHVRSHTNLPDPISRLNALTDALLITPVLQLAGKRTADGSEFEKRTADGSEFESPKKKAKVE

SEQ ID NO: 1485 - protein, 2011 aa, synthetic construct
MPAAKRVKLDGGDKKYSIGLDIGTNSVGWAVITDEYKVPSKKFKVLGNTDRHSIKKNLIGALLFDSGETAEATRLKRTARRRYTRRKNRICYLQEIFSNEMAKVDDSFFHRLEESFLVEEDKKHERHPIFGNIVDEVAYHEKYPTIYHLRKKLVDSTDKADLRLIYLALAHMIKFRGHFLIEGDLNPDNSDVDKLFIQLVQTYNQLFEENPINASGVDAKAILSARLSKSRRLENLIAQLPGEKKNGLFGNLIALSLGLTPNFKSNFDLAEDAKLQLSKDTYDDDLDNLLAQIGDQYADLFLAAKNLSDAILLSDILRVNTEITKAPLSASMIKRYDEHHQDLTLLKALVRQQLPEKYKEIFFDQSKNGYAGYIDGGASQEEFYKFIKPILEKMDGTEELLVKLNREDLLRKQRTFDNGSIPHQIHLGELHAILRRQEDFYPFLKDNREKIEKILTFRIPYYVGPLARGNSRFAWMTRKSEETITPWNFEEVVDKGASAQSFIERMTNFDKNLPNEKVLPKHSLLYEYFTVYNELTKVKYVTEGMRKPAFLSGEQKKAIVDLLFKTNRKVTVKQLKEDYFKKIECFDSVEISGVEDRFNASLGTYHDLLKIIKDKDFLDNEENEDILEDIVLTLTLFEDREMIEERLKTYAHLFDDKVMKQLKRRRYTGWGRLSRKLINGIRDKQSGKTILDFLKSDGFANRNFMQLIHDDSLTFKEDIQKAQVSGQGDSLHEHIANLAGSPAIKKGILQTVKVVDELVKVMGRHKPENIVIEMARENQTTQKGQKNSRERMKRIEEGIKELGSQILKEHPVENTQLQNEKLYLYYLQNGRDMYVDQELDINRLSDYDVDHIVPQSFLKDDSIDNKVLTRSDKARGKSDNVPSEEVVKKMKNYWRQLLNAKLITQRKFDNLTKAERGGLSELDKAGFIKRQLVETRQITKHVAQILDSRMNTKYDENDKLIREVKVITLKSKLVSDFRKDFQFYKVREINNYHHAHDAYLNAVVGTALIKKYPKLESEFVYGDYKVYDVRKMIAKSEQEIGKATAKYFFYSNIMNFFKTEITLANGEIRKRPLIETNGETGEIVWDKGRDFATVRKVLSMPQVNIVKKTEVQTGGFSKESILPKRNSDKLIARKKDWDPKKYGGFDSPTVAYSVLVVAKVEKGKSKKLKSVKELLGITIMERSSFEKNPIDFLEAKGYKEVKKDLIIKLPKYSLFELENGRKRMLASAGELQKGNELALPSKYVNFLYLASHYEKLKGSPEDNEQKQLFVEQHKHYLDEIIEQISEFSKRVILADANLDKVLSAYNKHRDKPIREQAENIIHLFTLTNLGAPAAFKYFDTTIDRKRYTSTKEVLDATLIHQSITGLYETRIDLSQLGGDGGGGGGGSGSSGGAVLGLEHLPRPPQISQFPLNPERLQALQHLVRKALEAGHIEPYTGPGNNPVFPVKKANGTWRFIHDLRATNSLTIDLSSSSPGPPDLSSPPTTLAHLQTIDLRDAFFQIPLPKQFQPYFAFTVPQQCNYGPGTRYAWKVLPQGFKNSPTLFQMQLAHILQPIRQAFPQCTILQYMDDILLASPSHEDLLLLSEATMASLISHGLPVSENKTQQTPGTIKFLGQIISPNHLTYDAVPTVPIRSRWALPELQALLGEIQWVSKGTPTLRQPLHSLYCALQPHTDPRDQIYLNPSQVQSLVQLRQALSQNCRSRLVQTLPLLGAIMLTLTGTTTVVFQSKEQWPLVWLHAPLPHTSQCPWGQLLASAVLLLDKYTLQSYGLLCQTIHHNISTQTFNQFIQTSDHPSVPILLHHSHRFKNLGAQTGELWNTFLKTAAPLAPVKALMPVFTLSPVIINTAPCLFSDGSTSRAAYILWDKQILSQRSFPLPPPHKSAQRAELLGLLHGLSSARSWRCLNIFLDSKYLYHYLRTLALGTFQGRSSQAPFQALLPRLLSRKVVYLHHVRSHTNLPDPISRLNALTDALLITPVLQLAGKRTADGSEFEKRTADGSEFESPKKKAKVE

SEQ ID NO: 1486 - protein, 2013 aa, synthetic construct
MPAAKRVKLDGGDKKYSIGLDIGTNSVGWAVITDEYKVPSKKFKVLGNTDRHSIKKNLIGALLFDSGETAEATRLKRTARRRYTRRKNRICYLQEIFSNEMAKVDDSFFHRLEESFLVEEDKKHERHPIFGNIVDEVAYHEKYPTIYHLRKKLVDSTDKADLRLIYLALAHMIKFRGHFLIEGDLNPDNSDVDKLFIQLVQTYNQLFEENPINASGVDAKAILSARLSKSRRLENLIAQLPGEKKNGLFGNLIALSLGLTPNFKSNFDLAEDAKLQLSKDTYDDDLDNLLAQIGDQYADLFLAAKNLSDAILLSDILRVNTEITKAPLSASMIKRYDEHHQDLTLLKALVRQQLPEKYKEIFFDQSKNGYAGYIDGGASQEEFYKFIKPILEKMDGTEELLVKLNREDLLRKQRTFDNGSIPHQIHLGELHAILRRQEDFYPFLKDNREKIEKILTFRIPYYVGPLARGNSRFAWMTRKSEETITPWNFEEVVDKGASAQSFIERMTNFDKNLPNEKVLPKHSLLYEYFTVYNELTKVKYVTEGMRKPAFLSGEQKKAIVDLLFKTNRKVTVKQLKEDYFKKIECFDSVEISGVEDRFNASLGTYHDLLKIIKDKDFLDNEENEDILEDIVLTLTLFEDREMIEERLKTYAHLFDDKVMKQLKRRRYTGWGRLSRKLINGIRDKQSGKTILDFLKSDGFANRNFMQLIHDDSLTFKEDIQKAQVSGQGDSLHEHIANLAGSPAIKKGILQTVKVVDELVKVMGRHKPENIVIEMARENQTTQKGQKNSRERMKRIEEGIKELGSQILKEHPVENTQLQNEKLYLYYLQNGRDMYVDQELDINRLSDYDVDHIVPQSFLKDDSIDNKVLTRSDKARGKSDNVPSEEVVKKMKNYWRQLLNAKLITQRKFDNLTKAERGGLSELDKAGFIKRQLVETRQITKHVAQILDSRMNTKYDENDKLIREVKVITLKSKLVSDFRKDFQFYKVREINNYHHAHDAYLNAVVGTALIKKYPKLESEFVYGDYKVYDVRKMIAKSEQEIGKATAKYFFYSNIMNFFKTEITLANGEIRKRPLIETNGETGEIVWDKGRDFATVRKVLSMPQVNIVKKTEVQTGGFSKESILPKRNSDKLIARKKDWDPKKYGGFDSPTVAYSVLVVAKVEKGKSKKLKSVKELLGITIMERSSFEKNPIDFLEAKGYKEVKKDLIIKLPKYSLFELENGRKRMLASAGELQKGNELALPSKYVNFLYLASHYEKLKGSPEDNEQKQLFVEQHKHYLDEIIEQISEFSKRVILADANLDKVLSAYNKHRDKPIREQAENIIHLFTLTNLGAPAAFKYFDTTIDRKRYTSTKEVLDATLIHQSITGLYETRIDLSQLGGDGGEAAAKGSSGGSGGAVLGLEHLPRPPQISQFPLNPERLQALQHLVRKALEAGHIEPYTGPGNNPVFPVKKANGTWRFIHDLRATNSLTIDLSSSSPGPPDLSSPPTTLAHLQTIDLRDAFFQIPLPKQFQPYFAFTVPQQCNYGPGTRYAWKVLPQGFKNSPTLFQMQLAHILQPIRQAFPQCTILQYMDDILLASPSHEDLLLLSEATMASLISHGLPVSENKTQQTPGTIKFLGQIISPNHLTYDAVPTVPIRSRWALPELQALLGEIQWVSKGTPTLRQPLHSLYCALQPHTDPRDQIYLNPSQVQSLVQLRQALSQNCRSRLVQTLPLLGAIMLTLTGTTTVVFQSKEQWPLVWLHAPLPHTSQCPWGQLLASAVLLLDKYTLQSYGLLCQTIHHNISTQTFNQFIQTSDHPSVPILLHHSHRFKNLGAQTGELWNTFLKTAAPLAPVKALMPVFTLSPVIINTAPCLFSDGSTSRAAYILWDKQILSQRSFPLPPPHKSAQRAELLGLLHGLSSARSWRCLNIFLDSKYLYHYLRTLALGTFQGRSSQAPFQALLPRLLSRKVVYLHHVRSHTNLPDPISRLNALTDALLITPVLQLAGKRTADGSEFEKRTADGSEFESPKKKAKVE

SEQ ID NO: 1487 - protein, 2013 aa, synthetic construct
MPAAKRVKLDGGDKKYSIGLDIGTNSVGWAVITDEYKVPSKKFKVLGNTDRHSIKKNLIGALLFDSGETAEATRLKRTARRRYTRRKNRICYLQEIFSNEMAKVDDSFFHRLEESFLVEEDKKHERHPIFGNIVDEVAYHEKYPTIYHLRKKLVDSTDKADLRLIYLALAHMIKFRGHFLIEGDLNPDNSDVDKLFIQLVQTYNQLFEENPINASGVDAKAILSARLSKSRRLENLIAQLPGEKKNGLFGNLIALSLGLTPNFKSNFDLAEDAKLQLSKDTYDDDLDNLLAQIGDQYADLFLAAKNLSDAILLSDILRVNTEITKAPLSASMIKRYDEHHQDLTLLKALVRQQLPEKYKEIFFDQSKNGYAGYIDGGASQEEFYKFIKPILEKMDGTEELLVKLNREDLLRKQRTFDNGSIPHQIHLGELHAILRRQEDFYPFLKDNREKIEKILTFRIPYYVGPLARGNSRFAWMTRKSEETITPWNFEEVVDKGASAQSFIERMTNFDKNLPNEKVLPKHSLLYEYFTVYNELTKVKYVTEGMRKPAFLSGEQKKAIVDLLFKTNRKVTVKQLKEDYFKKIECFDSVEISGVEDRFNASLGTYHDLLKIIKDKDFLDNEENEDILEDIVLTLTLFEDREMIEERLKTYAHLFDDKVMKQLKRRRYTGWGRLSRKLINGIRDKQSGKTILDFLKSDGFANRNFMQLIHDDSLTFKEDIQKAQVSGQGDSLHEHIANLAGSPAIKKGILQTVKVVDELVKVMGRHKPENIVIEMARENQTTQKGQKNSRERMKRIEEGIKELGSQILKEHPVENTQLQNEKLYLYYLQNGRDMYVDQELDINRLSDYDVDHIVPQSFLKDDSIDNKVLTRSDKARGKSDNVPSEEVVKKMKNYWRQLLNAKLITQRKFDNLTKAERGGLSELDKAGFIKRQLVETRQITKHVAQILDSRMNTKYDENDKLIREVKVITLKSKLVSDFRKDFQFYKVREINNYHHAHDAYLNAVVGTALIKKYPKLESEFVYGDYKVYDVRKMIAKSEQEIGKATAKYFFYSNIMNFFKTEITLANGEIRKRPLIETNGETGEIVWDKGRDFATVRKVLSMPQVNIVKKTEVQTGGFSKESILPKRNSDKLIARKKDWDPKKYGGFDSPTVAYSVLVVAKVEKGKSKKLKSVKELLGITIMERSSFEKNPIDFLEAKGYKEVKKDLIIKLPKYSLFELENGRKRMLASAGELQKGNELALPSKYVNFLYLASHYEKLKGSPEDNEQKQLFVEQHKHYLDEIIEQISEFSKRVILADANLDKVLSAYNKHRDKPIREQAENIIHLFTLTNLGAPAAFKYFDTTIDRKRYTSTKEVLDATLIHQSITGLYETRIDLSQLGGDGGPAPEAAAKGGGGGAVLGLEHLPRPPQISQFPLNPERLQALQHLVRKALEAGHIEPYTGPGNNPVFPVKKANGTWRFIHDLRATNSLTIDLSSSSPGPPDLSSPPTTLAHLQTIDLRDAFFQIPLPKQFQPYFAFTVPQQCNYGPGTRYAWKVLPQGFKNSPTLFQMQLAHILQPIRQAFPQCTILQYMDDILLASPSHEDLLLLSEATMASLISHGLPVSENKTQQTPGTIKFLGQIISPNHLTYDAVPTVPIRSRWALPELQALLGEIQWVSKGTPTLRQPLHSLYCALQPHTDPRDQIYLNPSQVQSLVQLRQALSQNCRSRLVQTLPLLGAIMLTLTGTTTVVFQSKEQWPLVWLHAPLPHTSQCPWGQLLASAVLLLDKYTLQSYGLLCQTIHHNISTQTFNQFIQTSDHPSVPILLHHSHRFKNLGAQTGELWNTFLKTAAPLAPVKALMPVFTLSPVIINTAPCLFSDGSTSRAAYILWDKQILSQRSFPLPPPHKSAQRAELLGLLHGLSSARSWRCLNIFLDSKYLYHYLRTLALGTFQGRSSQAPFQALLPRLLSRKVVYLHHVRSHTNLPDPISRLNALTDALLITPVLQLAGKRTADGSEFEKRTADGSEFESPKKKAKVE

SEQ ID NO: 1488 - protein, 2017 aa, synthetic construct
MPAAKRVKLDGGDKKYSIGLDIGTNSVGWAVITDEYKVPSKKFKVLGNTDRHSIKKNLIGALLFDSGETAEATRLKRTARRRYTRRKNRICYLQEIFSNEMAKVDDSFFHRLEESFLVEEDKKHERHPIFGNIVDEVAYHEKYPTIYHLRKKLVDSTDKADLRLIYLALAHMIKFRGHFLIEGDLNPDNSDVDKLFIQLVQTYNQLFEENPINASGVDAKAILSARLSKSRRLENLIAQLPGEKKNGLFGNLIALSLGLTPNFKSNFDLAEDAKLQLSKDTYDDDLDNLLAQIGDQYADLFLAAKNLSDAILLSDILRVNTEITKAPLSASMIKRYDEHHQDLTLLKALVRQQLPEKYKEIFFDQSKNGYAGYIDGGASQEEFYKFIKPILEKMDGTEELLVKLNREDLLRKQRTFDNGSIPHQIHLGELHAILRRQEDFYPFLKDNREKIEKILTFRIPYYVGPLARGNSRFAWMTRKSEETITPWNFEEVVDKGASAQSFIERMTNFDKNLPNEKVLPKHSLLYEYFTVYNELTKVKYVTEGMRKPAFLSGEQKKAIVDLLFKTNRKVTVKQLKEDYFKKIECFDSVEISGVEDRFNASLGTYHDLLKIIKDKDFLDNEENEDILEDIVLTLTLFEDREMIEERLKTYAHLFDDKVMKQLKRRRYTGWGRLSRKLINGIRDKQSGKTILDFLKSDGFANRNFMQLIHDDSLTFKEDIQKAQVSGQGDSLHEHIANLAGSPAIKKGILQTVKVVDELVKVMGRHKPENIVIEMARENQTTQKGQKNSRERMKRIEEGIKELGSQILKEHPVENTQLQNEKLYLYYLQNGRDMYVDQELDINRLSDYDVDHIVPQSFLKDDSIDNKVLTRSDKARGKSDNVPSEEVVKKMKNYWRQLLNAKLITQRKFDNLTKAERGGLSELDKAGFIKRQLVETRQITKHVAQILDSRMNTKYDENDKLIREVKVITLKSKLVSDFRKDFQFYKVREINNYHHAHDAYLNAVVGTALIKKYPKLESEFVYGDYKVYDVRKMIAKSEQEIGKATAKYFFYSNIMNFFKTEITLANGEIRKRPLIETNGETGEIVWDKGRDFATVRKVLSMPQVNIVKKTEVQTGGFSKESILPKRNSDKLIARKKDWDPKKYGGFDSPTVAYSVLVVAKVEKGKSKKLKSVKELLGITIMERSSFEKNPIDFLEAKGYKEVKKDLIIKLPKYSLFELENGRKRMLASAGELQKGNELALPSKYVNFLYLASHYEKLKGSPEDNEQKQLFVEQHKHYLDEIIEQISEFSKRVILADANLDKVLSAYNKHRDKPIREQAENIIHLFTLTNLGAPAAFKYFDTTIDRKRYTSTKEVLDATLIHQSITGLYETRIDLSQLGGDGGGGGGSEAAAKGGGGSGGAVLGLEHLPRPPEISQFPLNPERLQALQHLVRKALEAGHIEPYTGPGNNPVFPVKKANGTWRFIHDLRATNSLTIDLSSSSPGPPDLSSLPTTLAHLQTIDLKDAFFQIPLPKQFQPYFAFTVPQQCNYGPGTRYAWRVLPQGFKNSPTLFEMQLAHILQPIRQAFPQCTILQYMDDILLASPSHADLQLLSEATMASLISHGLPVSENKTQQTPGTIKFLGQIISPNHLTYDAVPKVPIRSRWALPELQALLGEIQWVSKGTPTLRQPLHSLYCALQRHTDPRDQIYLNPSQVQSLVQLRQALSQNCRSRLVQTLPLLGAIMLTLTGTTTVVFQSKQQWPLVWLHAPLPHTSQCPWGQLLASAVLLLDKYTLQSYGLLCQTIHHNISTQTFNQFIQTSDHPSVPILLHHSHRFKNLGAQTGELWNTFLKTTAPLAPVKALMPVFTLSPVIINTAPCLFSDGSTSQAAYILWDKHILSQRSFPLPPPHKSAQRAELLGLLHGLSSARSWRCLNIFLDSKYLYHYLRTLALGTFQGRSSQAPFQALLPRLLSRKVVYLHHVRSHTNLPDPISRLNALTDALLITPVLQLAGKRTADGSEFEKRTADGSEFESPKKKAKVE

SEQ ID NO: 1489 - protein, 2017 aa, synthetic construct
MPAAKRVKLDGGDKKYSIGLDIGTNSVGWAVITDEYKVPSKKFKVLGNTDRHSIKKNLIGALLFDSGETAEATRLKRTARRRYTRRKNRICYLQEIFSNEMAKVDDSFFHRLEESFLVEEDKKHERHPIFGNIVDEVAYHEKYPTIYHLRKKLVDSTDKADLRLIYLALAHMIKFRGHFLIEGDLNPDNSDVDKLFIQLVQTYNQLFEENPINASGVDAKAILSARLSKSRRLENLIAQLPGEKKNGLFGNLIALSLGLTPNFKSNFDLAEDAKLQLSKDTYDDDLDNLLAQIGDQYADLFLAAKNLSDAILLSDILRVNTEITKAPLSASMIKRYDEHHQDLTLLKALVRQQLPEKYKEIFFDQSKNGYAGYIDGGASQEEFYKFIKPILEKMDGTEELLVKLNREDLLRKQRTFDNGSIPHQIHLGELHAILRRQEDFYPFLKDNREKIEKILTFRIPYYVGPLARGNSRFAWMTRKSEETITPWNFEEVVDKGASAQSFIERMTNFDKNLPNEKVLPKHSLLYEYFTVYNELTKVKYVTEGMRKPAFLSGEQKKAIVDLLFKTNRKVTVKQLKEDYFKKIECFDSVEISGVEDRFNASLGTYHDLLKIIKDKDFLDNEENEDILEDIVLTLTLFEDREMIEERLKTYAHLFDDKVMKQLKRRRYTGWGRLSRKLINGIRDKQSGKTILDFLKSDGFANRNFMQLIHDDSLTFKEDIQKAQVSGQGDSLHEHIANLAGSPAIKKGILQTVKVVDELVKVMGRHKPENIVIEMARENQTTQKGQKNSRERMKRIEEGIKELGSQILKEHPVENTQLQNEKLYLYYLQNGRDMYVDQELDINRLSDYDVDHIVPQSFLKDDSIDNKVLTRSDKARGKSDNVPSEEVVKKMKNYWRQLLNAKLITQRKFDNLTKAERGGLSELDKAGFIKRQLVETRQITKHVAQILDSRMNTKYDENDKLIREVKVITLKSKLVSDFRKDFQFYKVREINNYHHAHDAYLNAVVGTALIKKYPKLESEFVYGDYKVYDVRKMIAKSEQEIGKATAKYFFYSNIMNFFKTEITLANGEIRKRPLIETNGETGEIVWDKGRDFATVRKVLSMPQVNIVKKTEVQTGGFSKESILPKRNSDKLIARKKDWDPKKYGGFDSPTVAYSVLVVAKVEKGKSKKLKSVKELLGITIMERSSFEKNPIDFLEAKGYKEVKKDLIIKLPKYSLFELENGRKRMLASAGELQKGNELALPSKYVNFLYLASHYEKLKGSPEDNEQKQLFVEQHKHYLDEIIEQISEFSKRVILADANLDKVLSAYNKHRDKPIREQAENIIHLFTLTNLGAPAAFKYFDTTIDRKRYTSTKEVLDATLIHQSITGLYETRIDLSQLGGDGGEAAAKEAAAKEAAAKGGAVLGLEHLPRPPEISQFPLNPERLQALQHLVRKALEAGHIEPYTGPGNNPVFPVKKANGTWRFIHDLRATNSLTIDLSSSSPGPPDLSSLPTTLAHLQTIDLKDAFFQIPLPKQFQPYFAFTVPQQCNYGPGTRYAWRVLPQGFKNSPTLFEMQLAHILQPIRQAFPQCTILQYMDDILLASPSHADLQLLSEATMASLISHGLPVSENKTQQTPGTIKFLGQIISPNHLTYDAVPKVPIRSRWALPELQALLGEIQWVSKGTPTLRQPLHSLYCALQRHTDPRDQIYLNPSQVQSLVQLRQALSQNCRSRLVQTLPLLGAIMLTLTGTTTVVFQSKQQWPLVWLHAPLPHTSQCPWGQLLASAVLLLDKYTLQSYGLLCQTIHHNISTQTFNQFIQTSDHPSVPILLHHSHRFKNLGAQTGELWNTFLKTTAPLAPVKALMPVFTLSPVIINTAPCLFSDGSTSQAAYILWDKHILSQRSFPLPPPHKSAQRAELLGLLHGLSSARSWRCLNIFLDSKYLYHYLRTLALGTFQGRSSQAPFQALLPRLLSRKVVYLHHVRSHTNLPDPISRLNALTDALLITPVLQLAGKRTADGSEFEKRTADGSEFESPKKKAKVE

SEQ ID NO: 1490 - protein, 2010 aa, synthetic construct
MPAAKRVKLDGGDKKYSIGLDIGTNSVGWAVITDEYKVPSKKFKVLGNTDRHSIKKNLIGALLFDSGETAEATRLKRTARRRYTRRKNRICYLQEIFSNEMAKVDDSFFHRLEESFLVEEDKKHERHPIFGNIVDEVAYHEKYPTIYHLRKKLVDSTDKADLRLIYLALAHMIKFRGHFLIEGDLNPDNSDVDKLFIQLVQTYNQLFEENPINASGVDAKAILSARLSKSRRLENLIAQLPGEKKNGLFGNLIALSLGLTPNFKSNFDLAEDAKLQLSKDTYDDDLDNLLAQIGDQYADLFLAAKNLSDAILLSDILRVNTEITKAPLSASMIKRYDEHHQDLTLLKALVRQQLPEKYKEIFFDQSKNGYAGYIDGGASQEEFYKFIKPILEKMDGTEELLVKLNREDLLRKQRTFDNGSIPHQIHLGELHAILRRQEDFYPFLKDNREKIEKILTFRIPYYVGPLARGNSRFAWMTRKSEETITPWNFEEVVDKGASAQSFIERMTNFDKNLPNEKVLPKHSLLYEYFTVYNELTKVKYVTEGMRKPAFLSGEQKKAIVDLLFKTNRKVTVKQLKEDYFKKIECFDSVEISGVEDRFNASLGTYHDLLKIIKDKDFLDNEENEDILEDIVLTLTLFEDREMIEERLKTYAHLFDDKVMKQLKRRRYTGWGRLSRKLINGIRDKQSGKTILDFLKSDGFANRNFMQLIHDDSLTFKEDIQKAQVSGQGDSLHEHIANLAGSPAIKKGILQTVKVVDELVKVMGRHKPENIVIEMARENQTTQKGQKNSRERMKRIEEGIKELGSQILKEHPVENTQLQNEKLYLYYLQNGRDMYVDQELDINRLSDYDVDHIVPQSFLKDDSIDNKVLTRSDKARGKSDNVPSEEVVKKMKNYWRQLLNAKLITQRKFDNLTKAERGGLSELDKAGFIKRQLVETRQITKHVAQILDSRMNTKYDENDKLIREVKVITLKSKLVSDFRKDFQFYKVREINNYHHAHDAYLNAVVGTALIKKYPKLESEFVYGDYKVYDVRKMIAKSEQEIGKATAKYFFYSNIMNFFKTEITLANGEIRKRPLIETNGETGEIVWDKGRDFATVRKVLSMPQVNIVKKTEVQTGGFSKESILPKRNSDKLIARKKDWDPKKYGGFDSPTVAYSVLVVAKVEKGKSKKLKSVKELLGITIMERSSFEKNPIDFLEAKGYKEVKKDLIIKLPKYSLFELENGRKRMLASAGELQKGNELALPSKYVNFLYLASHYEKLKGSPEDNEQKQLFVEQHKHYLDEIIEQISEFSKRVILADANLDKVLSAYNKHRDKPIREQAENIIHLFTLTNLGAPAAFKYFDTTIDRKRYTSTKEVLDATLIHQSITGLYETRIDLSQLGGDGGGGGEAAAKGGAVLGLEHLPRPPEISQFPLNPERLQALQHLVRKALEAGHIEPYTGPGNNPVFPVKKANGTWRFIHDLRATNSLTIDLSSSSPGPPDLSSLPTTLAHLQTIDLKDAFFQIPLPKQFQPYFAFTVPQQCNYGPGTRYAWRVLPQGFKNSPTLFEMQLAHILQPIRQAFPQCTILQYMDDILLASPSHADLQLLSEATMASLISHGLPVSENKTQQTPGTIKFLGQIISPNHLTYDAVPKVPIRSRWALPELQALLGEIQWVSKGTPTLRQPLHSLYCALQRHTDPRDQIYLNPSQVQSLVQLRQALSQNCRSRLVQTLPLLGAIMLTLTGTTTVVFQSKQQWPLVWLHAPLPHTSQCPWGQLLASAVLLLDKYTLQSYGLLCQTIHHNISTQTFNQFIQTSDHPSVPILLHHSHRFKNLGAQTGELWNTFLKTTAPLAPVKALMPVFTLSPVIINTAPCLFSDGSTSQAAYILWDKHILSQRSFPLPPPHKSAQRAELLGLLHGLSSARSWRCLNIFLDSKYLYHYLRTLALGTFQGRSSQAPFQALLPRLLSRKVVYLHHVRSHTNLPDPISRLNALTDALLITPVLQLAGKRTADGSEFEKRTADGSEFESPKKKAKVE

SEQ ID NO: 1491 - protein, 2027 aa, synthetic construct
MPAAKRVKLDGGDKKYSIGLDIGTNSVGWAVITDEYKVPSKKFKVLGNTDRHSIKKNLIGALLFDSGETAEATRLKRTARRRYTRRKNRICYLQEIFSNEMAKVDDSFFHRLEESFLVEEDKKHERHPIFGNIVDEVAYHEKYPTIYHLRKKLVDSTDKADLRLIYLALAHMIKFRGHFLIEGDLNPDNSDVDKLFIQLVQTYNQLFEENPINASGVDAKAILSARLSKSRRLENLIAQLPGEKKNGLFGNLIALSLGLTPNFKSNFDLAEDAKLQLSKDTYDDDLDNLLAQIGDQYADLFLAAKNLSDAILLSDILRVNTEITKAPLSASMIKRYDEHHQDLTLLKALVRQQLPEKYKEIFFDQSKNGYAGYIDGGASQEEFYKFIKPILEKMDGTEELLVKLNREDLLRKQRTFDNGSIPHQIHLGELHAILRRQEDFYPFLKDNREKIEKILTFRIPYYVGPLARGNSRFAWMTRKSEETITPWNFEEVVDKGASAQSFIERMTNFDKNLPNEKVLPKHSLLYEYFTVYNELTKVKYVTEGMRKPAFLSGEQKKAIVDLLFKTNRKVTVKQLKEDYFKKIECFDSVEISGVEDRFNASLGTYHDLLKIIKDKDFLDNEENEDILEDIVLTLTLFEDREMIEERLKTYAHLFDDKVMKQLKRRRYTGWGRLSRKLINGIRDKQSGKTILDFLKSDGFANRNFMQLIHDDSLTFKEDIQKAQVSGQGDSLHEHIANLAGSPAIKKGILQTVKVVDELVKVMGRHKPENIVIEMARENQTTQKGQKNSRERMKRIEEGIKELGSQILKEHPVENTQLQNEKLYLYYLQNGRDMYVDQELDINRLSDYDVDHIVPQSFLKDDSIDNKVLTRSDKARGKSDNVPSEEVVKKMKNYWRQLLNAKLITQRKFDNLTKAERGGLSELDKAGFIKRQLVETRQITKHVAQILDSRMNTKYDENDKLIREVKVITLKSKLVSDFRKDFQFYKVREINNYHHAHDAYLNAVVGTALIKKYPKLESEFVYGDYKVYDVRKMIAKSEQEIGKATAKYFFYSNIMNFFKTEITLANGEIRKRPLIETNGETGEIVWDKGRDFATVRKVLSMPQVNIVKKTEVQTGGFSKESILPKRNSDKLIARKKDWDPKKYGGFDSPTVAYSVLVVAKVEKGKSKKLKSVKELLGITIMERSSFEKNPIDFLEAKGYKEVKKDLIIKLPKYSLFELENGRKRMLASAGELQKGNELALPSKYVNFLYLASHYEKLKGSPEDNEQKQLFVEQHKHYLDEIIEQISEFSKRVILADANLDKVLSAYNKHRDKPIREQAENIIHLFTLTNLGAPAAFKYFDTTIDRKRYTSTKEVLDATLIHQSITGLYETRIDLSQLGGDGGGGGGSGGGGSGGGGSGGGGSGGGGSGGAVLGLEHLPRPPEISQFPLNPERLQALQHLVRKALEAGHIEPYTGPGNNPVFPVKKANGTWRFIHDLRATNSLTIDLSSSSPGPPDLSSLPTTLAHLQTIDLKDAFFQIPLPKQFQPYFAFTVPQQCNYGPGTRYAWRVLPQGFKNSPTLFEMQLAHILQPIRQAFPQCTILQYMDDILLASPSHADLQLLSEATMASLISHGLPVSENKTQQTPGTIKFLGQIISPNHLTYDAVPKVPIRSRWALPELQALLGEIQWVSKGTPTLRQPLHSLYCALQRHTDPRDQIYLNPSQVQSLVQLRQALSQNCRSRLVQTLPLLGAIMLTLTGTTTVVFQSKQQWPLVWLHAPLPHTSQCPWGQLLASAVLLLDKYTLQSYGLLCQTIHHNISTQTFNQFIQTSDHPSVPILLHHSHRFKNLGAQTGELWNTFLKTTAPLAPVKALMPVFTLSPVIINTAPCLFSDGSTSQAAYILWDKHILSQRSFPLPPPHKSAQRAELLGLLHGLSSARSWRCLNIFLDSKYLYHYLRTLALGTFQGRSSQAPFQALLPRLLSRKVVYLHHVRSHTNLPDPISRLNALTDALLITPVLQLAGKRTADGSEFEKRTADGSEFESPKKKAKVE

SEQ ID NO: 1492 - protein, 2011 aa, synthetic construct
MPAAKRVKLDGGDKKYSIGLDIGTNSVGWAVITDEYKVPSKKFKVLGNTDRHSIKKNLIGALLFDSGETAEATRLKRTARRRYTRRKNRICYLQEIFSNEMAKVDDSFFHRLEESFLVEEDKKHERHPIFGNIVDEVAYHEKYPTIYHLRKKLVDSTDKADLRLIYLALAHMIKFRGHFLIEGDLNPDNSDVDKLFIQLVQTYNQLFEENPINASGVDAKAILSARLSKSRRLENLIAQLPGEKKNGLFGNLIALSLGLTPNFKSNFDLAEDAKLQLSKDTYDDDLDNLLAQIGDQYADLFLAAKNLSDAILLSDILRVNTEITKAPLSASMIKRYDEHHQDLTLLKALVRQQLPEKYKEIFFDQSKNGYAGYIDGGASQEEFYKFIKPILEKMDGTEELLVKLNREDLLRKQRTFDNGSIPHQIHLGELHAILRRQEDFYPFLKDNREKIEKILTFRIPYYVGPLARGNSRFAWMTRKSEETITPWNFEEVVDKGASAQSFIERMTNFDKNLPNEKVLPKHSLLYEYFTVYNELTKVKYVTEGMRKPAFLSGEQKKAIVDLLFKTNRKVTVKQLKEDYFKKIECFDSVEISGVEDRFNASLGTYHDLLKIIKDKDFLDNEENEDILEDIVLTLTLFEDREMIEERLKTYAHLFDDKVMKQLKRRRYTGWGRLSRKLINGIRDKQSGKTILDFLKSDGFANRNFMQLIHDDSLTFKEDIQKAQVSGQGDSLHEHIANLAGSPAIKKGILQTVKVVDELVKVMGRHKPENIVIEMARENQTTQKGQKNSRERMKRIEEGIKELGSQILKEHPVENTQLQNEKLYLYYLQNGRDMYVDQELDINRLSDYDVDHIVPQSFLKDDSIDNKVLTRSDKARGKSDNVPSEEVVKKMKNYWRQLLNAKLITQRKFDNLTKAERGGLSELDKAGFIKRQLVETRQITKHVAQILDSRMNTKYDENDKLIREVKVITLKSKLVSDFRKDFQFYKVREINNYHHAHDAYLNAVVGTALIKKYPKLESEFVYGDYKVYDVRKMIAKSEQEIGKATAKYFFYSNIMNFFKTEITLANGEIRKRPLIETNGETGEIVWDKGRDFATVRKVLSMPQVNIVKKTEVQTGGFSKESILPKRNSDKLIARKKDWDPKKYGGFDSPTVAYSVLVVAKVEKGKSKKLKSVKELLGITIMERSSFEKNPIDFLEAKGYKEVKKDLIIKLPKYSLFELENGRKRMLASAGELQKGNELALPSKYVNFLYLASHYEKLKGSPEDNEQKQLFVEQHKHYLDEIIEQISEFSKRVILADANLDKVLSAYNKHRDKPIREQAENIIHLFTLTNLGAPAAFKYFDTTIDRKRYTSTKEVLDATLIHQSITGLYETRIDLSQLGGDGGGGGGGSPAPGGAVLGLEHLPRPPEISQFPLNPERLQALQHLVRKALEAGHIEPYTGPGNNPVFPVKKANGTWRFIHDLRATNSLTIDLSSSSPGPPDLSSLPTTLAHLQTIDLKDAFFQIPLPKQFQPYFAFTVPQQCNYGPGTRYAWRVLPQGFKNSPTLFQMQLAHILQPIRQAFPQCTILQYMDDILLASPSHADLQLLSEATMASLISHGLPVSENKTQQTPGTIKFLGQIISPNHLTYDAVPKVPIRSRWALPELQALLGEIQWVSKGTPTLRQPLHSLYCALQPHTDPRDQIYLNPSQVQSLVQLRQALSQNCRSRLVQTLPLLGAIMLTLTGTTTVVFQSKQQWPLVWLHAPLPHTSQCPWGQLLASAVLLLDKYTLQSYGLLCQTIHHNISTQTFNQFIQTSDHPSVPILLHHSHRFKNLGAQTGELWNTFLKTTAPLAPVKALMPVFTLSPVIINTAPCLFSDGSTSQAAYILWDKHILSQRSFPLPPPHKSAQRAELLGLLHGLSSARSWRCLNIFLDSKYLYHYLRTLALGTFQGRSSQAPFQALLPRLLSRKVVYLHHVRSHTNLPDPISRLNALTDALLITPVLQLAGKRTADGSEFEKRTADGSEFESPKKKAKVE

SEQ ID NO: 1493 - protein, 2008 aa, synthetic construct
MPAAKRVKLDGGDKKYSIGLDIGTNSVGWAVITDEYKVPSKKFKVLGNTDRHSIKKNLIGALLFDSGETAEATRLKRTARRRYTRRKNRICYLQEIFSNEMAKVDDSFFHRLEESFLVEEDKKHERHPIFGNIVDEVAYHEKYPTIYHLRKKLVDSTDKADLRLIYLALAHMIKFRGHFLIEGDLNPDNSDVDKLFIQLVQTYNQLFEENPINASGVDAKAILSARLSKSRRLENLIAQLPGEKKNGLFGNLIALSLGLTPNFKSNFDLAEDAKLQLSKDTYDDDLDNLLAQIGDQYADLFLAAKNLSDAILLSDILRVNTEITKAPLSASMIKRYDEHHQDLTLLKALVRQQLPEKYKEIFFDQSKNGYAGYIDGGASQEEFYKFIKPILEKMDGTEELLVKLNREDLLRKQRTFDNGSIPHQIHLGELHAILRRQEDFYPFLKDNREKIEKILTFRIPYYVGPLARGNSRFAWMTRKSEETITPWNFEEVVDKGASAQSFIERMTNFDKNLPNEKVLPKHSLLYEYFTVYNELTKVKYVTEGMRKPAFLSGEQKKAIVDLLFKTNRKVTVKQLKEDYFKKIECFDSVEISGVEDRFNASLGTYHDLLKIIKDKDFLDNEENEDILEDIVLTLTLFEDREMIEERLKTYAHLFDDKVMKQLKRRRYTGWGRLSRKLINGIRDKQSGKTILDFLKSDGFANRNFMQLIHDDSLTFKEDIQKAQVSGQGDSLHEHIANLAGSPAIKKGILQTVKVVDELVKVMGRHKPENIVIEMARENQTTQKGQKNSRERMKRIEEGIKELGSQILKEHPVENTQLQNEKLYLYYLQNGRDMYVDQELDINRLSDYDVDHIVPQSFLKDDSIDNKVLTRSDKARGKSDNVPSEEVVKKMKNYWRQLLNAKLITQRKFDNLTKAERGGLSELDKAGFIKRQLVETRQITKHVAQILDSRMNTKYDENDKLIREVKVITLKSKLVSDFRKDFQFYKVREINNYHHAHDAYLNAVVGTALIKKYPKLESEFVYGDYKVYDVRKMIAKSEQEIGKATAKYFFYSNIMNFFKTEITLANGEIRKRPLIETNGETGEIVWDKGRDFATVRKVLSMPQVNIVKKTEVQTGGFSKESILPKRNSDKLIARKKDWDPKKYGGFDSPTVAYSVLVVAKVEKGKSKKLKSVKELLGITIMERSSFEKNPIDFLEAKGYKEVKKDLIIKLPKYSLFELENGRKRMLASAGELQKGNELALPSKYVNFLYLASHYEKLKGSPEDNEQKQLFVEQHKHYLDEIIEQISEFSKRVILADANLDKVLSAYNKHRDKPIREQAENIIHLFTLTNLGAPAAFKYFDTTIDRKRYTSTKEVLDATLIHQSITGLYETRIDLSQLGGDGGPAPGGSGGAVLGLEHLPRPPEISQFPLNPERLQALQHLVRKALEAGHIEPYTGPGNNPVFPVKKANGTWRFIHDLRATNSLTIDLSSSSPGPPDLSSLPTTLAHLQTIDLKDAFFQIPLPKQFQPYFAFTVPQQCNYGPGTRYAWRVLPQGFKNSPTLFQMQLAHILQPIRQAFPQCTILQYMDDILLASPSHADLQLLSEATMASLISHGLPVSENKTQQTPGTIKFLGQIISPNHLTYDAVPKVPIRSRWALPELQALLGEIQWVSKGTPTLRQPLHSLYCALQPHTDPRDQIYLNPSQVQSLVQLRQALSQNCRSRLVQTLPLLGAIMLTLTGTTTVVFQSKQQWPLVWLHAPLPHTSQCPWGQLLASAVLLLDKYTLQSYGLLCQTIHHNISTQTFNQFIQTSDHPSVPILLHHSHRFKNLGAQTGELWNTFLKTTAPLAPVKALMPVFTLSPVIINTAPCLFSDGSTSQAAYILWDKHILSQRSFPLPPPHKSAQRAELLGLLHGLSSARSWRCLNIFLDSKYLYHYLRTLALGTFQGRSSQAPFQALLPRLLSRKVVYLHHVRSHTNLPDPISRLNALTDALLITPVLQLAGKRTADGSEFEKRTADGSEFESPKKKAKVE

SEQ ID NO: 1494 - protein, 2011 aa, synthetic construct
MPAAKRVKLDGGDKKYSIGLDIGTNSVGWAVITDEYKVPSKKFKVLGNTDRHSIKKNLIGALLFDSGETAEATRLKRTARRRYTRRKNRICYLQEIFSNEMAKVDDSFFHRLEESFLVEEDKKHERHPIFGNIVDEVAYHEKYPTIYHLRKKLVDSTDKADLRLIYLALAHMIKFRGHFLIEGDLNPDNSDVDKLFIQLVQTYNQLFEENPINASGVDAKAILSARLSKSRRLENLIAQLPGEKKNGLFGNLIALSLGLTPNFKSNFDLAEDAKLQLSKDTYDDDLDNLLAQIGDQYADLFLAAKNLSDAILLSDILRVNTEITKAPLSASMIKRYDEHHQDLTLLKALVRQQLPEKYKEIFFDQSKNGYAGYIDGGASQEEFYKFIKPILEKMDGTEELLVKLNREDLLRKQRTFDNGSIPHQIHLGELHAILRRQEDFYPFLKDNREKIEKILTFRIPYYVGPLARGNSRFAWMTRKSEETITPWNFEEVVDKGASAQSFIERMTNFDKNLPNEKVLPKHSLLYEYFTVYNELTKVKYVTEGMRKPAFLSGEQKKAIVDLLFKTNRKVTVKQLKEDYFKKIECFDSVEISGVEDRFNASLGTYHDLLKIIKDKDFLDNEENEDILEDIVLTLTLFEDREMIEERLKTYAHLFDDKVMKQLKRRRYTGWGRLSRKLINGIRDKQSGKTILDFLKSDGFANRNFMQLIHDDSLTFKEDIQKAQVSGQGDSLHEHIANLAGSPAIKKGILQTVKVVDELVKVMGRHKPENIVIEMARENQTTQKGQKNSRERMKRIEEGIKELGSQILKEHPVENTQLQNEKLYLYYLQNGRDMYVDQELDINRLSDYDVDHIVPQSFLKDDSIDNKVLTRSDKARGKSDNVPSEEVVKKMKNYWRQLLNAKLITQRKFDNLTKAERGGLSELDKAGFIKRQLVETRQITKHVAQILDSRMNTKYDENDKLIREVKVITLKSKLVSDFRKDFQFYKVREINNYHHAHDAYLNAVVGTALIKKYPKLESEFVYGDYKVYDVRKMIAKSEQEIGKATAKYFFYSNIMNFFKTEITLANGEIRKRPLIETNGETGEIVWDKGRDFATVRKVLSMPQVNIVKKTEVQTGGFSKESILPKRNSDKLIARKKDWDPKKYGGFDSPTVAYSVLVVAKVEKGKSKKLKSVKELLGITIMERSSFEKNPIDFLEAKGYKEVKKDLIIKLPKYSLFELENGRKRMLASAGELQKGNELALPSKYVNFLYLASHYEKLKGSPEDNEQKQLFVEQHKHYLDEIIEQISEFSKRVILADANLDKVLSAYNKHRDKPIREQAENIIHLFTLTNLGAPAAFKYFDTTIDRKRYTSTKEVLDATLIHQSITGLYETRIDLSQLGGDGGGGGPAPGGSGGAVLGLEHLPRPPEISQFPLNPERLQALQHLVRKALEAGHIEPYTGPGNNPVFPVKKANGTWRFIHDLRATNSLTIDLSSSSPGPPDLSSLPTTLAHLQTIDLKDAFFQIPLPKQFQPYFAFTVPQQCNYGPGTRYAWRVLPQGFKNSPTLFQMQLAHILQPIRQAFPQCTILQYMDDILLASPSHADLQLLSEATMASLISHGLPVSENKTQQTPGTIKFLGQIISPNHLTYDAVPKVPIRSRWALPELQALLGEIQWVSKGTPTLRQPLHSLYCALQPHTDPRDQIYLNPSQVQSLVQLRQALSQNCRSRLVQTLPLLGAIMLTLTGTTTVVFQSKQQWPLVWLHAPLPHTSQCPWGQLLASAVLLLDKYTLQSYGLLCQTIHHNISTQTFNQFIQTSDHPSVPILLHHSHRFKNLGAQTGELWNTFLKTTAPLAPVKALMPVFTLSPVIINTAPCLFSDGSTSQAAYILWDKHILSQRSFPLPPPHKSAQRAELLGLLHGLSSARSWRCLNIFLDSKYLYHYLRTLALGTFQGRSSQAPFQALLPRLLSRKVVYLHHVRSHTNLPDPISRLNALTDALLITPVLQLAGKRTADGSEFEKRTADGSEFESPKKKAKVE

SEQ ID NO: 1495 - protein, 2017 aa, synthetic construct
MPAAKRVKLDGGDKKYSIGLDIGTNSVGWAVITDEYKVPSKKFKVLGNTDRHSIKKNLIGALLFDSGETAEATRLKRTARRRYTRRKNRICYLQEIFSNEMAKVDDSFFHRLEESFLVEEDKKHERHPIFGNIVDEVAYHEKYPTIYHLRKKLVDSTDKADLRLIYLALAHMIKFRGHFLIEGDLNPDNSDVDKLFIQLVQTYNQLFEENPINASGVDAKAILSARLSKSRRLENLIAQLPGEKKNGLFGNLIALSLGLTPNFKSNFDLAEDAKLQLSKDTYDDDLDNLLAQIGDQYADLFLAAKNLSDAILLSDILRVNTEITKAPLSASMIKRYDEHHQDLTLLKALVRQQLPEKYKEIFFDQSKNGYAGYIDGGASQEEFYKFIKPILEKMDGTEELLVKLNREDLLRKQRTFDNGSIPHQIHLGELHAILRRQEDFYPFLKDNREKIEKILTFRIPYYVGPLARGNSRFAWMTRKSEETITPWNFEEVVDKGASAQSFIERMTNFDKNLPNEKVLPKHSLLYEYFTVYNELTKVKYVTEGMRKPAFLSGEQKKAIVDLLFKTNRKVTVKQLKEDYFKKIECFDSVEISGVEDRFNASLGTYHDLLKIIKDKDFLDNEENEDILEDIVLTLTLFEDREMIEERLKTYAHLFDDKVMKQLKRRRYTGWGRLSRKLINGIRDKQSGKTILDFLKSDGFANRNFMQLIHDDSLTFKEDIQKAQVSGQGDSLHEHIANLAGSPAIKKGILQTVKVVDELVKVMGRHKPENIVIEMARENQTTQKGQKNSRERMKRIEEGIKELGSQILKEHPVENTQLQNEKLYLYYLQNGRDMYVDQELDINRLSDYDVDHIVPQSFLKDDSIDNKVLTRSDKARGKSDNVPSEEVVKKMKNYWRQLLNAKLITQRKFDNLTKAERGGLSELDKAGFIKRQLVETRQITKHVAQILDSRMNTKYDENDKLIREVKVITLKSKLVSDFRKDFQFYKVREINNYHHAHDAYLNAVVGTALIKKYPKLESEFVYGDYKVYDVRKMIAKSEQEIGKATAKYFFYSNIMNFFKTEITLANGEIRKRPLIETNGETGEIVWDKGRDFATVRKVLSMPQVNIVKKTEVQTGGFSKESILPKRNSDKLIARKKDWDPKKYGGFDSPTVAYSVLVVAKVEKGKSKKLKSVKELLGITIMERSSFEKNPIDFLEAKGYKEVKKDLIIKLPKYSLFELENGRKRMLASAGELQKGNELALPSKYVNFLYLASHYEKLKGSPEDNEQKQLFVEQHKHYLDEIIEQISEFSKRVILADANLDKVLSAYNKHRDKPIREQAENIIHLFTLTNLGAPAAFKYFDTTIDRKRYTSTKEVLDATLIHQSITGLYETRIDLSQLGGDGGGSSGSSGSSGSSGSSGGAVLGLEHLPRPPEISQFPLNPERLQALQHLVRKALEAGHIEPYTGPGNNPVFPVKKANGTWRFIHDLRATNSLTIDLSSSSPGPPDLSSLPTTLAHLQTIDLKDAFFQIPLPKQFQPYFAFTVPQQCNYGPGTRYAWRVLPQGFKNSPTLFQMQLAHILQPIRQAFPQCTILQYMDDILLASPSHADLQLLSEATMASLISHGLPVSENKTQQTPGTIKFLGQIISPNHLTYDAVPKVPIRSRWALPELQALLGEIQWVSKGTPTLRQPLHSLYCALQPHTDPRDQIYLNPSQVQSLVQLRQALSQNCRSRLVQTLPLLGAIMLTLTGTTTVVFQSKQQWPLVWLHAPLPHTSQCPWGQLLASAVLLLDKYTLQSYGLLCQTIHHNISTQTFNQFIQTSDHPSVPILLHHSHRFKNLGAQTGELWNTFLKTTAPLAPVKALMPVFTLSPVIINTAPCLFSDGSTSQAAYILWDKHILSQRSFPLPPPHKSAQRAELLGLLHGLSSARSWRCLNIFLDSKYLYHYLRTLALGTFQGRSSQAPFQALLPRLLSRKVVYLHHVRSHTNLPDPISRLNALTDALLITPVLQLAGKRTADGSEFEKRTADGSEFESPKKKAKVE

SEQ ID NO: 1496 - protein, 2002 aa, synthetic construct
MPAAKRVKLDGGDKKYSIGLDIGTNSVGWAVITDEYKVPSKKFKVLGNTDRHSIKKNLIGALLFDSGETAEATRLKRTARRRYTRRKNRICYLQEIFSNEMAKVDDSFFHRLEESFLVEEDKKHERHPIFGNIVDEVAYHEKYPTIYHLRKKLVDSTDKADLRLIYLALAHMIKFRGHFLIEGDLNPDNSDVDKLFIQLVQTYNQLFEENPINASGVDAKAILSARLSKSRRLENLIAQLPGEKKNGLFGNLIALSLGLTPNFKSNFDLAEDAKLQLSKDTYDDDLDNLLAQIGDQYADLFLAAKNLSDAILLSDILRVNTEITKAPLSASMIKRYDEHHQDLTLLKALVRQQLPEKYKEIFFDQSKNGYAGYIDGGASQEEFYKFIKPILEKMDGTEELLVKLNREDLLRKQRTFDNGSIPHQIHLGELHAILRRQEDFYPFLKDNREKIEKILTFRIPYYVGPLARGNSRFAWMTRKSEETITPWNFEEVVDKGASAQSFIERMTNFDKNLPNEKVLPKHSLLYEYFTVYNELTKVKYVTEGMRKPAFLSGEQKKAIVDLLFKTNRKVTVKQLKEDYFKKIECFDSVEISGVEDRFNASLGTYHDLLKIIKDKDFLDNEENEDILEDIVLTLTLFEDREMIEERLKTYAHLFDDKVMKQLKRRRYTGWGRLSRKLINGIRDKQSGKTILDFLKSDGFANRNFMQLIHDDSLTFKEDIQKAQVSGQGDSLHEHIANLAGSPAIKKGILQTVKVVDELVKVMGRHKPENIVIEMARENQTTQKGQKNSRERMKRIEEGIKELGSQILKEHPVENTQLQNEKLYLYYLQNGRDMYVDQELDINRLSDYDVDHIVPQSFLKDDSIDNKVLTRSDKARGKSDNVPSEEVVKKMKNYWRQLLNAKLITQRKFDNLTKAERGGLSELDKAGFIKRQLVETRQITKHVAQILDSRMNTKYDENDKLIREVKVITLKSKLVSDFRKDFQFYKVREINNYHHAHDAYLNAVVGTALIKKYPKLESEFVYGDYKVYDVRKMIAKSEQEIGKATAKYFFYSNIMNFFKTEITLANGEIRKRPLIETNGETGEIVWDKGRDFATVRKVLSMPQVNIVKKTEVQTGGFSKESILPKRNSDKLIARKKDWDPKKYGGFDSPTVAYSVLVVAKVEKGKSKKLKSVKELLGITIMERSSFEKNPIDFLEAKGYKEVKKDLIIKLPKYSLFELENGRKRMLASAGELQKGNELALPSKYVNFLYLASHYEKLKGSPEDNEQKQLFVEQHKHYLDEIIEQISEFSKRVILADANLDKVLSAYNKHRDKPIREQAENIIHLFTLTNLGAPAAFKYFDTTIDRKRYTSTKEVLDATLIHQSITGLYETRIDLSQLGGDGGEAAAKGGGLEHLPRPPEISQFPLNPERLQALQHLVRKALEAGHIEPYTGPGNNPVFPVKKANGTWRFIHDLRATNSLTVDLSSSSPGPPDLSSLPTTLAHLQTIDLKDAFFQIPLPKQFQPYFAFTVPQQCNYGPGTRYAWKVLPQGFKNSPTLFEMQLASILQPIRQAFPQCVILQYMDDILLASPSPEDLQQLSEATMASLISHGLPVSQDKTQQTPGTIKFLGQIISPNHITYDAVPTVPIRSRWALPELQALLGEIQWVSKGTPTLRQPLHSLYCALQGHTDPRDQIYLNPSQVQSLMQLQQALSQNCRSRLAQTLPLLGAIMLTLTGTTTVVFQSKQQWPLVWLHAPLPHTSQCPWGQLLASAVLLLDKYTLQSYGLLCQTIHHNISIQTFNQFIQTSDHPSVPILLHHSHRFKNLGAQTGELWNTFLKTAAPLAPVKALTPVFTLSPIIINTAPCLFSDGSTSQAAYILWDKHILSQRSFPLPPPHKSAQQAELLGLLHGLSSARSWHCLNIFLDSKYLYHYLRTLALGTFQGKSSQAPFQALLPRLLAHKVIYLHHVRSHTNLPDPISKLNALTDALLITPILAGKRTADGSEFEKRTADGSEFESPKKKAKVE

SEQ ID NO: 1497 - protein, 2015 aa, synthetic construct
MPAAKRVKLDGGDKKYSIGLDIGTNSVGWAVITDEYKVPSKKFKVLGNTDRHSIKKNLIGALLFDSGETAEATRLKRTARRRYTRRKNRICYLQEIFSNEMAKVDDSFFHRLEESFLVEEDKKHERHPIFGNIVDEVAYHEKYPTIYHLRKKLVDSTDKADLRLIYLALAHMIKFRGHFLIEGDLNPDNSDVDKLFIQLVQTYNQLFEENPINASGVDAKAILSARLSKSRRLENLIAQLPGEKKNGLFGNLIALSLGLTPNFKSNFDLAEDAKLQLSKDTYDDDLDNLLAQIGDQYADLFLAAKNLSDAILLSDILRVNTEITKAPLSASMIKRYDEHHQDLTLLKALVRQQLPEKYKEIFFDQSKNGYAGYIDGGASQEEFYKFIKPILEKMDGTEELLVKLNREDLLRKQRTFDNGSIPHQIHLGELHAILRRQEDFYPFLKDNREKIEKILTFRIPYYVGPLARGNSRFAWMTRKSEETITPWNFEEVVDKGASAQSFIERMTNFDKNLPNEKVLPKHSLLYEYFTVYNELTKVKYVTEGMRKPAFLSGEQKKAIVDLLFKTNRKVTVKQLKEDYFKKIECFDSVEISGVEDRFNASLGTYHDLLKIIKDKDFLDNEENEDILEDIVLTLTLFEDREMIEERLKTYAHLFDDKVMKQLKRRRYTGWGRLSRKLINGIRDKQSGKTILDFLKSDGFANRNFMQLIHDDSLTFKEDIQKAQVSGQGDSLHEHIANLAGSPAIKKGILQTVKVVDELVKVMGRHKPENIVIEMARENQTTQKGQKNSRERMKRIEEGIKELGSQILKEHPVENTQLQNEKLYLYYLQNGRDMYVDQELDINRLSDYDVDHIVPQSFLKDDSIDNKVLTRSDKARGKSDNVPSEEVVKKMKNYWRQLLNAKLITQRKFDNLTKAERGGLSELDKAGFIKRQLVETRQITKHVAQILDSRMNTKYDENDKLIREVKVITLKSKLVSDFRKDFQFYKVREINNYHHAHDAYLNAVVGTALIKKYPKLESEFVYGDYKVYDVRKMIAKSEQEIGKATAKYFFYSNIMNFFKTEITLANGEIRKRPLIETNGETGEIVWDKGRDFATVRKVLSMPQVNIVKKTEVQTGGFSKESILPKRNSDKLIARKKDWDPKKYGGFDSPTVAYSVLVVAKVEKGKSKKLKSVKELLGITIMERSSFEKNPIDFLEAKGYKEVKKDLIIKLPKYSLFELENGRKRMLASAGELQKGNELALPSKYVNFLYLASHYEKLKGSPEDNEQKQLFVEQHKHYLDEIIEQISEFSKRVILADANLDKVLSAYNKHRDKPIREQAENIIHLFTLTNLGAPAAFKYFDTTIDRKRYTSTKEVLDATLIHQSITGLYETRIDLSQLGGDGGGSSGSSGSSGSSGSSGSSGGGLEHLPRPPEISQFPLNPERLQALQHLVRKALEAGHIEPYTGPGNNPVFPVKKANGTWRFIHDLRATNSLTVDLSSSSPGPPDLSSLPTTLAHLQTIDLKDAFFQIPLPKQFQPYFAFTVPQQCNYGPGTRYAWKVLPQGFKNSPTLFEMQLASILQPIRQAFPQCVILQYMDDILLASPSPEDLQQLSEATMASLISHGLPVSQDKTQQTPGTIKFLGQIISPNHITYDAVPTVPIRSRWALPELQALLGEIQWVSKGTPTLRQPLHSLYCALQGHTDPRDQIYLNPSQVQSLMQLQQALSQNCRSRLAQTLPLLGAIMLTLTGTTTVVFQSKQQWPLVWLHAPLPHTSQCPWGQLLASAVLLLDKYTLQSYGLLCQTIHHNISIQTFNQFIQTSDHPSVPILLHHSHRFKNLGAQTGELWNTFLKTAAPLAPVKALTPVFTLSPIIINTAPCLFSDGSTSQAAYILWDKHILSQRSFPLPPPHKSAQQAELLGLLHGLSSARSWHCLNIFLDSKYLYHYLRTLALGTFQGKSSQAPFQALLPRLLAHKVIYLHHVRSHTNLPDPISKLNALTDALLITPILAGKRTADGSEFEKRTADGSEFESPKKKAKVE

SEQ ID NO: 1498 - protein, 2008 aa, synthetic construct
MPAAKRVKLDGGDKKYSIGLDIGTNSVGWAVITDEYKVPSKKFKVLGNTDRHSIKKNLIGALLFDSGETAEATRLKRTARRRYTRRKNRICYLQEIFSNEMAKVDDSFFHRLEESFLVEEDKKHERHPIFGNIVDEVAYHEKYPTIYHLRKKLVDSTDKADLRLIYLALAHMIKFRGHFLIEGDLNPDNSDVDKLFIQLVQTYNQLFEENPINASGVDAKAILSARLSKSRRLENLIAQLPGEKKNGLFGNLIALSLGLTPNFKSNFDLAEDAKLQLSKDTYDDDLDNLLAQIGDQYADLFLAAKNLSDAILLSDILRVNTEITKAPLSASMIKRYDEHHQDLTLLKALVRQQLPEKYKEIFFDQSKNGYAGYIDGGASQEEFYKFIKPILEKMDGTEELLVKLNREDLLRKQRTFDNGSIPHQIHLGELHAILRRQEDFYPFLKDNREKIEKILTFRIPYYVGPLARGNSRFAWMTRKSEETITPWNFEEVVDKGASAQSFIERMTNFDKNLPNEKVLPKHSLLYEYFTVYNELTKVKYVTEGMRKPAFLSGEQKKAIVDLLFKTNRKVTVKQLKEDYFKKIECFDSVEISGVEDRFNASLGTYHDLLKIIKDKDFLDNEENEDILEDIVLTLTLFEDREMIEERLKTYAHLFDDKVMKQLKRRRYTGWGRLSRKLINGIRDKQSGKTILDFLKSDGFANRNFMQLIHDDSLTFKEDIQKAQVSGQGDSLHEHIANLAGSPAIKKGILQTVKVVDELVKVMGRHKPENIVIEMARENQTTQKGQKNSRERMKRIEEGIKELGSQILKEHPVENTQLQNEKLYLYYLQNGRDMYVDQELDINRLSDYDVDHIVPQSFLKDDSIDNKVLTRSDKARGKSDNVPSEEVVKKMKNYWRQLLNAKLITQRKFDNLTKAERGGLSELDKAGFIKRQLVETRQITKHVAQILDSRMNTKYDENDKLIREVKVITLKSKLVSDFRKDFQFYKVREINNYHHAHDAYLNAVVGTALIKKYPKLESEFVYGDYKVYDVRKMIAKSEQEIGKATAKYFFYSNIMNFFKTEITLANGEIRKRPLIETNGETGEIVWDKGRDFATVRKVLSMPQVNIVKKTEVQTGGFSKESILPKRNSDKLIARKKDWDPKKYGGFDSPTVAYSVLVVAKVEKGKSKKLKSVKELLGITIMERSSFEKNPIDFLEAKGYKEVKKDLIIKLPKYSLFELENGRKRMLASAGELQKGNELALPSKYVNFLYLASHYEKLKGSPEDNEQKQLFVEQHKHYLDEIIEQISEFSKRVILADANLDKVLSAYNKHRDKPIREQAENIIHLFTLTNLGAPAAFKYFDTTIDRKRYTSTKEVLDATLIHQSITGLYETRIDLSQLGGDGGEAAAKGGGGGSGGGLEHLPRPPEISQFPLNPERLQALQHLVRKALEAGHIEPYTGPGNNPVFPVKKANGTWRFIHDLRATNSLTVDLSSSSPGPPDLSSLPTTLAHLQTIDLKDAFFQIPLPKQFQPYFAFTVPQQCNYGPGTRYAWKVLPQGFKNSPTLFEMQLASILQPIRQAFPQCVILQYMDDILLASPSPEDLQQLSEATMASLISHGLPVSQDKTQQTPGTIKFLGQIISPNHITYDAVPTVPIRSRWALPELQALLGEIQWVSKGTPTLRQPLHSLYCALQGHTDPRDQIYLNPSQVQSLMQLQQALSQNCRSRLAQTLPLLGAIMLTLTGTTTVVFQSKQQWPLVWLHAPLPHTSQCPWGQLLASAVLLLDKYTLQSYGLLCQTIHHNISIQTFNQFIQTSDHPSVPILLHHSHRFKNLGAQTGELWNTFLKTAAPLAPVKALTPVFTLSPIIINTAPCLFSDGSTSQAAYILWDKHILSQRSFPLPPPHKSAQQAELLGLLHGLSSARSWHCLNIFLDSKYLYHYLRTLALGTFQGKSSQAPFQALLPRLLAHKVIYLHHVRSHTNLPDPISKLNALTDALLITPILAGKRTADGSEFEKRTADGSEFESPKKKAKVE
